United States Patent Application Publication US 2015/0141320 A1 - sequence listing, part 3

SEQ ID NO: 52 - DNA, 729445 bp, Mus musculus
atgccttgttcaatttttcttcgttcttaaatcagttttaagtagcttttgttaaaattttaactacacttaaattctcagatttattggctaaaatggtttatactctgcttattgtttttaattcttaacgacatcactccctatgttaatgccagctgaacacacattttcagttagttagaataaattcccatggttccttactcccagctattctaacttattttcattgatgatgcatttgtacagcttaatttcaggttttacatttgtagcataggtctttttataagagaaaagtaagtgaataaggttagtccttcatttcattgttggaactcaggacctctcacatgctctgcacatgccaccacagagatccctggtcttgtacatatgtcgttatctctacacagtgctccatcttagactttgcatcatgctttctactccttcagtcttacaatcttttcttaatgttaaaccccaagtgcatgcctatgtttgctttgtattaaatgtgatctttctcagctttcagaacacagatattccattttaattacctcagcatcaatttcccttctaacttattttactcccccccacccccataagttgtttaggttttgatgaacaggaaacaactggcttacagacaaaaatctttggggcttttagcttgattctcttggggctcatttttgggggggttgtcatacaaacctttattatgttggaatatgttttctacagtcctacttgttctagggcttttattatgaaggcatgctaaatctttttttaattagatattttcttcatttacatgctatcccaaaagtcccctttaccccccaccccccacccccggcccactcctcaacccacccactcctgcttccacactttggtcttccttcttcttgagtttcgtgtgtcttgcaaattgtatcttgggtattgtaagtttggggctcattttttattctacccacttgctagcatagacatcttcagaagagtagtggttctatctatcaaagatgagaagaattcaagaaggtaggaaaaagtgagaaacaacctgaatgtcctaaaaggtacatgtgcatgtgtgtgtgcttttgtgtgtgtctgtgtctctatgtgtatatgcatgttatatataaaaatataacactaattctagaatatcatatattaagtacatagcatattaatgctagatatgtttattattgtaatttagcttgcctacttcattggtttttttttgttttgttttttgttttaaatatttttttattatgtattttcctcaattacatttccaatgctatcccaaaagtcccccataccccccccactcctctacctacccatttccactttttggccctggcattcccctgtactggggcatataaagtttgcgtgtccaatgggcctgtctttgcattgatggccgactaggccatcttttgatacatatgcagctagagtcaagagctccagggtattggttagttcataatgttgttgcacctacagggttgcagatctctttagctccttgggtactttctctagctcctccattgggggccctgtgatccatccaataactgactgtgagcatccacttatgtgtttgctaggccccagcctaatggttgtgatctggtttgctttctgttcctgtgacaaataccatgactgaaagttcacatttgtgtgaacagacacagcgtatagtgtaggctcagactgcttttgtccttggcattcatcctatggtcctggcatctccaatgtcctggggtgtccactgaagctgagactgcactttcatcaataccctctcctaacctctcatagtaccaagcctctgctgctctctacaatccctttatacattcaaaaccagtactatataggagacatacacatcaccatgatcatcttccagctcgagatgcagccttggccctgtctagaccacagcttctgtgccaactctgaccaaacacttcccagaaaatttcaccttaacgatgctggtctcatattaattgcagttaactttttaaaccccagataaccagcactgcttgtcacagtaaagaaaatgttttactttcacagattcttaataaaaatacgatcacacaaatgatcccgatagtccaggaccataagccaggtctccattatctcgtctccattgcactctgaaatattatccatgttcccataacagctcattaagatcttagcattcaatggcttttctagcctaaatctcccaaatcctccacctctcccccacaaaacagtctaagacataaagtccacatagtcaggtccatcacagcaaaacctcacattcctggtaccagcttctttcctagtttactgtgataaaacactgaccaaaagcaatgttaggtggtgggggggacgggggatggtaaaaggttccaattcatccttgatggaagtcaaagcagtatctttgagggaacaactgaagagagaccatggaggaactctgttttgctgggtcccctgtctggttctcagttgctttttttttttcgttttgtttttcttttcctttcctttctttttaaaatactaataaatttatttatttgttttacatctcaatacaagttcccttctcctccaagtactacagatcctccccggtttcctccttcttctctgagaatagagaggctccccacccaccatgagtatccctaccctaccctggcacattatcactggaggactaggcaaatcctctcccactgaggccagacaaggcagtccagttagagtaacaggatccacaggcgggtatgtaatagattcagggatagcccctgctccagttgttgggggacccgtatgaagaccaagctgcccatctggtacatatgttcagggagtctaggtccagcctgggatcactctttggttggtggttcagtctctggaagcccccaagggcccaggttagttgaatctgttggtctttctgtggagtccttgtcctcttcaagtccaccaatccttcccccaactcttctggaagactctctgagttctgtctaatcattgactgtgggtctctgcatctctttccattgctcagcctgttcttttttaccacccaggaagaccagtacagaggaggcacttcccacagtgtgttgggtctttctaaactcattagcaattaagaaagtgcccccccaaaacatgcccactagccaaaatgttggagacaattccacttgaggttcccctttcccaggtctatcaagttgacaaccaagattagctattagactcaatatgttgagtaaaatgataaattaaatctatgtgtatcaatctggaagtataaccaacttattaacatattttcttattttaaaaggcatattgcaaaaccatttttgtggcaagggtgctgaataatttttcttgatcttagatcccttgagtttctgacttttaccctacattttaagaatgggacagatctgtaagcatgagaacctgtctctcttttggaaggctgagcctcagcaattgaaaatagcactatgcccgatgtttacattttgatctcatccttgctttattcctttagcaagctgtgtattctgtttgccctacgattttctcccaggcagaatctatctcgtctgacattgagaaacagttaatattgatcttggtgaatggcctcctttgatttttgctacggagagatctcagtagaaattcacagatattttgttttcttaccaaatggaaaaccatgttccacagtcattgtgtccttttgtccaagcctactgttttgcaactcagtgcctcatctctttcatttggcttctctgtcactatggatcgttccctaatatttcatcctttatgcagactccttccttggagctgaacttggcagtagagtttgcctgactaatggagaccatatgctctgcaattacatttccccaacaacattcagatttgttagcaaatattgagaagacaagttgagactctggagctcaaagatctgtgaggagttggcaggagaaggtaagcaagtctgcagtttctcactcctggcaataaggtctgcttggggctggttttgtttgagtactgcctctgctttctattctgttgttttgataaaacatcgagaaaaagtacatttggtaagaatgaggctttttattttttttaacttatgggtttagtccatcactgaggcaagccaagggaggaacacagaggcagatactagcgcatggaggaaagttgcttactggagtggtccttgtggcttgttcagcttgctttcatatacaattcaggatgacctgcccaagggcgatattgcctgcagtgggctagaccctcccacatcaatcattaatcaagaaaatgtttcacagaaatgcccacaggccaagttgttgtaggcagttctcaattgaggtttcctcactccagatggttctagtctctgttgcgttgacaaagactaataagcatacgtacccagagatttggctttcaaggtatcaatcagattgttcttcaatagctaagcaaaccttttatgtctctgtaagggcatgctgtactctctcccacagatcaatttttaatatgtgaaccaataatttattacttcaactagagacccagagtcatgttattacatactgttttgtcaacaagtcccaataaaggaatgtaaacactaactaatgaagttagttaatgttggctaatgaagaagggtacaatctctaatgatattaatttttgacagtctatatatagtacatacatggaaccctctcaccagcatcttcttttctcagaagccaggtcagtcttagactaaggagactggtgtcctgtaagggcttcaaatccacaagattctgaagatctagactcaaatagtatcattgttactggatattattgacttgggcatttcatctatgggtgtgaagaacaagaaggcccaccccttaagcaagcttcaacccctgtgttttgatgaggaagaagcagggagactttgctcatttgtatgaatagcaaggaagggtagctagcatgggagcaggtggcagaagtgatccagtgttgacttctcaaggttctatggaatgtaggcagtgtctttagagcactatattctggagtcgcctgtagcagcatgtgaccctctcaaccagtgtggccctgtatgactctgaactttttaatgacaccagcgtccattcctccccaacactgctcatgcctatgttgggaagtaccctgtcccacagttgcaactgaagaagcaacttcatggctgcttctggtccacaatttcaccttcacaaaggagaagggggtgaaatgggaccttaggtaaccctccccacaccctatgggacagttacaaagacacaagaaacactccttgttttagaacacaaatacataaatttttaatctgcgaaaaatacaaaatgaaaccatgtacaagttatgtacaaaccctttttacaagacaagagagttatcactggttgttacagatgacagagttgggtaggtcatttcagagcaccagcatttattctcttctccagttcctgtctggttacataattcatcatagccacagtcaccatgccagcaatcaaagtgtgaaagacaaagaaacaaaccacgctcttttcccttaatgaatgtgttgtaggctgacctctgcatatgggtacctctgaattggttttttttttccctttgtcccctaaagaaatcccaaatgaaggttttggtgttaagtggggaaaagtctcttttcggcatctgtgtggtgggccgtgagccagacactttaggcaggatgtgattgtaccacctgggaatggaacgtttttaattaggatttccaggcagatctgggtttatgtttgaaatgttgcagttctggtcaaatgtgtacacagcggaaggagaaggggaacggctctggtttcgtggagacctggggcttgacttgtctcgttataggggctccttccccccatgactacctcctcctggatgactacctcctcctgtccttccctatgacaacctcctcctggatggctacctcctggatccctagggcaggaagttcggggatgctttgacaggcacatgtgttgtgtgtgtacatttccatcgaagactctaaacagcaggacaggtgctgtttcctaagacaggccctggggagcttcggggtcagctttggaggacaagaagaaacacagaagtttctcatgggataaacagaccaggggaaatctcttttcaatgtaatattctacctagaaaggagctcagttttcacttggccaaaaagcattcctgtttaccccggtccagaaaagccaccagaacaaggcgacctttgcattttgtgtatgaagactgttgcaactagaaggttctgggtgtgctatgcatgagggatgaggtacaacgggggtgatatgaactgatgaaaggagagaccacctctcaagacctttctgtgggtactttagagggcatgctgatgacctgggtaccccgtgtaccccatttccatggtgtaaaaactgaccgagaatgacctgctactttcccactcattccagtcttcatggcaaccacatgagataaagacaaaaggagaaattggtccttacagtctgcctcattacttcactatttcagatcccctgtatctcaaccctcagttactggttcattttctctattttaagccctcctttctgtttcccactctcccaatactaaaaagatattctgtcctaatcatatcagcttggtttgctccattgagcccctgaaaacttggctatagcctccagacagttctactgacctgtcatctaagcctatgttttcttcattgaaaaacctcatccagacttctccctttataattacctgaatcacaggggcgggggggctaaagggggcttcctcatgatctggacctcccaaaacatcttctcagctgtttgcatcttcagtccagaataccttcatgattgaaatggatctctcccctcctttttatagggatgaaagcagcccctttctcagctgtctaaattcttgtctcacattctcatctctcctcttctttctgtccctctgcactgctctgtccttggggtctgcagcaaaccattactttttatagactctttcaaactgcccatccttagaatccaagtcaaacttccacagctgtcatggtacttacttgctatgtagcccatccaattaaaagtctttattggatgcatgttctacataacatgtctcctgttgccaagaagggacacaagctgtccagcaacaggtgcacagggactactcgatcaactcatgaaatcattgatccatccatgttcctgaatgagctgggatgttgctcctcagcatacttaactctgaaacaccgtctagtctacaacgcttgattaactgcttcaaactgcttgtttcttatctcctgctctattggagggcagtgttctagccatgcttattttttctctactggctctttagggtgctcctttaagttggatttcaagcttactgcaagcaagaatgtgtcatactcattcctccaactaaattcttgattattctatgattttttttggtggtctccctggtgtctgttattatattagtgtctgtaaaatagtataaccagcaggactcttttgtaaaataatctgaaaatcttttcctttcctttaatctgtgtggtggacccatgggtgttttaataattgagtactgcatgacaaggtggaaatgtaggaagaaggtaggtgttcttcatggtgagctgttattgagtgcaatcacaggatctcaagttgctgagagatggttcaacttgagagcctatgtttctgtgatgctttccagaaagaatagaatgtctcaaaggcttcaaccccaaagggtacagtcaccactacccatcgctccttgtgcggccctttccatggttctctctgactttctaaatcaatgctctgatttcaatgtggctcttcaaccatccacttcctagttccttccatgaactcttgccatacattgttttcagtaagtacatggacacaaacttatttttgaaggtaagttgttccatatagcaaaatcatcttggtactagtgcattatagctcctgaaggcctctttcattggaaaaacaaaacaaaacaaaacaaaacaaaacaaaacaaaactcacgatccttgtgcctccagtcaaaaactaagtatttcctattgaaaagtctccacagcccagcctattatttttcccattcatgattcaagggaacctcttcttttctacgtaagtaccacctctttccagggcttcttaaagtgttgcatctatctctttttgttcttccttctagccttttgatatatactctgagttgtgcattttcatgctcaaaagcacagttaaaaagagtgatctagaacaaaaagtctaaaagagaatcatttctccatgaagccatgtgagactggaatgcaggggggattctaacaagtgtagggctacatgggtccctttcttaatcttttaaatattttaaaatcactcttaccataggtattcaaaactgaaatttaaaatgtcctctgcatagccttattttagtggtaatcttggaattattaataggtatgggctatgaccacttaaaaataaacttagtttaaataacctaaatgagtccaaagggactccttgttttatcaagaggttatgagatttaaatgagaaatcattgttctattgcagaaacatacttgtttaaaacatgggggaaacagcagaggcagaaagagaatctagtgggaaagttgaaagtgattcttcagtttgtctaagtttttgaaaatgatggctaaagagataagtagtgagggctactgtatctatgactttaccaccattccaaaagcagaaaatatggttaaaataaaaatgggcagatcttgggctagaatttaatgttcagtgaatttgtgtgatcttttggtaatcaagatgactctgagtcacttgtctgatactgatttttgttgtacttttctacctctttctatcattctttccacgaggtcctcctggacgatgatattgacaactcataatggcacttttgaatgtaagcagcaaagacattgtgctaacgtgggcacaaccagacaaatggaatgaaatgagaagtaagggtgagtgtagagaggggacatgaatgggaatagcagtagcagagtagggttgtccaaactctttctacatactattggagatgtgggctaaaaatgaagagactatccaatctccactgcaccaagacacagggaaggtgggaaggaaggctgtaaaaagaaaccagaatgactaaacccagctcatcagtggtggaggtgaggctgaaggtaaacctttgcatctccactctaagagctttcaaactggagaatatagaaatgaacctgactgttctttgtccagagcagagagtggatgctgtgtttagctcagaaatgctatatggataatatggccagagagccataattacagctctggaaaaaaaataatctcccagggcttggctgaggtaaggcaaccactgctttagttggtctgaaaaagaccttcgccatctccacgaaccaacctcatgtttaagtcaatgaaacttgaagaatttaaagaacatttttatagttaatagctaaaattatatgagtgctcttgaacttctaaatcaggcacagttggaaactttctgttctccattcaaaatatctctaatttcatacattttcccagtctacacttccaactcaacccaaaaccattctaattcctttactaaagtcttccaacacttaaaaacaaacaaacaaataacaacaaaaacaaagtgcaacttgtagaaggaaggctgttcttccaagtgacttagacgtaatcaatttataaatataaaacaccttaagtgaatgtcttctatttgctatagcaggggagagtaatttcaaaatacagttgcttaaacgaagacaaactgcattcatgagaaagatggtgatggcaatgatgtacacaggtacaatgtttacaggtacatcatcattatacaatgatgtacacaggtagtttctattttacaaatggtctgattcccaaagcatccaagcatcattagtttgccaagatagcttttctgaaaccctaatcagggactaaagatcagacccttctaatgtggaatattccaaagaggaccaccattggcctaatgtggatggaaagactatttaatcctacagagaactcagaactcaaccaacagatgcaaactgggaactttgcatgttgtcttgagcccttcagttcttttttaacaaatgttatttctgtttcaactgagttgccataagcttttgccagatggggccaccacatggtcattttctggacaatctgagaatcatgcttgacctcttcctcatttattactctatcatagaaggaaatggatttctactatctagggctttggaagctgattggtgagtggagggagtcacttagtgtaggaaactattagagccattgtggttgagaaacaagtttagatttaaatctctagctagagtgggaaatggggattatgcttctgagtcctgccttccatggggtagtgttgagaccattatttttctgatggaaaattatttaggtaaaaaacattggtcaccatgggagattaaggaactaagacaaattcagaggtaagactaattggaatgagtgtaaagaagagcctactatggttcaggaaggaaagaagagcgtggattgacatgaatgtacttaggtaaccccaaatgcaaaatcatgatgttaaaggaagtcttagctttcaggaatgctgtcaagattctggcagtggattctccccaccaacacatctgagttctgttggaaaccaagaaatgtttataagcccgaatataaaactgctgacatcattttagcctgagtagactagtgattggttataaatatttttgtgttaacaatccaattggacacacattatattcacaatacttttatagaactaattctacaaagtgtgacaacagagtaaccacagtctgacaagtcactgcaggacaacgcctacaaggtggaagcacagctatattggctctgcagggagtggacagaggtggaagctcattttgcctacattggtaattggagtccttagtggacatgtttccatagtgatcacattgcttttctctgatctgatttgtactatcataactaggtaccacagaatcatggcctaaagagttcatggaagagatgtcatgggtctgtaggggcaatttttgttggtttggaaaagtgttcacattttacatttctaaggaaataaaaatcacagtcacacccaggattctccagagaccctgatgatcatatcaaaggtcgatcactgtgaagttgaaaagactttctgagtcgttggaatgaaacagttgttgaggtgactgtacactgggcatgcatgcaacagcagagctcagacatcacgattgcatctgatggctagaaaaatcttttgaccacacgttgaagtggctgatacattttatttcattgctggtaattttccaaggcctttttctaacagtctatgttaagagcatgacttactttccttttggttgtttactggtttttggttggttggttggttggttggttggttagttggttggttggttttctttttttgtaagtattttagcgagtttgaatgttttatcccagcaattcaaccaaggaaagccaacaaatgaaaatctgagcaaaagtcatctccttgacagactaccgaaccaaaaatttgtggtaagcatgcatacttcttagatcctattgttaggtaaagtattcgttgatgttcaccaactttcaggctaaaagctctgagcagggaaaagaacatagcagactctcccacagtccacatgacttgcatgggtgccttagaagtatgaaacagggagcataaagaatggcggaggaggcctcaccatgagaacaacagagtctgctcttgggtgcctctggctcacgaccttcacattctaggtgtgcctataacccttccccatatcctgagctggttgcttaaacctgatctggcaactgcagaaatgttacaagaagctctttcttctaaatatataaacaaaggataagaaacactggaggaaaactgaaactacaaagataatgactttcaactgggaagataatgaagtttgatttgttaagagctggtgtcaatgcagatcaaaacatacacccgtccaggagagggggaaatattcacctccgctcttttgacttttttttttttttgatttactgaactatgtgcatacaatgttggccatcttaaatttgttttagtaatccatttcccttctttacaaattggggtggtgaccatcattctcctcaaagaaaaagagagaaagaagagaaatgtgcatcaaggaatctggccactaactcattttgattttgcattgctgtgatatatgggaagatatctggcaatgaaaaaaaaagaaaaaatatattttctttctaataaataaaaataatttaaaacactagaagctatacatgactattttagtatgttcatttataaatgaaatcattttcttttccaaaatacatggaagcagtattcaaggcaaagagaaagatctgtctaactttattttcttgcaattcttgcttattctagaatttccaccagtgattcagcatgtaagaggaagaaaagtcacgtcaccatttatgaagtttgtcaggctttaaaaaaatagttctggtctcctgggagtcaacattcatcttcaacttctctgattggagggatcaggctgcttgtggatttatattggttgatctggttagccatgtgggtactcatgggcttgatttgaatgtttctgggataggcattatccggctcatctgtaaaccatttcttttctgctaaagggcaaaatggatagagaacaagaaggagaaatgagaagcttaattagtcctaggttgagcttttggaaagttcattgaaaatgcataaaggtaatcaatagaagccggcagtgagtaattgctaagaaatgcagtgtacagaagcccccgaaacctgaaccatgcctctcctccctgtagcaagtgaagaaagaaatgaatgtgctatcatcaggactgggagacactaggaggagcccgacctcagagactatggtggagtagatgaacagcatccctactgcagcgcacgtagttcagaaggttttttcagtttaacctctttcccagccttgttttgattttgttatgataagcagactcaaaggcagttgttagctggaccacttctgtcttgtctgcatcccttaaaggaaccccacaggatttgctggccaataagcgtggaaaatcagaatagaaaactattttaaaagagaatttctaagtggcttttatttaaagcacaagaactctgtgggtatgaggtcatggaaggagttgcaggtggcagtatctcagctgactctaataacccaagctatgaacagagagctcatggtggcttgccactgtcatttctccactaagagctaagaagtggatgagtgagactgctgagtcagggcctttcgggctctatacagaggatcagtctcttagctgggtctaagtccaatgtatgcccctttccagaactgacattttctgaaaaataagccatgtgaagcaactgggcaatagaacatctagcgtggggcatcgtaggcttcattacagtggcttagggaaggaaagcaactttcaaacatattcactgcccaagagaggatgatccctcttgcttctgtttgttatgtttgttttgtttgtttgtttgtttgttgtttgttttattgcttataaaaccatttgcattggccttgtgtctggttgtagacctacctgttaaaatgattgcccagcttgctgtgtgtgtgcctttgcatatgactgtgtgtgtgtgtgtgtgtgtgtgtgtgtgtgtgtgtgtgtgtgtgtgtgtgtgtgtgtgtatgtgttggctcataaacgttaagcatctgtgatgacttcttgatcactctgccttttccaccatttcatgccctggctcgtcaatatggctgcctctggggccagggaaaaagcctgaggaaggttcaagagcccaggttaaccctcaggacacttcctgcctcttctatgctcctctctgtgattcctcctgccctggctatctcacctatgacaatgaagttcactttgatttgaacagattggctgagaggaattcataacactgtatcctcacagtgaagctaactgattaagcgctttaaattattccccctgacaggatgataaagttacaatctgttctgggatgatctacagctcgccagcctcctacagcttctttctacattcatttatctttttgtcaagcagaggttttcctttttttttttttctttccctgagcttcaattccatagatcttttaaagtcatcagcacatctgaattattaatgaggctttagaggcaagactcctgatgggctggttaaaaaaggttgtatagaaatctgggactgtgtacacatcaaaataatttcagctccatttaaaaaaccatttagttcaagtgtgacatagatgaaccattatgcatttgtggaaaccaatttttttgtgatctacgattaaactaacctttcagagaagagtaaagtgtgatagttatcatgttttaaaagcattgccaggtctctgaaacaatttccaactatgacttcctcaaacagcttatgtgcagagatggctctcagagaggagcctggtgtttatgctgtttgcccaagctgcccttggctcttggccgaatagttacccggaacgattttgctgaagggatttagtgctgggttgtaaggtaggaaaagtaagtctcactgatggaaaggggggggatgtgttttgggtgaaaaaccaaacagctgcaatttgctgaaatttttacaactgctgctgagaatacttgttgagaatttagtatttacagttcaattcaaagggggtattttgacctttcaccatggaaagagtatcaatttcctccaactgcctgtaggaaagacaacattattggcctcatttaagctcctttctctttacatttcttgtccaaaagagaaaacctagtcagtctagcccatgtggtttgagaatgaagcttcaagcaaggaaagggttgaaggcaaacaccttctcatcaggagttgaggttctcattgttcctgacaggacactgtttaattccagtgtctcaatgtctatgctgtggaggcatggtcaagtaagatgttgaggaaatcgaactagtgagatgctctggacagtgtctaaaattttgggggacaaaggtctcccaaacagcatcagaggggttgtattttaatggtcatcagtcactaggcttctgtgtaatgtccttcaggtaatatggggacaatatggcacacagaatcttgccatttaaggacaaagctgtgccaatggagaagtacaaaagtgaacactagaaggaggactcaaactaggaattctaataagtactgaagtagttaaggcaactccactctaatgcttggcttatctttgttctctgtggccttatttcatgcctgagacaagaggttctgtgatctctggggaccttcctggtaccagactcaaaatcaaaacgcaaacaaaacaaaataaaatacccctgtttgttcataaacttcttgtggttaatatatacatgatgacctcattctgaggacactgtgtgacctctaaggagcttttgtcataaggcacttagagacagtaaggaaatgacatgttcctatatgtgataagcaggctggtaacaaaataaaattgagaaaataactggaggtaaaaatgacagctacactattgtgagtgtcacacagtgggccaattaagccactaagtacactctggacacactatgtgtgttgggggggcaatgaaatggcactagcttgtggactagtatcaagtatacctggatctctctcacatactatctgctctgaaaaggttatgcaaagtatcttattgttaatcattctctatagaatagggttgagaaaatactcttccaaatcttgttagctatatcaatggaacaggtatcaatgacttactacacattcagctacatggtcagcaaataatatttgctaagtttgttactgttattcatgattcaggcactgtattacaatggctaagattagtgcatagactttggtgttcttcatattccatatctgtcctgtgaagattctcataagccctccatctggtttgatcatgagagttaaatgtgtttacagatgtaacttgctgggtagagtaccagtgatggctgccttaggcattagctttaaggttagtattggtataagtatgatgtaggagtgggtgacaccttctgaatgtagtatttgcaaatgaacttcttcaatggaggagccagaagcagagacctgaggtgtctaagttgggggctagcctgaagaatgtagattgttgccatagaggtgactcaggaggatcttgtgggtagtctttgcctggaaggtgaattaaagtaaggccgaatagttactataataattatagtatggtgtaatactggggagttcagggttgtgaggtagtgggtccttgtttctgatggcagttttcatgtgaaggatgtcctgccccgtggaaaaccacctatgtcttcaattgccagtataaggaaatgattggtttagaacaagagtttagagagttattatggtaaagaagggctgaattacctaaagttcccaaagaggagggaaaaaccatcgcactgtgaacacaggacttttgttggcactgtggttggtcagtgttgtgatcagccttttcatataactactccccagaaaagactgctgaagtggggagctgataacacagtaaaggcacgtggaataactggctttccatagcaccacaagctgaggctttgagagcaaaggcatggaagggaaagatcccatttggatacagaggagaagacagcaatagctacaaagagctccaatctgtaagggcaactctatgtggtttcctggattacatttctgataggcagtgtggtaaactccctacacttacaaaaccagatgcctcccaggcaaaactatgcatccagcctcctcctcttctacctcaggagaacatagccatctgaaacataagcacagtttctaccagactctgacaagtttccttttatctcatttctctgtaatggaccactctgactgtccatccttgcatccagccaaaccctgaggatactcttgcctcttaggtaatggagtttcttctgctcacttccatgtgcagtctccttatgggagatatttatccagctcaatgacagatgcctacagctactcccttatcatattgtgtcaaagcagggattggctgatggaagctggtggagaaattgatttgtaccctgtcttatcttttgctcccagaagtttctgtactttcttgttcttcaaggagtctgttgctataggaacctggaaggttgatataattgtctctattgggatatagacacctttaaggcattccccatgctgaaagatagtcagtcaaaggttcctctggtcacctaggatctcaataatgttgccatcaggcatagtcagtctctctagtccctaagctcacagggcttgtctccctggcttagaaacagaatctggctccaagagtctgacaccagcaaatcagctgtgtcaacacctcaggcattaatggctacttttccaagaataaaccaaggggatgcagataaattataagagagtttgaaatgggaaaatgatttcaaatacgtgttgtgtgtgcctactttaatatcctgtgccataagccttaatttcataatggaattggaaacatctccaaaatataggggagactggaaagttcaagggtctctttcaactggagttgagaaggactccaatagcagcttctagggatattaacaattccacagttatcagacagttggcgcaaagcttttcctcatactctccaaactcacttcactttggccctttccaaagcctgaccaaagcaaactgaatggctcacaaactgcttctcttccagaactggggatatcaccgagcttcaagctgtgattcttataaaatatgtgcatttttcttttcacagtgttctctcactttctaacattccttgtctgtttctagtttgggcaaggaagaagtagggcagagacaatacatgaagaacccacgcgcctccttcctaaaggagcctctcttctcctgaaagagggaatttcgagtcaaatggtaaatggtggaggaatgtcttcactctattaagaagagtataatatagaagtttcagctaataaaagagaggtcaccatgatcccccatgatcccgttgccaccagatatatcagtagtcactcatgatcaattctcaatgatctgtaattacccagtggggattatgtgcccaaagtccagagaaaactcccagatttcatctcatgtcacagtctgttcccattccagtcagttacagtctcatctactggagccactaatcaattgcattaaaaagacactttggattggcatctgtctgccccgtttgtggttgagatttaacaaatgtctgaatggcaggtggtaggagacacgtgtgagttctgtccagactgagtcatcagctccttcagaacctggcatgtgctctcaagtggattcacggggctcaacagctttgactttggttccttctgatcaaacaggaaaacagaccaatgcatttgccattaataaccctcctcctacagaccaaaggagggtcaactattaacagagaagcacatttgccaaatggaatagctgtgaatgtcttacaaaaacatctatcaaccggcatcattgttcgatttggtgggtcttgccaagatcaacacagagatgtgaacagaccagttggggctgggttcgggcagtggtgatggggccagtggaagaagctgggtttctcaatgggaaaatgcttttggacttggggcaaggtaccgaggtgggcagggaggccacgtgcagatttgaaggcaagccagatggagagaagttaccccccaattacccgacccccaagaacaccaaaacaaactctaagggatctagccatagcagcagcacagcctcattgcgctgagcaattgagaaagtggaggaagaaaaagaagaaggaagggagaaaggaagaggaggagaaagggggagggtggagaagcaaaacaaatgaaagagaaccacaaacagaacaatttaaataaaaataaacaataacagaataaaatttgtaactcctttttttttttaattccacaaaagtttcacaaggacaacgttatagaagaaaacccccagcagtggctaggtcatgcagaaccattaattgtcataccttggcccattctagtcatccttgttgcactttagagagagaagtaagctatgtgagttttacaatgctttgaaactgtcatttcctgttgagcactttaactggcacattcttatagttatcaatgttctgaaggcgtaacctcataacctcctttgcaaagaatgcatgaagatctctcatgatccaaaactaggggacatgtatacatatatataaatatatatatttatatatatatgtatatatatggtttatatatataattatatataaagagataactagatgtcatatataaatcaaatacataaggacaaaaataatttgaaaaaaaatacttccactcacaggacttttgaatttacatgtatacattgactgcccacccattgctggttggaatactgcactgcccctgtctttggtgtggggtgaggtggaggttctgacagagcctcaccattttttgtcagtaaaagtgcttgtcagtcacacagcaagcaaatctccaaaaccatcatgctggaggggacaggggatcaaaaatctaaacccaaaacattcaccataaaaacaccttttaaaaagagatgctaaagatatgacagatttcccccctcctttctaccccctgttctatcagtggatttctaaataaatatcccaaatacgttcacatgagcccaaggctagtctacccataccagaatttggttatggtaaagttggccaattcttcagaactatgttcttaaaacataatttgcatgcataaaacatctgatagttgcatattggggaaaaggtatctatctatcttccctcccttgatgaataacaggtttgttttttttttttttaaagaaaaaaaaaaaggaaagaaaagaaagaaattaactactgcaatgtgtttggcttactgttgcagccgcctccttccaatcttgaaatgaagggagaagctctctcccctgtctctcatctacctataggaattggctgtacatttaagagggttacctatgttagacctttcctgccagccatctgctttgggacagagcatcatgcagctgtgccagcaatttaaatgtggtcgctagcttttgtctttcttgaatcaactgtggctctatcctcctacattctgatttattgagcacgtcagctcctacaagaaaccattatctatcactgggtgtctccttcctgctctaccattgccccagcctgaattgtacttggcatcggggccctcgttagtcaaacaaaggggagtaaaaaggtcccttgagaatgcatggaaaaatacttgctcttttctgagtgttatttattctgtacataaggtaagtgattcaccttttaaaggatgtaaaagtcccaggaaggcagttcttaatgacttacatctgatatttatgatacatatggcttttcatcccaaatgtcaaaagtgaaagaaaaaaactagctatccctatggcagcataaggagacagaataacagtttaatatgtgatcaagccttttttcaggtaaatgaaatgactaagatttgatacatccaggagtggaaacctgtttttctctctgcattaaagttagaaacattcactcaaacacctgaaagacgctagctccgagacaaaaaggctttggtgaatacgttaaaaaaaaaaagtctctgacgctctctcacaacaagcagatacttgatcatcttttgcgcacacttggaaagcttttcaaatgttttgcgatacctcagcccagagtggaaacgatcaatgcgttttcattgctttttggttgcttgtttcaaacgactgtgtgctaacttattgtttgtgtataaaaacagagagagagaaaacaaacaaaaaatgaaaacgcaaaacccaaagcatcctgatgatcctgataaatcaggcaaacctccgttgcctaactctcaggtgctcccttctaacctgtgaactcatccctgcagtgagctatttatgtctggaggatgcctttacgttactttccccctggaagcataaataacttttggtccgtctgcttatttgctgttgcgctcaagggttttatggtggtgaaataaaaatgacaaccacatgcacactatcatacatatgcaaaatgtgtaaaaaaaaaaaagaaaagaaaagaaaaaaaaagaggggactatagggagcaggaaagttactctgttggaataccaactggggaaatgagtagcagatacagtttcacacacgggtgccggtggctacacatatcaaagccgctcttcctgaacgtacttctgtttgtcgcgggactccctggacttgggccggttcggccgatttgctgtggacgggatggagtggacggaggagctcttcttactggacgactgtgaggagtgggaggaatgagacagactggcccgggattggccagcgttgtggtcaaactgcatcaggcagaagatcaggtctgttggtacgagctcaaactcgtagggaggattggtgatgacgtacctaggcagagaaagcaaaggtattgcaggctgagtcaagcaggcacaccacgggactctcctgtaacctaaaagaactaattgcctgactgcttcgatctatctgaggaactgaatgatctacttgttccagtcgcctcaaatttgcttccaaactaaaggaaatcttcatgtttaactcaacaaggcagctagaagggcaggcaaagatgcaaagttagagctggtaatggaaaagccacaccatcattcatatgggccaaacgtacaagggtcaagttcacgacagtcgcacaattgcactgtaacttccattctagaacgtcttgacagtcacagatacacaccgcagggtctctttttgtcatacctagtacctctttaaccaaatagctccctaggtgtgagagcttgaccaaccctctgacgattagatcaggctttctctggctgacacccccacaactacagtgatcatcagctcattgcctctgcagcaatggacctcaaagtgtggtctcagagactcccagcaacctcagaaaaatgctgggtgttgttcccaggtatataactcagtggtagagcatttgccttgcactcgagaggccataggttcattccctagcactgcaaagaaggaagaaaggaaggaacaaatgagcaaactaaaaacaaaagggaaaaaaattttagtaacctgactccctgatctactgaatcacaagccccagggtggggctctgtaatttggtctttggaaactctgtaggtgaatctcctacttaccaaggtacagaaaaacattagtctgtgtgggaccgtgaaaggcagcctgtttggcttgctccaatagagtctcagtaaaaagctctacaaggaatggaacagtgagccatgttcccagtgaccagtgaccggtgcctgacaccacagagcccccaactccataattctgtgactataagtcacgtagataaagccccaagctccaggcattctggctagactccacccccacagttatctgactatagccaggtatgctcctccccacagttacctggcaacagcaaggtagcccagcccaatataaaaggggctgcttggcccttctctctccttaagctctcacctttctactctcatctctagccctccttctctttctcccttccccctctctccaggtggccatggcccacctctctctttctttctaccttctctttttctccctgcctttctacaataaaactctaaaaccatagactgtctctgctcatcaaggtccgctgtgcttaaaagatgggataggctttcctctaaagaggaaacctcctgccagaaggccttcttgcattccagccatggaccagaccagggactcttgcccctctctccctgccctctcctcccttcggccctggggatgacctaaccacccccaagggcccccactttgttctcagctcttccacagtgtccagctgcatctgagatgcccaagactgagaacctgttatctctggcctccatggggcccagagaccttggactgccccttgtccatcccctgccagacatccacccaggccaaatggaaagcatgctgcactcttcccgcccagagcaccagaaccctggcatgtcgcaggagttcgttcccccactccctttattcccccacacctactgccctgcaagtctgtaacaatttttagctctggctaagcactgtaattcccaagcattaaatatataaacattgttatataattttaaatgtacacaaatgcttttaccttatacacacctgaaatgactgtaatcatagtatttttattttaacccctcagctaattgtaatctatagatctgagaaatacctctatggccctctttcttagactatactatacaaactcataggtttgagtaattctaagatgcatccttaatgtttttcctgttatgagtttattaaattaagtcatatcagaaaaaaacacaaatttaaatatatatgaaagaaagtgagtcaattaaaatatatgaagctgaaatatcagctataggaaacaaatcagcaaccaaggaagaaatgcatgggaccagagcttgagattctgacttctataatggtaagggacctacaaatggtaagggactctacaaagcacaagttcttccctcaatggcttcacatgtactattagtaattaaaagaataaatgtttctcttcagtcctcagctcagtattagatttgatgcaagcagtgtgttgaagacatgcacacaatgacatttgcctggaggagacaaggaaaggcatcggtaccattgcattcaggtgagatggcagggtgggaagacacactcacctttttgtacactggctgggggtgctgaggtgggcatctctcagccggtaaattccaaaacaaagcatattatatgttttcagagctttgcagaacagatcaccataacaaccaccatcctgggagacaacaaagggagtgagaggaacatcagttcttatttgcctgggaatcaaggtctgggggaaagagaagcttgtttcctggtctctggagatggagggtctacgccaagagactgtggctgaagatgtcagtgtggctaacaacctggaccctctgtactttcactttggggatctgacaaccataggagcttcctctggtgtccccacaggtctgtctgtagctcaaaaaacctctgtgtttcccttacctgaggtgtgttgggtgtgtgtgtgtgtgtgtgtgtgtgtgtgtgtgtgtgtgtgtgtgacactggagggtctcaattgtgttgccagagagaagaaaggaaccctacaaaggaagcaaggattctatttctcccccaactcggctgtgtccactgtgatgggaccgggatgtcaaaactgcccaagtgataatgaaaaccactgcaagaataaaagagacccctgtaagtcctatggtgagaagattcattcagatgaggactgtgtgaaaagcacaatttgcagacctcagagatgtctaggggaatgaggatgtgggagtctgcaggcgagataactgggattcaaggtactaatcagttcacaaccacatcccaagttctggggctcgactcacaaggtgcacaaggtgaaaacagtgttcttgtttggaaatgaatcaaaaattctgggcttcatgcagacacatgactccaagcagactttatttcagaatggcatgacggagtgaattaaataggaacagagagactaactgtatatctttgctatagctggaatcaggatgatgggcatcatattagactgaaaaggttctaacatcttacaattgttgaaaacacaagtctgattcaagtgtataagtaagcaagtaataaaaaagagccactgattatggaattccttttaaaatggccccagattaatgtaggtcctagcccacaaggagacattggtgtgttacaaaacaagacattctccacaatgggacattctggggaacactattttttgtgcaataagtataaatatcccgaagactcacggttccactcctaaaactccttctttaggtgaatttggaataaaagtcaaggtgggacttttcccaaagtgcctgacccaagggagtacacagaatccaaacagaggctctcctctcctccactaaaggaagcctgggaaagagtggctgggtccagactcagaaaccctaagaccaattagagacatcaagacatctaccgtgctggttgagaccctgccactttggctaatggtgctggatacacatgatggtcttgatgcttcaaatcccaccagaacctggatggtactatgaacaaaatatcctcaaatgaagctgtgtctatagagtccagtgactgatcagaacttcaatacactggcaagattagaacgttgcaacgtcagaagctcattgcctttgggctggttctagccctctacaacagctgccgattgccctgtcagaagtgctctctgtcagaactaacatcttgtgactaatacaaacatttcaaaatttattaattagcagaccactaagtgccaccagcccaaaagttataaatgttaccagacagcatccagggcctataggaaatctctcagcctgctgtatctgcttctggtgtatctactgatgaattttaaaattgcctcaatttctagcttccttggttctgtgaaactatgcaacttcatgaaactgtcttcatgtgaaaacaaggaatttgtagtatgtaaagatgtgttccttagccattaacctcccaaatggctctagaataaagtatctcttacttccctttaagatgagtgctataatttttgtgtcaacagtatgcagatacaaaactatggtaccagggtttggggccaagaatccccatgctcaggtagagtcaaagctgagtatcaagactctgctaaaatgcttaacaaccttggctgtgttgtgttagcacctgccccttccatctctgtgaagaaaatacccaaggaaggcagcagtggaggaaaggccttcagcatcgaagccatgatgccttggtgcaaatgccctagcgcctcagttgccagagagcaaagatctggtaggtgaatttgcaggaagacctctgtataaagtgtgggtcctggtaactaaggctccataaattccatctctttagtctattacagtggaagagagacacacagatgcctagcttgtcaccatccaacataggtcattcagatcatacttgctacagacattggactcaggagttatttgagctgtagactcacccctaagtctgcaaagggaccatctaacagggctaactgggccactcggcaacggtccctgttggccaatgtctgcggagtgctgtagcctcctcgaagtgcattctcctcagctattagagcctcgagctctggtgtggctcctcctgtcaccagggtccgtattagggtgaggatattgtcattgaagtatgtctggagaaagaaggtagaagagaagcattcttaagccaacaccgaaaatcacaattgatgtccaaattacaacttttcttagtatctcccatgaaagattctggcctgtctttttgaatacttgtctgtgggaagggaaaagacagcagcctccaatcctttcggtcttttctctcccactgcttctactatggaaaccttacttaaaaattcttttcagaggatttttcttgaaaggaagttgaaaagaaaggtgccccccacccccccacccccaaaaaaccctactattgtcaggtatacaaatacttccttgcttctgtcagcctaaacatcaactttgacgctggagacaaaataaatgcagcatgcctgggctgctatccaaagaagggcaacctctgagagcctgtcacccatatgttaggaggccacccacaaatggcacaacttccttctctatggaatgagatgcccagagaatctaggatgccccacactcagtgacttatcgtaggctttgataatggctggacccagaaggcctcgccaatcaaccagctgcataaacctatgagctgagtagtttagtgtgcatgtcttagattttttgcaaatagcctcagctatctgaggcaaatatgggtgattaaagaactttcccctacatgtacatttctctcccacctggaatatagtagcattcctgtccggaagaaggccatgggggctttaaaaatattaattaaggtcaaacaaaaaacaaaaaaccttaaaacagcacaagttgcccagccgaatgtgagaaaacaccaggtaaaggtggcatgttctattttcctccatgagaagaaagcaaagtatctcaatgaaatcaaacccaatcctggccatggcttttggagttctatgtgccttgtgagtttgttagaaaaggcaggtgccccgtgttccatccaatagctgactgtaagcatccacttctgtgtttgctaggcccaagaatagcctcacaagagagctatatcagggtcctttcagcaaaatcttgctggcgtatgcaatggtgtcagcatttggaggctgattatgggatggatccctgggtatggcagtctctagatggtccatcctttcgtctcaactccaaacattgtctctgtaactccttccatgggtgttttgttcccaattctaagaagaggcaaagtgtccacactttggtcttcgttctccttgagtttcatgtgttttacaaattgtatcttatatcttgggtattctaagtttctaggctaatatccacttatcagtgagtacatatcatgtgagttcttttgtgattgggttacctcactcaggatgatgccatccaggtccatcattttgcctaggaacacagggctcccaatggaggagctagagaaagtacccaaggagctaaaggatctgcaaccctataggtggaacaacaatataaactaaccagtaccccctggagctcatgtctctagctgcatatgtagcagaagatggcctagtcggccatcagtggaaagagaggcccattggtcttgcaaactttatatgcctaagtacaggggaacgccagggccaagaaagggggcgggggagaagaggggggagggcacggaggacttttaggatagtgttggaaatgtaaatgaagaaaatacctaattaaaaaaaaataagaaattgaaccaatagaaagaaagaaagaaaggaaggaaggaaggaaggaaggaaggaaggaagaaagaaagaaagaaagaaagaaagaaagaaagaaagaaagaaagaaagaaagaaagaaaaggcaggtgcatccttagctgcaacttgcaactttttggaaagtttagctgacagtgggtcactgagaacaaagcagactgggatgagggctcctctcactctgtcactagctttgtgtcatcctgtcctgagcgtcagtgtttacagtcacttgaatcagcatggttattagtattaagtttatgttccttattaaaacactcaaaggaagagcacatagaattctgactgcaaagaatgctggtaaagttacacgcaggctatccagctgagaatgtatgctcatagttcaactgttccctggtgtgaacaagcagagcttaggatacccaagggagcagatgcatatgcgatggctaagggggttggagtctcagggactgccctcctttgggtagcagcccagccactgcattttattgtctccttggagtcagagtttgatgcttgggctcacagaggcaaggcagtatttgcatacttaccaaatcctctgagtttttgtttttgtttttgtttttgtttttgtttttgtttttgatcgggatcccatagtggaatgcttttctcagaagctgtggccttagagagttctggacctttttggtctcagtgtcatcacacataaaattgaatatcagagcatatataggattcccaattcttagcacctgaaggactgagaaactcagggtccaggaagtgctggtaaatatgactgacctgatcccagagacactgggggagggactgttgttgatgacagaagacagtcactctcatccccaaatatcccttgacagttctttcctgttgcagtttttgtcctagaagctggagggccattattgtccttcttccttgtacctgttatctctatcagcctcagtgcccaagatctctctagaccagtggttctcagccatactaatttctgggactctttaatacagttgctcatgttgttgtaaccccccccccaccataaaattatttttgttgcaacatcatagctattattttgctactgttatgaatcataatgtagatatctgatatgccttatgactctgaagagattgtgatgcacagactaagaactgctgctctagactaaggaagagcacagggaaggtcctgtagactacatactggagcctgattacacttaccaatggcatgttaatatttcccaaagttttccctatagtctgatcccctgccctcagaagcagaggaatatcctcccgagtcccatctaccatggtgaataagggagagctgaacacaaaacttacaggtgcctctctgctccaatcaccattctagaccactggccaggagataaatccaaccataggtacatagatggcaaacattcataaccccgtttgctgacacaccgtctacccaaatataaagaaatgagggacatttttttctttcagaaggaaacagttttcaagataaaatgcagatgaatctgtttgattgagtaggtagtcaccagaaagtaagcaacagtagagtgatgcggtctgactgggacaactataacactcctccgaggctcagggaacgagaaaggacaaaactttctagatgtaacatggtcaatgcacttattgatgacagctatagtcatctgcacaagaactacacaaaattgagtcaaataatatttcatcatggatagggggaggaaccagagagaccccacccctcctgtaggaatgattggcagttaaaaactgttagaggaaaggctatcattttcctcagtagtgtagccacaggcaaatgtccttgttctagtaaatatcctctgactcaagcttgggtaagaaaccctaattaagctgagtgggccacagacaaaatgaacatggaaaagtagaagtgagaactatggagacaaggagtttcagtgggacagagaaatgaaaagaggggaatagaactgactacaattcattatatgcatatatataaatacacacacacacacacacacacacacacacacacacacacacacacgcatacatacatatgggtaaaaaaaaacccaaaaatatactaaggagcatatagggcagatgttttccccttataattaggatcaaaaggaactactttcatgactttaatcttaaattgcactggaggttctagccagtttgaaagaaataaaagaggcattcacattggaaaagaatgaagattatgtgcattagcaggtggcatggcactgtattgaaagtcccaaggaacgcactaacatgatcataagtaataggagttcgggaagatttcagggtacaaaaatcaacaagcaaatgtacaaacccttctcctataaactttcaataaacaagaagaacttaagaaggaagatgcttcagaagaagtttgttcaaggagttcacaggctggtgtactgaaatctatatataattacaaaagatatgaatgaaatccaaataagtggaaagatatcccatgttcatggattggaagatacaattagaataagagcaaacccataaacatgatacagttccagaacattcctggaatgtttttgtatcttgtaatattttaaacttatgggggaagagtatgtagaaagtaaaaactctctgtaaaattagtaaaaatattggagaaaagtgcattttataagggagtagtatcaagtgtttaaagtcccccaataacacaactaccaaaaagcaataaatttgaaaaacagaaaaaggatgaggcctcaaaacaagattgacacgtgatcaaaagacccaaagaggcccaggatcagtagccacagggtgacacaagccaaagtcgtagtgagagattgtctttacccaatgggatagctgtgataaaacaagagacagatagatagcaggaactggtatgaatgtggagaagcagaagcccttataaacttccagtaggacaataagcagtctaaccattggaaacctgtctgggagttccttagttggtaaacttcgagttaccacaggatccacaaaccctaaccatacccaagggaaatgaaatacacatcagaacaaagacccaagcagagaaattcataatggcatcatttgccattgacacaaagggctagaaacaaataaaatggcaatcagctagtgaatgcatccccaactgttagaaccatggaatcaattatctgtgcataaatagaaatagagcactgatacatgctacaacatggatgaatcataaaaacaaagtaagtttttatttatatgaaacatccaaaagagtcaattctagagagatggatataaatatcagtgggtgctcagggctgcgtagctaaagtagtaaggaaaacgaggacagatttctctcgaaagttatgagtatgttctaaaagggattcttggggatgtttatatatgcttaaaaaacataaaactgtttacttgggtgaattttatagtctattaatattctaataaaacacttcttaaaagaactggttaaaagataattacatgattaaaagataattatgtttgtaatggctaaattcttatctgtggagtaataagctgtaaaactgaaaagtatgtaagcacacacatgcatacatgcacatgggcacatatgtagacacagagagagagggtgtgtgtgtgtgtgtgtgagagagagagagagagagagagagagagagagagagagagagagagagtaatggggagtgttttattgtcctagaaaaaaaaccagaatctgacaaattctgaagacagtgatggatatgctaaacagtagtgccatattttaaaagcatgtaaataattcaagaaactaaggcaagaaagcacttcatcacacaagcaccacccctcctaaaatggagcatgaacctaagaagcagacccagggcttcaccaaagaaacaagagtcatgccaagccctgtgcccagtgaatatctggatttaaattattaaatgaagaaagaaagtgactagcaatcctattcttagaaaaaaagagaaggaacagcattaggtaaatgggactcccataacaaatgtgaacgaaatgccaactaagtttgaaaggacagatttgttccaaggactctatagactataaaactgtcatcctaatttgtgaaaacaattggaatgattctggatcttggagaactgaagaatttattcagttcatttttaaagatgatttcattttagactattgtggggaggggttgtgcatacagtacaggtgcctgtggaggccaaaagagggtgctggaccccaggagctggagttacaggcagtttggagctgcctcactagggtgctaggaattgaactttggtcatctgcaagagcagtatgaagcccagagctgctgagccaactctccagcctgccatttctattcatttgatttttaaaagatactcagaagcaaaaactagctttcttaaatacaatttgactttttttttaaccttaaaaggtttgaaaatactggagaggtatatcaagacatgtgactgtgcaatgctgtcatgaggctggagaaacagctcagtcaatgatatccaccatacaagcatgaggatctatctgagttcagattcctgactcctcataaaaagacaagtgttggtgcatgcccgtaatcctagtactgagaagacaaaaccagatgaccccaaagctcccatgctcccagttcctggaatccttgagatcctgtgtcagttggagattctgtctcacaaaatgaggtgaaaggtaatagaagacaaatgatattgactgttagcctctttcacacacaagaaggcacacacatgtgcaaatgtaaatgcacaaaaggctgtcatacttgtcacttaaaaaacagtgcagctttttcccgccatatcttagtgatgctgcagtggtggcatactcctttgagcttcaccgtgctgcccaagaatgacaagaagaaagatgatagaaagtcagccaaaaaaggcaaaaacccagtaaataaaactggtgcaaggcaaaaaggaagtggtccaagggcaaggctagggataagctgagcaatctcatcttgtttgacaaatctgcataatatgaactctgtaaggaagtacccagctacaagcttagttctccagctgtgctgtctgagagactgaagattcgcagctccttggtcagggcagcccttccttcaggagatgcctagtgaaggacttatcaagctggcttcaaagcagagcccaagtcattcacaccagaaacacaaagggtggaggtgccccagctgctactgaagatgcatgaacagggtcaatcaaatgtacatttgagaaaataaaactttactaaacaaacaaaatactatacaactgagtacaaatgtcaaaactaattctgaaaagaaaaatgacaacataaaatcatctattagtacaatgtgaatgttataattcaaaaaatgaaatagaagggtggggagaggaagtaatgacactaaaactggttatacaaggagaaaaacaagagataccaaggttttctagatattaatacttaaaatatcagttttgagtgtatttatagaggggaccattaaacactaactagagctaaacacagaactatttacaaatttaagcatcactagacataaacagttaagcatttaatattaacctatataccaaaagatgaatggtaaaaggtaatcatagaatcaaagaaaaggtataataataataattaataataaagtacagatgtagttatatacagtataacaacataatcagctaaagaatctataaaataacaaagaattttcagatctattgtaaaacaaaattaatgccatattagtatttttatacaaaatgaacagaacaacaaaatatattataagaaaatttctaaaatatgctgagttcagtatattgtgataatagctaacatttacaaaagagctccaactatttatggataaaatgtaacaaacaatagcaactacacaatgtctcaggggatcctctaaatcagcctttctcagccttcctaaagccccaaccctttactacagttcctcatgctgtggtgagtctaaaacatatcattatttttgttgctacttcaaagctgtaattttgctactgttatgaaccataaaataaatatctaatgtgcaggatagctgatattcaacctctgcaggggtcctgatccacaggttaagaactatgggtctaaatatgctgaatgtctagcagcagatgaagatccaagtgaaacttagaatagagactacttaaatataagggatatttgattatgacacgcaaaaaaaaaaatgtcgtgaataaacctgaaaatataaaagcagttcgaagacaaaagcattataatgaataaatctatgctataaattggtgtgtgtgtgtgttttaaattatgctttcctaaggtgagtagcatgatgaaaaatgaggccataaagcaatgaactatcaagaggatatttaatgaattgatgagcctagaaataatgctttgaaaaaatatcccaacaacaataagatcataagttagaaggagaatatcatccaaagtatataaaataattaatgtcaatctctttattaccagtctctggacatgaataatggtacatgtgtggggactagaggtgttgttcaattgttaaagacatgtactactcagaacctatgttggattctgatcacccacacctctacaggcaaattcactcacatgcacatgcctacccacaatgacatgtacacactcataattttaaaactgagtaaatattttacaaagaattgtttttgctctaaagcatgaaccacagtaagagtcatctgcaaagaaagactgttagggaaaaaagaccacctctgtttcttataacatgggacagagctacttgttattttacacctagtcagctaagtttgatctgtacctaactgtaggtttcacatggacttcaaaagacaactggatacaattacattaagtgacttttggagagagctttatatttccgctcaagttttacagtaaactttttctggccactatggctaggattagaaattctatcaacaagaatgcatacttcagtggttataattattaagatgcagggttggttatagccactgtcaggtttttttttttaattaacttttattgggactcagaaatgctcatttgtttatgtaatactttcagttacttcaggataacaacagctaagggaagtagccatggctgccactacagctcttaagaagtgaaaagtctggtcatccaggcttttacagagaaggttggctgatccagtccagaaaccatcacacatcactggacaagggtgatttctccacacgtggattgggggaaactgtctataacaatgattgaattaataacaaaacagttatatgaggtatattgtgcatatgttaacatgttttgagaaaattatagtatggcaaaaatacattttggtaaaagtttttaaagtagaatctcatatgcattacgattaaaaattatgttaaaaacatagatctgaactgacagatacatctgtattttgtaaaaacaaattcttgatctaaaaaaatttccattttatttatttcataggtttttctactgtgaaaatgttcattttaaattctcaaaaaggaaaggaagtatcaaaaacattaaaaatacaactaaattattcatctcttttgatagttttttatacagcaagaagtctttagggataaaaactgaaattatcaaaagaaaattttatatatatatatatatatatatatatatatatatatatgtatatatgtatatatatataaaatttacaggactaactaaaaatgaaagtgtatatattgaaagctatcataaacacagttaaaggtcctcctagggaaaatggcaaatggcagcacagaataccacagacatgagatggcatttgcatacccatgataggagcgtgtgggcacacttattctggggagataattaggaaaggctatcatgagcttcacaaatgttcatatctgctcgacatacagtaggtttgcctcaaacaaatgcactgctattcattccaagactcatgtacaaaacgcataacccttgagtgttaaaggttccatatggaatgtgtacaaaaggcccatgtatggtctccagcttggtgcattgagaggtggtagaacccttaacaggtgaggcctggagggaagttgtctcatcattgagaacacatccttcaaaacactgtgggattttaatctctttctgctacataccaaagtgaaagcccaatgaaggcccaaggcagccaggccaaccagtcatgggctgaaacctccaaaaccatgaaatcaaccttgctgtagattttttcagatatctattatagtaattgaaagctaataaaagggactattattgtagcaaaatatcttaaaactacccctcaataaagtaaaagattgtggtctattttaaaagagagtatcacgaaatcctatgggagctttgcaagttgtgacttttttaaaaaaaaataacatgttaaattctctcaacaaaatattacctaaaaagaaataattaaccaatatttaaaactggaagttttagctattattttttatctatctatctatctgtctgtctgtctgtctgtctgtctgtctgtctatatctattcccatctgtctatcctatctatctataaaaaatgcatatatatatttgcacataccaaaatagtaaacacttttctttagtcttggaaatacaaaccacttgaatatttttctatattcttgtgcttcctaaattttccaaaagaaaagtggctatctatctccatgtggaaactgcaatctgtttattttaagcaatgagtatggtagagttacctgttggaatatacagataaggtccacatggaaggacgtagtttggttgaattgttgggattttacctcagcatgtatttaaatgatttatacagagacactggcactaattgagtagtcaatagtctccaggcctgcatttacatgtaattcaaagacagtgtctcaaaatggtccatgagtggttcagcttgaaagtaggtgacaaggtttcatacaggactaggtgaagaggaagggtctgtttcagtatcatgaggcaaaacacactaggactccaaatactatcaaagactatccttgcagaagataaagaagccagaatgtacaattattttgtagattaatgaatattctggtgtagaggatttgtagactgtgaagggcatgcatgaacctttgtctcttgtgctcctacactctccagactttcctatgccccaccatgaaccaagtccatgacagatgtgatgaatgccttaggagactcttctgcatgaaacctgtagactgaaaagattattcacagatgtcctgcccaatcctgtgtcactttggtggctggggagcaaatgggagatgaacttgattcttatttgttacctgcagccaggacacctgtgcagtctaaagaattcagaggccgcttcttgggaagagaagaagacactttcttgggaaggctttctttgtagtagagtaagctgtcatcctgattatgagattttaaattttttatgttatttatttgtgtgtaagtgtgtgctatggggtactggtagaggacagagaacaacttgggggagtttattttctccttcatgtgagacctagggatcaaactcaggtcattatatttagcagcaagtgcatttgcctctaaaccatctcaccatgccctacagtataatctttaatcctttcttggctactcaatagctatgataatgggaaagttacccaagttttctatggtcttgacccctcatccatataatagggaagaaaaaagaaaaacacaaatttatagactagtgttaaacaagacaatttgtgtaatttcccatatgcaaccagtactcaatgaattataatttataaaaaagaacagttaactcccgatgcagccaatttagaatatgcccatactttctgctcctgtgttctcatctctaataagggagggctgccttcaatcatgtgtgaggttcccttgacctctagcaatgagtgactcttgggtcttgtaaggacacactgcaaaatcgtgaaaggctggaacaagggcagaggaattgcagaaggaagagctgaatctgcagtgccacctagcctaatgtgtgctggcccccgcctgtgcagctccacctcactagagcatcttctctctacttttttttttttaagtataattactggagcttatgtttcacagttaatgctgtcaagccttttaaactaattggtcttttatagaaaatttaactgaaaattaacacattttttaataacattgccttaactttaatggcactctgcctttcgtctataattgcactaaaattgtcattttccatgtcatatctgccattttttatatttgctggttttcatagtgtggattttttatttttagtatttttctttcacgagcaatgagaactatttcaattattttctcctggatctgccttgcctggtgtagcagcaaggggtatgttcttgagtccagcacaatatcctgctgtttgctgctcagacataacactgctgctagcccatctgccctggctgcacctgcggactgcctgtctgcttgtgagcagaagaaacgggggctcttggatggagtataagagatgcatcatgagcagtaaatagctggcatctctagaagagcagcagcttatcctgggctgacagttcagccttcaccataaggctcacccagggtttgccccactccaggaagttatagtacaggtagaaagcaggggaggaggacccatggttcagaggaacatgttttccagtcttagtaatacaaatcttgttatttctgacatcaagagaccagttcatatgagacatgaaaacacagacatatctctcctacagacttctgactcatctatctaaaagctcccgggtcttatctctctaaacagtggttctaggcctgtctaataatgcaacccttcactatatttcctcatgttttagtgactccaaccataaaatcatttttattactacttcctaactgtaattgtgttacggttatgaatcataatgtaaatatctagattttccaatggtctttggcaacccctttgatagagctgtttgactcccaaaggaatctcaacacataggttgaaaacttttgttcttaagcatgagtacacgcatgtgttcaggagacagaatgagtaatcagataaagatagatagatagatagatagatagatagatagatagatatgtgtatgtatatatatgtgtatgtgtatgtatatatatatatatatatgtatatatatatatatatacatatatatatgcatctacaggcatgtaaataacacatctacagctctgttgtcacatgtgcctgcttgttgaaagaccttcatattcctttgtccttctccaagtactacaaagacataaggagttgttcacatcacgcttaattagcatttggtctcaactgatttccagacaatggaaaagataaacaagggctggtggtgaatcagatctagacgcttcaggttgccttgaccctgtgccacactgtcccagttactccatgtgctttaaagtcggtaggcgttgtgatggtgcctgcagatggaggctgtggttgtcttacctctgctcctgctctttggtggaacctcattttagctcttcctagttagggctttggtaattgaccaaactacattctttttcataaatgaaggctggcgtgaaatacaaagacatcacaggtagcattttttgtcaaagggtctggatctaattgtctgtgttgagccagacctcaactggagttttttcatcctagataacagagcaaggtctggaataatttggctaggattttgattgatgacaggaaaggacactgtcagtgggcctgttgatatgccttgctccaatacctaaacctgtttctcccacactgtggtctaaaagatcagactgtgttattgaagtgttacatagttctaggccctcaataaccaatgcagctaataagaaacatgaaaaacaagtactaagttcctagattgatttttctctaggctatgatgcaggaaaaatactgcttacaggctatgacatctgtgtggcacaagtcactttgtcccaacacttcaattttgatatcgagagaggttgaggatggatgacctttaaaaacagtgattagaagctgggagtggtggcgcacgcctttaatcccagcacttgggaggcagaagcaggcagatttctgagttcgaggctaccctggtctacagagtgagttccaggacagccagggctatacagagaaaccctgtcttgaaaaaacaaaaaacaaaaaacaaacaaaatcagttcatttcaacttctcatcctagtttctgagaactgactccctagtgatgctgttcaatggtgagtcttataactcatatgcggatatgccctgattccacactgttacatgccccaactccaggctgtcaatcacgtgtccctttgtgcagaagcttcaatcccatcagcttcagatcatcaccggcttcacaagtatttggcctgctctgttgtacagcttcactagttcagaattcccagtaatttataaaaacacaccctttataaatgatgtatctgatccgacctggggcacattgactgcctagaaatacaaatgttataaatttgagttttaaaaagctcttaatggtattttctcttctgaaaacaaaacaaaaaaaaattctcataaacagcttacttgtatgtcagtaagatcagagttctaaaatcactgaaattaggatcaaaattaaagtgacatttctaaagagatgagatctggcctcctacagagaatttggtgctttactgaacccaatcaagcagtgtttattgttctttccaacctgctcaagagtttgtacaaactgggccaacattagcagcagctccaacgtcagtcacagtatcccaggaaaccaggaggacccctctatagggcccagcgattcttcttactggctacaaaagccaccaatcaaccttaacccaggtgatcttatgtcataattatttttaaaaccataactctaatatttcactaagatatgtttatatttgtactatgttcagtaataaggaataaactaaatacatctctgaaagcctcatgtcttcctcttttccttacacagtaatcctttggggattcatttttaatgaatgagtataataatgcataattagaatgtaagttgcttaacacaatcaagagaatgacctttcttagcaatgtgagaatatgtatggaaaaacctcctccgagttatatttgtagtttaacatgctcaataaaaccctgttccgtggattcagcaaaggtcagtttttatccatcgcccaccctcattttcacaaactgtgaatttgactactgcaaaatgaagagcattgtctatctggtaaagaaagatactattgggaagtactcccagtacctgctgtggcctgttctaaacagttgctgttgtctgctgcagtggatgatactgccactatgcaggaatgtgctttcttagttgttgcttatttgaagggtcacaaaggggggtggtaaaaggcttgaccacttgatacacataaagttactaagggaaaaacaactgcttttgatgtcttagtcaacaactcctctttaccatcattatctctttgctcttcagctgggaagagccttgtgcctgatcctcatttaaggtctagtcttttagtgataggcagggatgctggtgtctcccttggcaccctgtcctttctgttttctgttcacattcaggctattcccaaatgttccccgtcgtacaaacgagtgcccagacctgcccacctgcttgcatcactatcagaattccctccgtccagctagaaaagatgcttacatggacactacacccaatcttgcctgaccaagacacctcatagataaggcaagcgcttcagacatgaacctgatcactcttcagtattaagtccaaagactcatgaacatggttttcaatgtcttccctgttctttactcattctgattcagtttcctttgtcttccttgagagagtctcacatcttggtataaaatatttatttccttaagtggtgtttctcttatcctccaaaccaggccatatctttccatgtcttccttgcaagttgaggaatttataatatttacttgtgtgattgataaacattggtgtcctttctaaagagacacattcatgaacttctgctcttttccatgcacagttcaagttcctgccagtatctcctactgtgaagacagtccatgggtgtgtaccccaccgcttgagtggagagaaagaagatagacaactcaccgcgctcatgagtgagtccaggacgctgacggcaaatgctgtcccacaagcaaagggctgtgtgaggtacagctctgtgtcagggtcatcgtcatcgtcttggtccaaaaactgaacattggtatcattcactagaaaaggcataaaataagaattagctttggagactacacaagagttagtgaagccagagagatagttaagtgactgggttagagacacttaagttactgtaaaagaaaaaaagcatgaggaagctattgatggatcccggggttggcaagcactgggatcaagtggcctgctcctacaggattgctttaattcctaagacctggagagcaatgaggtcaagcaggtttgttctatggcaactgtcaaggactggcaagtggatggcaagttgaccagtcctttgttacagttttagaatcatgaccaagaaacaccctcaggcattttttggtagccaagtcctctgagagagggacatagccatgagtagccatgctgggatggtaaggttagccacagagaaaagaaagcaacttatgcagaaagaaaagcaatggatcagagatgcagcaaggccaaatggcaagcagtttatcctcaggcagaacctagaggtggccccaagcatgggcctgtgtaggacccggtgtgcctcttctctgaattcaggcccatgctcaatgggttctactcaacacatgggatgcctcctgctgttttctgacttcctctgcaaatctccccacactctgcttccccctctaaacagctctgtcttctctgtgttctagaagaagacatggccagggcaagatgtctttcttcattgtcatctgaggaggcccccaaggactcctcctgcatacacccacagactgatgagttgtgctttaatttagaaaatgggtgataagtaagatgtctttaacttataaaaaaattaaatgataaattcacttctattcctatcttggcttcataaatgatcaattttgaattgtaatagagggaagtgtggggtgttggagagaggtacacttgtgatttctggaataattaaggcagttttaggaagagaacagatgaggtttcctttctgtgtctttttctgaatctatctgcagctaattctcttccctagagttattgttttaatttttttaaaggactttcttgacaactttccttaaaccaacaataacaaaaaaacccttttgtttattgcatgagtcacaataaatgataataggatgaaaggctaggcgtggaattatttttaaatggcactatctttttttgccaccctagaaaatgactctaatggaggcaaatctttgtggtgatttttccaaatttgatcacatttgggtctcagttgtattagcagcaatcgaattgtaggagagtgggcaaaagtctccagtcttgttttgtcactgagtttttgacaaagcatttcctgaccctgcagccaagttgctctcactggaaaacgggaaaagttctgcagtctctcaagaagtagctctgagcctacgaggaagaccatatgtgatccatgccatgccctggataaatggagactggcatcttgattgtctatcaatccatgacattatggaaatatccagcctctctctgatcctctcagaatcactaaaggtttacttatgggccctccaaatagttctgttaaactgaattatgataggccctaagctgtctccatacctatttcatgttcaactaaaagtataagtcctgaacttcatgtgcctcacctcatgtggaaatgatataacaaattcttataataagtagcttgggatcagccaatcacaagtggctttgtattcaaactagattagaacaagacaagctccactggtggtctagccagactgtctctccatgtctcattttcttctctcatatttcacttcctttttctgtggagatggatacacacacacacacacacacacacaccactgctctcatagtgggccaaatataaggaaccattttgttatgggttcctgccatactctagaactataaataaagaagattaaggtttctaaaccaggcactggagagatggctccatgattaagaacgcttgctgttcttgcaaagaacctgtgtaggcttcctagcacctgcacagtagctcacctgtaactgtagttccaaagagcccaacatacacatctgtcctctgcaggcaccaagcatacacacaagacacatacatatatgcaggcaaacactcatatacataaaataggaataataaatattttaaaaacattttcaaaacctctctctctctgtgtttccctgtctctctctgtctctgtctctgtctctgtctctctgtctctctgtctctcccctcttcttgacagtgtctcatatcacctaggtttgcttcaaacttattatatagtggaagattagggtgaacttctgatgcttctcctttcacctctgcagtgtagggattgtgggtatggtactgtgtgggcaatttataaagtgctagggattgaacccaggactttgttaatgttaggcaagcatttcatatcaactaaactaagtcccaagtctatagttgtatcttctgacattccaaaagcatgctgtaatgatcacagtatttctgctctgggaatcagaaaaaaagagcacatgtattggcatattactttcgttgttgacagcagcagctgatggtggctatacaatcatttcaagtggagcagtatctcttccttgtgtatgaggagatgggtaagagacagcgctacttttgtgtggccccaagtagaaggaacagctatggatgttgagcaatctaaggatgtaggattggaagaaaatgtcatggtgtgagtcacgtttcagtgaaaagcttgcttattgttctgggatcaccagtcttagaaagataacagcacatgcagcctgggcccatttcccagaacagccactacataggtcataatgtacgccattctcaataagcaattacataatgtgcattgccccacaatgcaggtgatcaaatagagctgggaagtagcccgttaaatggcttcggacaaagttggtttttacttctcatggaaatgtcaggagcctttatcatggaaatattgggatggatgaggacagtcttaaaatgtgtttggccttggttgcctctgtgtttttgtgtgtgctcatgtatgtatgtgttcttgtatgtatgcatgtggaaagtagaggttaacatgagttgtcttccttaatcactttcaacattattttctgagggaggggctctcaattaacttttgggttcacctattcagctagactacctgggcagcaaaccttcgggatccttccatgtctgtctataaggactttcagaatgacaagacatcccttggcaagctcagcttggatgtgggcgaccagcacccagggcctcctggtgcacagccagcactttaccccatgcccgtctctcctgcctgcctctgtgtgttttaaggggcaaatggctgaggcaatacaacagagcacacatgccagggtagatgacaaagggggaatatctgcaggggtgaagtgggaggaggctaggtatgagcagagtggtatggttcctagagaagctagccctgagagtaggaggaagaagtggcccaaaccctaaagcttggaggggaaaaaaaaatctggtctgaaagagggttaggagactcaataaccaaattactgccttgtatctggagcctcaagctttttgcttttccttttcctctaatcaaaaatcaggatattctaatcagctactagcacacagattctaaataaaaagagaaattcttggcatgggtactttagaaagctactgtgggtatctgtgttggagatgttcaatgaattttcaaaacagtcgtctggggtacacgagcttccttggtcgtttatggccctgtggttctaggaagaacgatggagaatcccaggcttttagccaacaacgctaaacatgaaaaagacacctatcgtattgttgaaaacagtgtgatactccttgacctgagtgaatttgtccagataaatagctctgtctaacaacaacgcggggctgcatggtggacaatttattccttggtttctagacacctcacgagcaagatttctgtgttaaaagcctcctctcttattttgaaatatattggggggccaagaaaatggagtgttcgtttcatttgtgagtcctgtgaaggcaggtgcttccctcccctcccgctgcgtctctgccaagaagccctttgctgtgtctatttagaagagcaatctccagttgtgagacctgctgctgatgggtgcccttcgtgggttattaaccaaggcatggggagccatggaggggtctgacaaatgcagccatgaccaggggcctttatctttgagataaatccactgtgaacctcccagggagggctttgggccagcagggtgggggtaagagtatagggctgccagcctgttctgcacccttcttgaaatctggcttgagtaagaaaagatcccctgggaactggctgctttttatggcttcagaggcagaacttctgagagagggcctagtagggggaaaaaaggcaaataaagtcagaataaagaaaaataaacagctggagggaaggcactgtctaggatttcttatcttaaaatttttatatttctcctttgacttcctctgagagctgtgaagacatgtcagtcaaactgacagcaagttggaagaggaatgccaggaggaggcaggggagagtgggcacgcgtgggatttaaaagaaagggagagagaaaggcttgggccacggaaaatgaattagagcagagatgctttggcggctactgccaggtcaggtgggtgtgatcaaaggtttactgatgctgtgtgggggaaaaaatcattaagagaggccagaacaatacagtcgattccaaccagagccacaaataaaacacattcaaagcagtgccatggggtagccttgctgttacagccagcgaaatggagggggtaggtggggggagccaatgagagtcggaaacaccaagatcagaacaaaagaaaatactgatgtcaaagaagacaagcacttcttacccaactccgttatcattagaatgtgcgtcccactgtttttttcctgattgactgataccaaaggcaacttgcccggcttagctaattggatacagcatttaagggtccagggaaagggagtggaggaaagtacagaaaagaagaaaagagtgagggaaaaacagaggcagcattctcaagctaagccacccggacaatagagagtctgtattgtctcaagggaagagccattcagtatttttttgtttcttgttttttttttaaacttcacagaggctaccagagaatggcatgggcatgtcagaagttggattctattggctacagattacagcattcaaaccccacaaatcccctccccattcatattttggtcattggctaaaaatgacctttggtgagaatctcaactaggacagggtcaaggtggggttgccacatagcagagcagacagacatgttaccccatcctcaaaggggatccattttcaggtgggaagggcttagacctgaggttctgagcaggcttgcaactgtgggagcctttgaaacagaacactcagaagaggggccttcaagaagaagccacctgaagaggaattcacgcctcttctctttccccttcccaaatggatgccccgatttcaaagccattctcatgctcctttgaaaacaggaaccagcaggaagaaaactgtctatttgtcttttgagaaagatagaacagtttttttttccttcaaataacctgccatatcactactcaaacctcaccttcactattcccccctaagtcccacagaaacctacaatgcctaaaaagctaaagaactggacaaactccttactttcttcatggtctgaaagacagaacgcccacgcagtgagctacagtgaccccctaccgagttccgtgatgatgggaatgttgaccccagttgtgatggacggctggcgtaacatcccgtgcactgggctgttgtcgggtgatgatctgtccattccaggaggtgtgaatcctagtggggagaaattcagaggagtagaaaaactggcattgataaaaagtatagtatacatacaaaaccctcaaaacgcaatgtacacattattgacaagtcaccaagtaacacgggataaagtcagcaagttttttgttgtttgtttagacattacagaagagtcacttgaagcagttcttactctgacaccttcctaaaagtccagaccatgtcaaggtttattctgcttacagtttcccctctcctgtgcctagttgtccttacgtaggaatgactatatgacatacaaaatgctcttgctaatggaaagcgagcaaagaagcacacatcatgtctggtatatgacttggtcttgtccttctcttcccaaaccacacctaatatggagacatgggtcactatggagatggagtccagacagctgccctgacccataaatcattctaagtgaaagagaatgaggggctgttttaaatctcagaaatgttttgttgattgttactgcagcctatctcaacccattctgcctgttctcttaagctggctgattgcatgtccttctgcttagtgaggaagttcagcccagaggctttcagcaattgttctttggtttaaaaaagaaatgcatagaaattcaactcttttgattcccccaggacactgtttcattggcttgcagatcctacaccccggacatcaatctttgcacgaggttgaagtaacaaaagtaatgtgctgatactgtctgaactaagtactagaactatccttgagttcctgaggtaactaacccagcactactgagaaatcatgagatttatggaaaaaaaaagatttaagatttgggatgccaggtctagtaaaggtgagacttcctccagcccaacccactgtgtgctctgttaaggatgcagacaaagacagcaacattctctgtatcatgcctgcattggttagaaaatcactttccattggaagcacacagcaactgcagctgtcagccttgtgctgttgttcactttggattgttttctggttttcatctttttaattaaaacacatttttgaagagataagatggggccgcgggtagtctggaacccattatatctgccagactcaccttgaattcacaaagatccacctacttctgcctactgtgtactgggatcagaggtgcgcaacaccatccctgactcctcagtttctcatctctgtatgggcttaccaacggatgagagatttcaaggtacaaggagacttggcttcatttccaaatcgaagttgcaaattgatcaaaggaccacattttgcagacagtcaccggttggtaatgagacaagggctgggctgatgctgccattcatttggggatgtctagcgctcaggaattccatgtcccttggaaggttcataagcacaaagtgccagagacatgtacagggctccttatttcctgttctcctttatataaatgttctactgagtgctaaactttaaaaagaacaaaaatactacttagtttccagtccctgagtgcacttaatttttatttttgtactattatttctcctcatacagaccaactcacgttcagtgagttagtgttcattcttcttcctaaactacggaatctgtctgtttttcagccaaccgcataaccaggagcacacattttaaatgctagctgtttccttccctttgaacagtgaaggggaagaaataaactgttttcatcagaagttgcattcaaaagcatgaaaaattgcaagtgacagctgtgcagattccgtggatgtgacattttttgaatttcttcaacttgacaagtaaacaccttacatcggtaatgctatatgcataatacatggcctgtattttgacagccatcatcaaatgctgacttgagaaaatatgggtgtgcacctcaaagagtagcgcccataaagcaggcagagatacgggtcatacagtattaggaaagctgtattttgtttcggagcctgcaacaagccaaaagcatccttttattttatcttatttaaagattccattttttcagctgtggaaagactcagtttctttgcgtgaaacgttcatttagaaatggggtacttgtctcctaggcctcttacacttgacttacacactccatttcctctatagtcaccaaggctggttccatcagcgtctgcaatttacaaggtgtgatggggagacagacactcttccactaaaggtctctctctctccttcacatgggagcccaagaacaggatagtaatgttaacaagagagctccaggcagaccacacgtcctcctattttgctccttttctgtcttcacactttaaagaggtaggacaaaattttgaaagtatggatttgttccctttgtctcatatagttgtattaccagcaatgagacttgattagcattggttttttcctccttaggggccctaatatagaaaactatggtctgaagtgccaggctaatgcagctcccctaaataaacttgaagagaagagaaatcctggtgtattgcacctgaaggaatgagacaggaggatacctttggatgttatcatcaggtcatggttgaccaagaagcagatcttcacagtgttccagcctccacccttttatcctcaggatcccttcacatctttacatagaacaacactggtgttctggacatgcaagcctggacatgtggaacatacaccaggcaacttcagccagaccagaaaaactaggaaatgttccaacatgggagacagccctttattttgccaaaagtactaagattgtcagtgttagagatctagaggaagaaaccttacttagaaaaggctctatcttaaatttgtgacttgcctaagtttttgctttaatatgttaacattgttctccatggagttagaaatccttttcccagactacctcctctccttccagggaagtcccctgtcctgaatcccagtggcagctgtgactggtatcatttctgctattcacttagcatcaagcaaccaccacctttactggcattatctcgggctggacaatcacatttcatgggcagtaggaagtatattaggccagggaattccctgcttagttgaactttcagcttatgtaaaacaggcttgacttgtataaacaaacaaacaaacaaacaaatgtgactagctaagaaaatagacttgaaactggaagttacaggtccaaattctgttattttctttctccagagtctgttaaatgttaaaaaaaaatttttgcttagttattttgtcatctggctatatcattccatgcatgcaaatttcattactttccccagtaccatttcttatctccctctgatgctttttcatcccatcctaggattcatgactttcaattttattttctgaccaatttagtttaatcagggtcacctgcatgactcttggatgaagactgtccattggagcttagttgggttatcaggggttacatgactaaggctatgcttcctcttctcattggatcaaccagaagtcatttactattgaggtagagccccagcccttcctccatccatgcctgactgttgattggtccatcaagagggaggtagagacccaagccccgcctccatccatgcctgactattgattggtccattcttatatagacttagcacaggcatctgctcctgttgtgaatctgggactgcactggccttgttttgcaaagatgttagttcacagcctttcttattttcaggctctcccattctttctgtcccctcttccacaacgccccctaagtcttagagaggatggtatatattatgacttgtgttagccttgtacagagtaaccagtattctctccaaagtctctgattcttcatctaaaaaccagaagcatccttacacagggaatctataaggctaaagtgaaatgtgccataactagggtgaagcatacactcagaaatgctgtctaccaaagactatattatatgaggtactcaacaaatactggtagagaggtccagcacccatcaagaccctttatgctggataaagaaatgatagattttgttggtttttttttttttgctagattttctaaaaaaagaattttcacaaaaaaaagtcagaaaattaataagaagccaagaatcacagcagatgttttggttataaatagatcatttctgcaatagtaatgatgatgatgacaatgatggtgatgattaataataataataataataataataataataataataatatacagctagaagcttctcaggaaggaatttggacactaggaaggctggggttttcttcaggattataggaaactggtgaccagcattcacacaggaaaggttcttaattcaaattagcaagtgtaggcccttactagaaccttctcttctctagatctgatttctggtccccttaaatagctggaagtcatttgcttcttggaactcctgaaactgttatcatcattctgtgtttctttatggcatctttgttccagtgaaatcatctctattgcatctactgtactaaactgagccgggtcagccgctgcagctgaccttcttctctggatgttggttatctcataggctggacaagtgaggcctcatccagggacaagagaggaaggggaagcatcagctaatgagaagtccagagcattatactttagtgagggtggcttggaacaaaggaatttgacacatgtacttggaggattcctgctaagagctaggagaaaagacaggaaaaagtaacactgacaatgttttcactgattaaaaaagtgtttcctccctcatctaaagctcagggaacattatggagagaagggtggaaatcctgtaaaagccagaggatcagggagtttgctgtgattgtgtctcctggtaatgtcagaagttacacccatgaaatctcaccaatatgtctgcccacatgtgaactgaacagggatggcagcaagggacaagcaaagcatgtacggacaagcccatgaggcctcattcctatggaaagactatgggcaactaagaaagctgggaacatgagaagtagctctccccagagaaaagcacaccaagtgttttccagtaccaatggtcagccctacaaatatacattcaggtagcattatgccaattgaacaggctatatttaggaatgtatgcatatgtgtatatatatgtacatatatatgtatacatacatatgtatacacacacacacacatgcatacaaaacactaattttttgaaaggccatgaatttgaaggcaagtggaggacatgtgtatacatgggaaggcttggagggtggaaaggcaagggagaactgttataattaaattataatctctaaaacttataaagtttcccttgagttaaaaaaaaagaagtacagaagggactgggtataagaatacaaaaagagagaaaagtttctgattcctgttgtatacaaacatgttggtttctgctgcatctaagtgaccagctacctatgatacggccaaactagaagactagaaaagagctctgtggggcaatgcaggctgaatgtgctgaaagggggtgaaggctccatgtcatacacttacagggctcaaagcaaatggaaggatactataaagccaaacagattagggtaatgggattaatggaaagagaccaagatcacactgcaggggaaggagaaattatgttctcataacctaggtctcaagacctccctaaacaaacacggttttatcgaagaggaagcttgagcctaaccatggcctgtagagagggtaggcagtgtggtcaagggcatcccatgttgctaagcagatctcagatcagaaccacactgagttcccagggctggctcctctaagccaactctttcttctctctgtgcaccagactatgccaaaggcactttcatggccacatcatttagtcctcatcacaggtgtaggagttgagagaccagtaaacactatcacttttagaaagagaaaatggtcctgagacacatggagaagctgctggagtttccccagtaaaaagggacagatctgggggccacagccagatagttggacttaagagtccaagcattaacaactaatccaaccgtgtgctccatgccctagctgtgtgaagacatcaccctcactctccctccatcccagtcccctctcccaacccctggaaggcaattttcagagacaagtcaggctaacttttttttttaattgttttcacttttaaacaatagcatacaatgactgggagccattgcagtcagacttaacctgctttggtagagctgcctgcacagctcagtgtatataataaatactttattacagtacttttccatgggggaaacacaaagtactttctaaatcttccctagttaaatccccaagccttcccagggagagagggggatggagattcttatcaatcacctcccctagaatagatggagaagtgaaggtgagtgcttcccacacccccatggatttaacataaaggaattggctcaaagggggagccaaattatcttttattgtgtgcatataaatgatggttagaaatccatatgctgcgttaaactagggaaataaattaggcccagtcatcgaggtttgctgagacaggtattcaatatgaagttgtaaaaggaaagatcaccgttaaaaatgatctataaagacatgttaaaaatcaagagaaacatctcatgttacatcatctaggagatgaattagatttcctgttaatgccagcaaggaaaaaaaaaaaatccccaaaccaaatgtcagacgaagtaaggatcaataaaaatattttgataagtaaatgcaacagtgctatttaacacatgattggcggctgctgaaacatcaattatccaaatttcccattgctgcttatgggaaaattatgcagattagaacttgattaggcttatatcatgagactcaatttagacttttaatctattaagctccaataaatgaggcatctgaatagctcccctgagcaactacagtaatagccacagcagtcatttctacagtgtgtacgccaacaaatttatcagcagcccaagtaaagaaaactccgtgttggagaggcatgaatgctttctaacttggatgggcagaaataacccatgcctatagggttggtttgggaaagagattgtgggcgaaagctaccagaaaaatcctgtcaaagagaaccttgcattaaccttgaaatagactaatacacgttctacaggttggactctggattctaatgttggaatctagtgtcaggatttatgcaatttaaaaaagttaaaaagagatcatttactggggtaacaagttcttctgacatcgcccaaaggggactccaactgaccactttattatttgtaggcatacacataatacataattatccatgtgtatatgcacatgtgtatgtgtgtgtgaatgtgcctgtatgcatgtacgtatatgtattgtgtgcctgtgtgttattcatgtatggggagatgcatattcctttgtgtgtgtccctgagtgtggcagtcagaggttgatgctaggtgccttcctcagttgctcttgatgaactgatgaaggcaaggtctctcaatgaatctggagcaaactgattctgataatgtgactactttagctagccagtttgcctggatgattgcctcccttgccctaagcactgtgattacaggtgggccacttactatgtgcaagctgggaatctgaactctaaccctcatgtttacatggcaaacaacttacccatggagccagcaccccaggcctgccttcagtacctttaccatcttctaccagaggtttgtagggaaggtagaatgaccttaagctgaagagttcagacctttgatgatgagatcagagtcccaagggaccctcttgttggtcttataaactcagagatctgactcattcctgtttttacactattcagggggaagacaaatttgcccaccttgatatctccacaccatgaacaacttctatatagagggatcctcatatgagaaaggagctgaagagagcagatggcaacaggtacccactgcctcgtaggttggccagtcgctggatttgttttttgtttgtttgtttttgtttgtttgtttgttttaggtgtttagagacagggtttctctgtagagtcctggctgtcctgctgtcctggaactaactttgtagaccaggctggcctcgaactcagaaatccacctgcctctgcctcccgagtgctgggattaaaggcgtgcgctaccacgcccagcagtcgctggatttgtaatcttgaacccagtactgtctctgctctgagtctcattttctgcatctgaaggggttgactagagaatcccaagaaatcttgtatctctagcatagaatgactggtggagagtcattgctgggtaatgtgatgacttaggtctcacaaaaccatctctatgaccacacacacacacacacacacacacacacacacacacacacaatacacagccaggggactataaactggggttacaatattcactagcattcagtagtctaccctggggtgaatgagacaaggaaaattaatcaggtggtgaaaaaataaaaaattaagccaagctctgacatgtgactactttagcattttcagttagatttctattatacccaaaggccccaatgagtgcaattactgggggaaatacccacggagtggtttatatgtcactgattattcttttttaaaagtgtattattaattatgtgtatgtgtatctatgtgagccatctgtatacaggtgcctgcagaagccaaagaggatatcagatctcctagagctggaattagaggcacttgtgagctagggacagactcaggtcctctggaagaagagaaaacactcccaaccgagtcatctttctagctcatgttatagattgttctagcaaagcatgtgagttcttcttcaatcagttttccatatgcttatgagtgaccagtgacatgacatgagttagtacccctgtcctaattctttgctgtaagtcacactgatattattttgtggtgtgatgttcatagagactgtatttcgttggcacgttggggagccgatgccacctgctgcataaagtgccttatctttttctgctttgcatctgggacctgattcaaagcacaggcaatgaaaccaaccaatcaagtgagccttgtctaaatctgttggcttgatattccttgtgagattcattcagcagtcagggaaatctcatacatggaaaacaaatgtactgtcaagagtcaccccttagaagtctttcttgttaaagaatgtatgtgctaatacttgctttagaaaaggtcatagaaggaagaaaggaaggaaggaaggaaggaaggaaggaaggaaggaaggaaggaaggaaggaagaaagaaagggaggaaggaagaaagggaggaaggaagaaagggaggaaggaagaaagggaggaaggaaagggggcaaaagggaagaaagtgggggagagggagggaagtaggatgaattaagacactattcaaatgcaactaaaaccacagatttggggaaaagcctaatatctacccagtcaggtgattttattattagagcatggcgccatatgattgcctactgtttatctattgaacatttttttccttccttctcatttgttttgaaactttacaacacagtatgaatcaggggacttaacattttacctgctctttattccaaactactttgttttgaaaaaaaaaatatgtgtacagcaacatattaattacatattaatcccttctattaattacatggtatcatggtttttttttctgcaatccatgaataacactaaacaggaagcagcatgcatgtcatgctttagcaaatcaattgtgttaaggattcacccaatagatatgctatggaaaaatgagggcattaaaaaataatgtatgatctatttttgaaagttaagaagtatttttatctatggagacaacaatatgtcctattttgtatgtttgagcagtgaagttaggatccttggctagggccatggcacagtcaggcagatgcttgacttgggaacaagaggagctgattcgaatccccagaacttgtgcaaaacacttgggcaggatgacacacatttataaaatcagtgctggggatgggcagatctccgggggcttagctaagccttcttggagagtccaggccagcaagagactctgtctataaataaataaataaataaataaataaataaatgaataaataaataacaatggacagtgcctgaggcagctagaagttgctctgtggcttctatatgtatgcacacataggtgtacatgcacgcacacaaacgtataaactcacacatacaaatatgcatagaaaatgtgtaagctcaccatgtcttcccaaattttacttatatgagctcttggatgttttaaagggagcacatttcattcaggtaattagagacaattttaaaattataaattaaccaaagttggaaagaaggtggcagtcttaaagccttgcgtgcgtgtagtctttctgggctgagtggagctttgctgacgtggcaactgttgctctgtgggattcacaagttcattctgagaggctgaagtttccagaagaaactggccagaccacagctccaagagtcaggaggcttggagtgaaacgagagccgaggaggttccaggttccaggttcccaggccgctgctgttcaaccccccactattttataggagccactgtcagagcagaggtctgacatgggatgctctttggtggttaagaagtccatgaaaagcctccatatttcatgtacactactgcagtaagggcaagccaaggctatttcccagggataagtggcctgtcctgattcttggtcctactcccacccacttcaaacttgttgtctcctcccttccatttccaatcagcttttcagccttttcctctggggagccttagaggtgttctgcccacacactgagttgcttcacatagctgtcttctgaattctatcatgccctttcctggacttatttaaagtacatggattgctattatatagtacttgctacatgctaatgcttgtacaaggttaaacatcttgccctggctcctcttgattgtcatctacctagtagacacctcatttcaatatggcagagaccaaacccaacttttcaccattattagcgattctccattcctgctctgggtagctcttcctcctactgccactataatgggacaaaggatgtctggctaccaacataaggtctcatctttcatgacagattgcatttccagtaaactggagggttgctatgtcagggaacatgcagacatatacatttgcaagagggtgatgtgacgtgggtgctaataaaacacatagaaatccgcccctgcctgctgccaagattatatagcattttgtttccattacatcaatttttttctccctgttttgtgaacattaatcaaagaactacaaagagctcattaaagtgatagattgactagaaatgcaaccaccttttcattataaacagtccccttgcgttctcagggctgaaggctttgtttcccagcatttgtcttgcagttcaaatgtccttttgcatttaaaactacctaatgccaaatgggccacagttgttttgtttagcatgaaccaatagccaagcaaaactgcacaaggcaactcaaacaaccaactgtatcttaaattcaaagacagttaagtagctgtaaaggactagtttaccaggtgacagaaggattggccacacaacttagaaaaacagaatcctatcactgacaaccctcttccaggtgtccctgatgggtccggtgggttgagacctgctttgagggtcgaatgaccctttcacaggtgtcacctaaggtcatcctgcaggtcagatatttacattagagctcataagagtagcaaaattacagttatgaaacagcaacatgataattatatggttggggggggggtggtcaccagaataggaggaactatattaaagggtcatagcattaggaagattgagaactactgccctagagaaagggtgtgtaggccaagaaagatactaaggtgccaagcctttaacaatcctttaaatgaaagcatttaattttctttttcttttaagggatgaaagaccttcggtatatatggttttattgaaggataaatgtatagttaacactttggatctagaaagaacaagggtgtgcctgcatgcacatagtaattatcacaagaggatatgaatagtgctagtttaatcctgagagtccattccaggacgttgcccatgcgcataaggtgtgagcactaaagattctttgactacaacctacagtcagaaatgagctaggacagactgattattcagctttgtctctttcagtttctagttttggggtccagggcaatttaatttttgtgtctcaatttcatcatctataaatgaaatagtaacatgctatgaagactgtaaatgggttggtgacatattttatatatacatatatatatggtgatatattaatatatatcataatatattaatggtatgggttattttttaattatttattttatgtatatatgagtacactagatcccattacagatggttgtgagccaccatgtggttgctgggaattgaactccaggacctctgaaagagcagtcagtgctcttaacctctgagccatctctccggtcccataagccaactttcaatactatagcaagtacttctaaatactaactttgtgtgtgtgtgtgtgtgtgtgtgtgtgtgtgtgtgtgtgtgtgtgtgtgcatgcacatgtgcaagcatgcatggatatatgtaggctacagataagttccaagtatctttcttccagatgccatctaccttgttttatttgatgcacggtctctcactgacctagaattcactaattaagtaagctaggctggccaagcagcaagccccagagacccactctttctaattctgcatttcgagcattacaaacactaactgccatggctggcttccttacatgggtcttgggattgaactcaggtccttctgcttgcatgaaagtactttattgagcaagctatttctcaagcctcttttaactgcttattattcttaactacttattattcatcaacaattggctattgatctgtcagagaaaaccaaaggcatggattttagtccaaggtcaacctctaactctgaaagagcccatatgggcattcaacacatagattattcttgatttccccatctttaaaaagaggcaaaagcaatactccaaatctcccgagtgtgagtgccacgttagacataacactgggaagtttttaagtcttgctttggtcgctcaatagtcagcaatgatatctcactggagttggtttgtttgtttgtttgtttgttttaaagtagtatttaggagtctatcaacaaacatgctgacacatacatccaagggacatacattgtaccatgtcaaccaagcagctagcaaattacaggcctaggcacagaaccatattatctcttagaagtagccctcaggcatggtcccctctccctcaaggagtcctgaattcattccactaacaaagcatcttcatttgctgccatgaggttagagttgtgacaattgtaatggccttggtgccttcatctatgggaatgaccccaaaggccttctcatctctgaggtgtaagtccctttcaggaccccaaatgacaaaagtatgtgtccacagactaaactagaatgggaactgggtctcctaggatgctttctcaaactctcctgcccagccttttctttcccattcagttttgtccctttgctcaatgcccagacttatgaaaagagtgtacttctttttagaagtttctctaatggccaaaagggccataaataaccatttattaaacaaacagtacaggctaaagaaagagaaactgccacaatcaggcccctgaggccttcaagcacggcagcacgcaggctgtaggactctcctaatcctggttatacatcaccagcccctgaagttcctgaagttatcttcataatcaagatgctattctagccattgagggctttcaaactatttttaattttaatttaaagagcaattaaagaaagacaatggatacgagggataataaagtaagtgattagcagcatgcaaacgacaaaggcttaatgataatatggcgttagtctccaaagggcttgttgagagaaaaccctttctacatgtggctgttcagctaatgtgtctcaacccacaattacaacattgctgacaccattaaccagcgaaacaacatcacttggtgaaatccttgttgtctcattaaaatggaaagggtcaggtaatttaccagccttgtatgtctagttttgttgttggtaattagcaaacattacccagcatggactcccgctgggagctggagaaactttgtaaaatattaaagaggaaaagtctttatatttcgctggaaaattgaaaagagatgtagtcatacactgtatgccactcccttgcacgaaggaaaagggtagaagacaaacaactcacaaacaaacagaaacccccaaaccaaaggaaacacaacccaccaggaactctctaaattacagaggattattcagaatgcattgggaagccattgtccaaaactagactctgagtcaccactgtgccctgaagccctctccttctggtttacaaagagagttggggaaggggaggatagataattcagacttcatcttcactcttccctcctcaggtcttccaaaggaatccatcaaaaccagagaatgtttatggaaacgttttctctttcagccaactatagtagtccatgctgtaactctcagtgcttaggtagtggaggcaggaggttcaagataaagtcagcctggactacatcagaatactttcttttaaaaagtatttttcctccttttgcttgctgagatgctatataagccaaaggtgtttgctcaaagaatattggatgaatattttttaagcttagtgattgaggaaatatttccttgggcctgccttcctgccttctggcttcctaaggggaaacctccgcatggtgtggctgatgccccaccctaaatgctggccaatgctgggtgtgttgtcagggagcagaatgagattttattttttaaatgggattttttttttggaacataaaacacattccaataaatgtgaactgaaaattatgaattcattaaacgactttggtatcttgtgctatatataatatttatactccgactactgtaaaatatgctttaatatctttcggcaactataaagacttaaatatttataaaatggctaaagataaagtatggccctcttattcctacatacagatgatgtaaggcttgcaatcaaagacaataaccccctctgcccatttgtcatcttaaaggagacgatcaaccccatcccttgtgtaccatctacataagagttgttaccagtgtacgactctagaggagtttgtgccttaaaaactacctagagtgctatacttcacagaaaacagggctttctgaaaatagagacaaaacaataaatttgcaggcaaaacagctccgagaggggcctcaaaatactgccgtatttatctctgggacatgtgagaatgggaggcattttgatttaatatttcataacatagacacaattgcttccttgcatggcatataattaatgctccttgcaaagagttgttttccccctttaattcctcaatatcctaaatgcaaataaatagatgagaaacactctggtgatagtaatgtcttccttccgcagtgtagaatagccctcccataatcacaataaaaagaaagtcaccatgaatttagaaccacccagagacctatttaaaaagtaggtttaagtgtgagacctcagccatgaagctctcatcatttacccttcttgcttgctttcagtcatgcactctgactaatttttagaattcttcccattcctatgcccatcaggtatgcaaggaactgctcgtgcccatctgtgtgggtctcccaagtggcaattcccctggttgctttcttttgctctctttgatcaggatgtgtagggtggaccgggaaccatgcaaaagtttgtgtatcaaagtttagatctcattatacctgcattttaatgagttctgttacatgccatccaaacttcccagccatcatactcacaaggctgccagatctatgagaggaagcgtccatggctcatcaattctgataggagggttgaaaacagtgaccgtgggaaggggagggaagggaagggaagggaagggaagggaagggaagggaagggaagggaagggaagggaagggaagggaagggaagggaatgaactaatgcctctcaatctggctgtgcgttggggtcattgtaggatgcatagcacttctgatgactgactaacttgtcctgggatgcagccggggcatctcaagatttcttacaaatccttgaggtgactgcattgtgcaactaaggttgaataccaatagctcaatcagaaaatctacccattcatgattgactaatctataaacaaggcaccaagaacacctcatgggaacaagacagtctcttcaaaaaacacgtgatgaaaactgaatcccaaatgtcgtcgaagaatgaaattggaccatttccctatacttcatacaaaaatggacctggagctgtttaaagacttggatatgggacctctagcaggaactcctagaagaaaagatagggagacacctcttcgaggtagagttcagcactttgttggttttaaataaaacaccaaatccctggtaacaaaagcaagaataagtaagtggaattatttttaaagtaaaaagtatccatttagcaagggaaaccatcaaacaaaggaaaaggtgctgcacgaagtgagaaaaatgacttaataaccagatatctggccagcagtcaatagcccaaataaataagaagcaaggacaattcaaaaatgaaaacctgacctgagtcaatccaacagatagaaatgagggagctggacaaaagagaaagccttttctgatttacttaaaggttgcattctgagagcaacttgatccaaaggcagcgagaatgagaaaaatgagacacggagatactgaagtggctgtctgggcttcatcagtggcagagatagatttgaacccaagtaattcatccaaaaatagttaatacatgccatggtgaaaactgattgcaacccaaagcaatctcgtgacatatcaccacacatctgcatggccttaaaatacctcatagaacatcttgacaagatacctgtaacaagatggccagggataaatacactgctctacaaatggagggggagcctctagaacattccataaaatactattgaagcatttaggctcacggatacctttaagagctttaaaaatctccaaacttaagtcatttgtaaattagatgccttctttgcagggtcacataggaaagaagaaatgatggtttgagacttcacgtgagtttcagctgaaaaaaaagataggtagaggcaaaaatgctttggatggttggcaaggctttcttgctagcttgaggcacacatgttattttcagcatgtggattaaatcaggtctcaggaagttacaaatggctcgcattaggaactttacagggtgctctggaatgtcccaaaccctatatcattaactatgtgcatccacatgatgccacacagcttattgtgcacgtctctgtcacttctgtctgtagagatcgcattagattcctgatgacaggaacagttaatctcaagtgtaagggaaagcatcaaatgtaagggaaactgatgctcagaagaggaactgttggctgagccaaagtcctcccttacccagaacttcattgacagggaaaagagagggagggagagaaaggggaagcattggcaagaggaagaagggaggaagagagagagagaaagacatgggggacataaaagaaagtaagggggcagaacagagacagaatctataggataataggctttcactgtcttctttgactaaataattttgcatggattccatacaaccatttatctgaccatttatctggaccattcacgggggctttggggagtagaagcttgtgttcattttaacctgatgcttcctactgaaccttcttctcttctgggaaacagaaatagttttaaacatttctctacaaaagaaaacaaaagtcaagcctcaaatgttccacactttttctgacatttcagtagtcaatccacattgagtgtatatgtgcattcatgcatatgttggtggttggtgaagtgggcatggatgtgtgcagatgtgtatgggcatgtataaggaggccagagatcaacctttagtgtctttctttaagtgccatctaccttgtttattgagcagggtctattagtagactttaggctcacggactagggtgggttggctagcctgccaaagaacctcagatatccacttttctctgcctcctagcactgaagtatagatgcattccaccatatctatctatttcacataagccaaaaatcagactcaggccttcatgtttaagtggcaatcacttcattaaatcaacttcacagcttatccgatccatattcatagggaaaaaacagctcagacgaatctattgttcatgaagaaaaactcagcataatgttatacatttcctcccactctattctctgcatagttgttggttggagcaaaagactcaaccttaaggattcccagtgattcttgttgcagtaggaagagccagggaccccctaccccacaaaagactcattgagacaaaagacacttcaagacaaacttcagccctttgggcacaaaggtaatttaggggcaaggcagactttttggggtactttcttccctggaatgtttatccaaggataacccctaaaagtagatacacagagtcaaggcactttctcatcagagcacagttaacatttgtcttaattggagcagattggtgtggttggaaaaataccttctttacaatcagactgcctggggaccagctccatgtgttcttgactaactcagatgttggaatagatgcttaattttctgagcctcattttctcctccttaaaatgaagagtgcaatctctgcctcagcaggtttccagggagattatataacactgtatgtgaaagtaggggtcatggctcacctgggtaagctagaaagacattacagtttttaaaagagacatgactgaggcacatacacttggaggagtcacctaacaggtgacagtctgacgtttatgtgatgagttgagtccattccggacactacgccatatctgctttctgcctccaaaactaagattccctctctctgtgttgccccaggctggttagagtctgcatggggatgtcaactgctctgtatacagatggaaggaaaggatgattcttcctgtatttttttttacttcattttccattttcacctcccaaagaaaaaaatgttggagtgggagagaaggttccattggaaacatacttaaagcacaagcacgaagatccgaattcagatgcaaggcacccacgttaaaaactgacaagcaaaggaaaacaaacaaacaatcccaggagtgaactgtgggttcaatgagagaccatggttcaaaatcagagaggaagaacaattcaggaagataattgatgtccacctctgatctccacacacatgctcctatgcatacctgcatgtgcatctctctctctctctctctctctctctctctctctctctctctctctctgtttggaaggcactcagtatgggtcagaaagtagtatgacctcctcaatctcatgttgcaatggctcttgtcaatccttgtttatcgaattaggaatgtgtcaccagaacagcaaatggtggtcctaagaggttctttcatgtgacaaaatatgctatgtaggaaaagctctcctcactcaaaggcatttacagaatagctgcaactgcaactgctgcttcaccaaacacatcggcactagtgggctgagattcatcttgtgaagtctgcagaagaaatgtaacagcgcaggccccactctgtacttgagaccctctcagagccctaagccagactttcttttattgtttagtaagcttttttaatgaaatgtactactcttattatggaggattccaaataggatctaaatcacaagccaataaaagaaaattattgggctgggtatctaaagttactacctagaggctactccagtgtggtatgtataaatctctaaacagttaagtagaattgtctttctggtttttgggatggaagccaacagccatttcagctacaacggaaggaaaatattttagtgctgagctttcttcgttcagtaggcataaagagaaatggcgctcccccactgccattttagaattgagagagaatattgaggtaatgaaatgctatacaggagcagctaaaaaactgcttctctgatttcagggagtgaagctgggtgggaagaaacgtgcataggtgtgtcggtagtctgcatgtacaagaagccaggctcagaggaggaggagagcacaaagtgggaagggcagatgttgaagagtgacatgggagttgggaatggggtggtctgtcactctaatggaaacaccagatgtgtaggtgctcacccggcactggccacactgccatcaccgttcaggaaggatgtgaacacttccactaagagacccgtgaccccagttctgccaaacaccacagctctccctctggagcaaggctacagaacctataaaatgcagaactctgtataataaaaaccaagaaaattccagagacgctcagttaaaaaaggaccactgggctcatcccatccaatctgcctctcatcacagagatcatggtggccagtaacttccctttagtacacaatggtagaatgttcccaatctctgcagagcctgatctgtttcctgggaatgacttccttatgttaaagggaaaacctagtctttttattattaactgttggtcctggtcttaaccattggtaaatggctcattcaggcattcctcattctggctgtccttttcccacaattccattgtttgtccctttcccccacttcaacttgcctcaaggacaagatcctgctagctttgggacatacatcaaggaaatgttggatcttagctgggttacctccaaagctatgtgctgggtagctgacacctgtacttattactttgagatcgtgacagaagccaggttggcaagtggaacctttgggcaaaagattcccacaccaccccctgccactttttactcctcttgagttttttcaagtccagagaaagctagtatgatccaaaaatatgcaaagaaaagagggatcatcaatcaacggcaggagtatagttcaggctggctggcccatgaacttctagctgcttctcccatctctgcctcttgcattgccataggagtgttgggatcatggacatgcaccactgcatccagctttttaagtaggtcctggatcaaactcaggtcatcaggtttctgctgcgactgtttctagtaccagtggagcaatctccacggcctgtggcatgctatttcaactctcatcagtcgactgggatatgaccccaggacaagtggaagagcatctgcatcctttcagagaatggagtccttcgcttcatatcagcctccatctaaagccgaagcacctactgctcctcacagcggcactaatgaattaacctgcaggctgtgcaggccatcttcatggttccttgtggtcctcacgggtgcaaagtgatcaggactaaattctttgccttcgtccccaattcacatctcctccttggtcctgtcttcttccttagttgtaaggtcatcgtctagtcgccaatctcaaaacccagctcctgacccattctttgtttttatccactgtcttcagcaaccatctctcctatacttcaaattcacctccatgtctgccttgcttcattctgacactacaaagctgtgcagggagcagcaacccatttccctggaacattttcccaccactcacctttagctagggtcaagctgtatttttcaaagacagatgtatacttgccctggtctgacaaatcttggatgatatccccaaatcaaaactcttagcaagtcaaaaaagttatctccccacagtaagatgtctagttatacagccgctagctgtggaaaactgtttctcataacttgggagagaaatgccctacccctctcaggctcacatgtatactagcttgtccctgattgtaacttcttgagaaggctgtggaaccattagccttgctggggagagatcgctgggggcagaccttgacgttttatagctggatccccttgatcccacttcctgctcactctgcatctgaactacaggtgctatgtgaccaactggtctcctattcctgccgccatgccttccggaccacaatagtatatctccctgtgaactatgagccggaacaatccgttcttttttctttcacttgcttcctgtcagataccttgtcctagcaatgaaagagcagttgatgctactgaagtgtaactttattaaaagttaagaaaggggaaaattcagttcctccattgcattgacaccaggcctatctcaagggctcaatagccacttgcattcaatgcatgcccagctgtcgcctctattaggaggacttacaaagatgtgtgaatagatgaaataaggcccctctctgggtccctcttctgctaacccagccctcttttctctgtattgtcattgtcctccactccctgagttccttgctgctagggagcggctgaatccaagtcactgctgtcctttagagtggctggagcatgggggactcgcctgccttcctttctcttccctaagagaagccttgactggaagagaaaataaggtgcaagatgctcatttcacatttttttatatttaaaataacaaaacaacaaaaagagagcgactgcaccacatctctcattttaggtgctgatcccagaggctctctgggaatgaaccctgactcttcccaagatcggacttccttctcatcttttagcaccacagggaaatgggctggcaacgaggcactattgtaccagctgatttaaatggaagtgttttccctagataaatgcgtgctaaataatacaccagctctccagccaaagggaaatgacaggcactctgcaaataaaggcacttagtcgctggtaaagagctgtaaagtggctcggcgctgatgtttgctgaccagcaagaggcagcttcacctgctttatgtgactgtcagtgcggttttgcctgctgtatattaaaactgcatctcatagacccaaatgtcacatcggatataccggcccacatggaacatgccgccttctgctgtaattgtttttgacaagcagccatgacatctcctttcctttcagaaagtctctggtccagaatcgctaggctgggtcagtcctgacaccgtgtgggctagaaaagtgacactaaagaagagaagcaaaggggaaaagagaggagtcccagtaacatgccctggcaagggcatagacacagacgcaaatccttcccatggtggctggacttctcagtgctgttctaacgggcccttatcctggtcaactgtagcatgttaaaacagcttccacatggtcacatgagcactccacaatagagcagaccagctgtcctcagtccacatttctggagccagctgggttctggaagaatcaaaacgtggcttgtgcataggtaaaggagtttgtgaggcttttgtcaaggaccatgtggttcatcaagatgaaactggtggggaggtgtgaggaaactctacagtttacattaaggacacatatgatacgttgtccaaaatgcaaagaacaatgcggtgcctctattgcctgtgactccaaccgctcccttggagtatggaccttccaaatacctgtatggagaagcaaggatctgaggccactggggataccagctagtcaaagagatcttagaggtggggaacagcagagaccttcagctcccctctctatccggtggctagaactcaaagaagtgcacactgcatgggctctagaggtgagtggtggagaagagccagttcttggtgctgtgaactaccactggaccattgtcattggaataccagagtgggaccagaggatgatatgcaggccaatgacaggataggagaagatagggtgagaaagaaaatgacacatgccatttcaagtatacatgtgtacgtggtggtgtattattacatgtctgcagaccatgaagtcctgactatattgggaggacacaggtcggccagagaaagggagcactccctgccctctcctgttctctgtgtctctaacccaggggagaagtgctcctcacaaatctttcccatccctttgctcttccctctccaggacaggaggcatgtctgaaagagttgatcagcatgttcgatgctctgctttagaacagcctgtaccagtcacccagggatctcattagaatgcacatctgacaggtagtataaggtaggccctggcaagatgtatttccaacaagctgccccaggtgatgctcacatcagggtgagaatggggaagacaaattaaagagcagggacttagaggaagataacacataccagctagctgcatccaacccctggaaggtcagctcactgtctttccacattccttctcccgtgctctctgggcaagctgggcaggaggcaagttctgtttcctatgcatacagcctggcagaactcagggtgtctctttgggttttggcacattgttcttttcttctgtggctgcaccaatctttatattttcgaccatcaggcaagatgatgggatggagaggccaaagttaggcctgaggcagggttatgtcagaaaagtggaagctgggcatgactcggtaagtattacagactgatgcaactctcagaaaggttggagaagcacaagtcagcaaaagcctaaagctgctagggaccccaagaatggctctgcctcttcttctggtccacagcagcaaggctgacactcccctgagagtggctttgaactgcacagtggctcctggatctactgggaagcatttaggcctctccttttctttcactacctaccccaatcctaccacagggtgcctgtcccctcccccacccagtcccacaccccccactccctgctagctctccaccaaggccagtgcaaggaagagaacctgcaatggaggggttttcaggtactagggtctttggttttctggcaatgcggagcggagttgaggcatgggtggtaatgctaggttgttcagagacagcagagcatcaaggtcttagccccaagatctagtcaagctcccagaagctcctgatgccgagctaccagtgaggagcttcctgcctcctacaactctcgtggcctttgctccttggaataatgggagtgaggcccccaattcagtagtcaatcactcccattcagtaagccttgcatgacccatatagagctgtcactcagaagaaaatatttcttctcctatccttctctctcctgatttccaaggtcattcattatggggttacttgctgtgccgcttccctgagactacaggatgacatcgtcacttataaccacctgtccaggatctccgaacaaatgacagggaagattgaggccaagagagaagacagctatgtgccatttcaggcccccgtgccttctataggaaaatgtacagtccagcaagcatcactccttgctatacagcttcaagtgtctgtatcattagagatctccatccttaggcgagtagagtcttgcatgtgacactagccatagcaaagcttaacattccctttttagctccatagaaaagtactcatagtgaaagagaaggaaattgtacagctggcatttatacattactctggctcttagacagtgaccctggtcataaagcccattgtttgaaaaggcagagagagtaggcatttaaagatgcttctattgcctcaaaaggcaacaaactgggggagggagacatacatcaggtttcaggtctgtatctttagatggcaggaagaacagatgctcctctgtaagccatcgtggcgaccacaggtttcattgccagacaggctgatgtgagcctctttgaattactgagtgaaggatatccctcttgccagcccctgtcccccataggcacagcagagaagtattataggctgtccttaccttgggaattagcctgcaagaccccgatgctgtcatcaaactgcatagatttgatgttgagtgacgccaagatgcattccttgtcctgaagcgaagtatcatcaatattattctgattggctgacaggataacgcacatgtcacagaggttgatgttgacagcccttaaatcagcccgacttaatggtgtaccctttggcatgggggtggtagggggagagagagagagagagagagggagggagagggagagagagaaagaatatgaaaatacagagagagaaagagagagagagagagagagagagagagagagagagagaagagggaaagagaaaaaataaaaacaaattaaagattgggcaggagctttgggacattatttaacaagtatcttttttatgtcttgacattaagctgccctaactacatttcagggaataagggctgcacgctaatctaaagggtagttggtgctgatggcagcatttcaggccagttctcaatactcaatcaagctattactaacaaacccgagacgaataatgccagggtctacgtcttcctcctgcctggaaattgtcttgatttaagtaactgtcctgtggcaacctctgcctttcagaacataacgaggaggtgggtttcaaatgcctgtttatttaatagcaggtcatttctgtctctggcaacagacagcgtatccaactagaatttccaaagcagccatggggaaatccacaaagcagggtgtgaggaggtgggagctcatggctctgctcaatcaggaggctgagggagccagtggagttagtgtgcattttgtacaagggcgaggcaaaggggcaagcttcgggccataaaattttattgcataatgtttagtaagaaaaaaatgccaaggaaaggacacaatgctctaacaacatgagagtagttaaatttattttgggacacatatacaatagaggacgtatactataggcacatccgagtcttccataaactcactgagttggaataaactccaagataaagggattagtaagtggtgggaatgtgagtatcttgaaccatttaaaaagtataactccatttatttggaataaatgaagctacttgaagtaaaaattatatatttataaatatatgtaaattcaaaaagaaaactcgggaaaaactatacactaaactaataacagtaattacctctgggagaggaaagaatggagtggaaagtttgcttttgactttacatactctgatattgtttgaatattttataacaagaacagatttgtatattaccggtgcaattaaaaataaataagccagtaaacagagtttttaaaaatcctataacaatgtgagacagtagaaaaacctctgtagatgcaaggttaataatggggtgtaaggtagatttgatagactggatgaatactcttgcacacagggccatgccatgtcagagccccccagcagctgcacggcactattttgggggtctcatgcagccaaaagcatcccagatcctctagatggatttaagttttcccttgtgtatatggatacacaagttaccttcagcctcagcctctagtggctaagtgtttgccagctgctgtatacatctccccttgtccccatcactaaatggggtttgggaaattaggatctggataactatggagccctttagctcctctttataatgcagtagaagtcatgattctattctagtgctcctaaatattgctgtaaagttgagccatagagaaagggcatttggggccataaactgatccaggcactggagtggtaccctggagaaggaaaaaaaaacaaaaaacaaaaaaacactgtcttctatgttagcttggtacaaaattaagtgtgaccaactctttgtatcacattgccagcgtataaacatcagctgtcgatgtccatgttcttttaattttcaccttgtaggaaagtcagcagtaattgtgatctgaaggagctcacgtccagttgtaagcatatgatttcaaggcacaaaaaataccaaagtcatatatataaagcttttgtttctctcggatacccttataggaatgacacagtttaaacaatgaagacaggggttagggcttataatgtacaagcccactgtgcttaagtatgctaaatatgggggaatttataaaggctctacaaatataagactcatcctgacttgcagaggcaggtgaggaaatgtgaatagggtcatacagaaggaaacacacacacacacacacatgcacacacagagacacacgcgtgtgtacacgcacaaataccacaaatacacacaagcccttcctacataaatatgtacctgtgcacctagcaaattagttttacagagataccttcagaggtaaaggggtcatgtggaataggacacataagatagtgataaccacagaaaggtataatcaaatcgattggtcatatttctgaatttagtgaaggttacacagtatgcagatatgcttctttgatgagtgaattgtaacaggtgaccacctttaactacaggtatacattaaagcagtcagggtttggtctgtctaacattttttggaaatgaagagacttgttagatgaggcactatgggagacacatgttgcacataagggtggtgactgtggatagccccttatataccctttaacacattatattccttggctcttgtggctgcatttctgctgttctgcaagctgataaaaagttgcagaaaacaaacttcttgacagctaaggggctaaatgtctcttgattttaggtatgacttgataataaaaatagttgaaggataggtaatgtttttctggatttctgacataggcaaccacacaaaactttgaaaagaattaatattctttaagtctaaaattttgtggagaatatattataattagaaagttactatccatttgacttttaaatcactcatcccttattttcacactaaattatggagtcccaaattgtcttttatagattggtgtcctgtgatctttgcaatcaataagcacctatggatacatgcttttacatgtatatacaaacacagaaagccatggaaaaaattctgggtttctagacaaagagtgaatagaggctggtcagagcagaggtatggaattccatacagtagagataaatctgctctttatttatttggccaatatcagatgaaagatgggacagatctgtgtttctctaagcattaaccatgtcaaattaaaatgccaacaataattttatgagtgaattcttggtgcatatatcaaaatagggcaacgttctaaattttgcccaggaaagagagtttagacaatggtaagctagtgcgtgtgaaggtagctcaacttcacccgacaagaggctgcacttggctgcaaattcttttaataaggcctcccagggttttactttcttagcagagcacaggggaaggacagctatgtcctcaggcctgtagcaacaaaaaggagcagagacacgatcaaagcctcaacaattacagccacctgggacttcttcttttgaatgtaaagatgaagaactggacattaaatagtgcgacttgacttacaggcaatatggacactttcgggaagttgtgcagtgtttcccactccctcttgaggtactcaatggagcccacaaacacaatgtgtttgagctcatgatagtgaaagttgctagcacgaagtggcatcaccaggttccggaggccaatcagggctgagctgacatccccaaagatgcagactacgacatggccactcaggacagtcatggcagcttcacttcgagtctgaaacagagagggttgcaagagttttagaaagaagtgctcacaacactggtataaggggagaaagcatcacttacgcagagaagaaagcgaacactcattgaccacctactgtggaccactgctgtggtttaggtgatgtctaaagagtgtcccccaagagccctttgtggttaaagtctttgtctttagaatagcattattttatggtggagctttgttgagttaaagccttgttgaggtccttagattattgaaagtgtggagcagtttatgtacaactgcctaggagttttcatgtgactccttgatccatgtcttctccaaagacagtcagtatgagaagaacaaacatggacacacctcctttctctctgctcatgtttgcttctacactctatgatcatccaccaccccaccagagaccaggcaattggggcagcccagcattagacttcgaacttcttaaactgtgagctaccttttctctttgtgagttagctatgtcagacatttttattataataccacaaaggtacccaatacagctattatttgtactgtagtaaaacaaaaggtttaatttagttcagaataatagaaaagaagtgattcttcaacgtcatgtataaaattgcacaaggcacctattctaatggataaagtctactcaggaaagtggggagctggaaaaaaaaggtaaaactcaggtcaccatgtgggctgctataaacaccaggttttttttttttttttttttttttttggaagttgaaagctggttgaaaactccatgtccagcatgttagagaacaaataaatctttctaataaatttagtacatacagcaagcatacatgtagagaaggcactatgttttttttctttcttgattctattaaccatcaaagtaaaataccagtaaggtttacaggacagctattggttttactatgccattatatacatgttatatactctctaatgcctgtaatatatacaggggcatatattctatttatatcataaattcctgtaagcatatattcacacagtactaccttctagaacaataggtttaagaaggatataccatgtagacctgtgaacaggagacaggaggtaggaatctttaggagaacaaagacaaaaaagggggatgtttaggtatgtggaaaaaaaggaagtcttagtggccataaaaatgggtgataaggctgggcgtggtggcgtgcacactcctttaatcccagcactccggaggcagaggcagaggcagaggcagaggcagaggcagaggcagaggcagaggcagaggcagaggcagaggcagaggcagaggcagaggcagaggcagaggcagaggcagaggcagaggcagaggcagaggcagaggcagaggcagaggcagaggcagaggcagaggcagaggcagaggttctgagttcgagaccagcctggtctacaaagtgagttccaggacagccagggctgtacagaaaaaccctgtattgaaaaacctaaataaataaataaataaataaataaataaataaataaataaataaataaataaataaatatgggtgataaatcatttaatctcagcacttggaggcagaagcaggtagatctctgagttggaggacagcctggtctagagagtgagttccaggacagtcaggactacacagagaaaccctgtctccaaaacaaaacaaaacaacaaaaacagaaagaaagggggagagagagagagagagagataaggaagaaagaaagaaaggaaggaaggaaggaaggaaggaaggaaggaaggaaggaaggaaggaaggaaggaagggagagagaaagagaaaaatggatgataaaatgagatccctttaggcccttttgctaagatgattattagttggtctcaggtgaaatttgaggtgctctttttagatatttcagtaaggtggcatacccctcactgtctcagtagatcgaatgtgatatctgaaaccataggctggctgctgtggtctgtagcctcaatctgatgatacaaacctacaagcttctatatgtccactgagttaaaactggttcttaaaatttacaatggctaaaaagtaaatcaacattagaaatgtcactatgaatgatgatcatataaaattcacattccaataaagttttattgagacacagccaattcataatatttaggtattttccatggttgctttaatggaaaacaagagttgtcagttgagacagagatcatatggcttctgagacttaaatcactcaatatttccttctacagaaaaagcatgttgaccctgtgttcagactttagggtttcctggattatttttggaagggctcgcctcatataaaaacccacaaatagtcatgataagggtctagcagccaatcaataaagacacagactaatgtcttttcccagccccagacctgtatccatgaagatgacaaaggaaggaatactcctatgtaggggaagaccccagttacccagaatgcaaatggctatctgcccatcactggccgtttgctcattatacaagtgaaaaggacaacagggtgaggtcagggttgggctcgttctttgtttctcctctgtcaacaccttcaccctgcctgccatctttcccgttccttagcacatgctcataaggtcccgagtgggttacaatgctttggcagaggcatattaatggccactggacataccagcttctgcttgagttaatccttagcactgaccagtgtattgattgcttaaacgccaatattcacaatattgtcagggttatttaaaaaaaaaaaaaagaaaaaaccaggagaggaggaagctagctttcatttctcgaataaagaagaacctatcatcattgctgatttcccagagtctaaggaagcttgagacacgcgctggaagaaacgtgtcacaaaaggtgacccaagaggctccccaagagctcccatcacttcttgccactttgtggggaagacctgaagttagttctttggcctcacagaagtactagtggctggagccagaagcagagaggtgttatgagtggggctccttaatattttcaattggcctggtcacctaagaatctggttcccctcagcagagaagtacaaaaggggtggaggatggaaacttgaaatcaaaggatccaaaaattagctagatactagttggcagaatggttcaggcacagaagctaacctcgggagcttagatctggggcaaataccagttctcaatgatgccacaggtacatcccctagagaagtgtgtaaagttccagtcctgtacctcaaacttggagagcctgacttgcctatgattaagacccaagagaaaatcccttcaagagtttccccatacacccttgaggccctcctaatcagaacctatctggacttgatgggactcgctggctatcttaaagccagactggtgcttattccatggatctgaagcggactttgtatctcacaccacttagcatcaaaaagattatttcagggttcaatttttttatctccttttcaattagagcactgtctcttccatttccaaatcatccaaagccctcagtgaatagatcgattccataagcatctttcacaggtgcttccacatctctgccctccagccctccatttttctcctctatgcactgaataaaaattccatctattcattactgcagagaggtctcctgcgatcctgttgcctcagtagtacctctagactctgtccttcccaggatcatgcccttcattcatatctaaattgttctcacagactcattcaccaccccactggccttccctttggcctactagaatccagccctgtgcgtcatgtctcagaacaagaacagtacctaacccatagtgtgtttactataaatgtttccttaactgatgctgtttgaacagatgaactcatattcctaaattcctttcttctaaaaagggataatgatcacatatcacactacactctatgtagattattcagatgtgagcaagccactggtaaccaatcacagagtgtataagcggttagaaccatctcacctcctggcaaatcacataaagactgttggctgagcattttaactttgtgtctgcagtttttgcaaactgagatagcttccagcacaatcctctattggctcataatgctaatttataattaatttgaaatcacacacacacactatttaaagcatagtggagtggagaaatctagtggcttaacatatagaaccactctgaggatctggaaaagtccttgttaaaggaaaggtggccctgaaatagaaaatgatagaatttccctacctgaaaatggagaaggcccacagccatctggggattagaggcacaagggagaagaatccagtctggccagccttcctgactattaacccacatttcagggattagcaagacaataaattctagggatgccagtgtaggcataaaccctaaagctgttaacaggacaaaggcagacagtggaatggattgttgtctgggctagctttcctgtgccagagcagagaaacctgctatttctaaaggtatccctaaagccttcccttgaagcaaccatctgagctgcaccatgacaacggaccacagtcttgcaatgtcacgctcagcaaatgcacttgcctgtctgcatcatgtgttaagaaggaccgaaaacaagttagttaggggaggaaacactactggaggtctggagagatggtttagttgataaagtgcttgccatataagcatgaaggcctgagtttgattcctgttacccccggtaaaaagaaaaggctggatgcggtactacaagcccatgaatacaaacatgttacaaaacaaaatgaaacaaaattacaaaagataacaatcccagcaataactcctatttcttcatggtatttacaaataatcatgataataacagcaggtaaaagaaaggtgcctctgaggacagagagattagatttgcaccacaatcttacataagctggggtcattctcatcctatcttcttacagatgagataattaaaatgcagagttcaagaactggcctaaggccatgcaactatcagatgacaggaccaggctctgctcccagagccatatgaggatcaggaagatgtgtattctatctcccatgataacttgtcatacacataatcaccactattgttctgataaaaatgcagagattggaagttctgctcttgggaggaaaaagaaaacaactctgccctaaattcatgttctgatcagagatctctccgcttcagcctctggtgcaagtgacagtgtcctctactattcagttaaggaaatctgcactctgagcaaactcctcatgccaggcagaggagacagacgtcgacatcatggttcctcactcaccaagatgactttctcaatctccttgggtgcacaccagtgaaacattccagtggagtcgtactttttcacattggagtccatgttgtcaatctgatcattgccaggaattaacaaggggtcatgcctggggagaaaaggcaggaaaacctaagtggaaaatgtgataaattataaatgcaaagggtcccccagagtcacatctcagaggagatgacagacgctgagaaagtggatgtcaccaatggccatctcctctcctgcagagaatatcccttgaaaggcagctgtccatggacccctctggaagggcacttgactttgtcaggtagtaattctgcttttttccctgcccattttgcaaatgggcttcatgctattttgtatacataaatacatttcagcttccttttttatgactatctcattcattgttgtctcattttaccaactatccagtttccccagcatacacacacacacacacacaaacacacacacacacacacacacacacacacacacacacaccaaaggattgctattagcattggcaatgaagagggaggaataggaatagagcctcatgctggctgactggcatcaggatggaaagccaattacttgctctttctgactacaacttctgacgcgatgctcttcgcagtaaaagctttaacaggctgcactttaaatattttagcaatttgcccaatcagattttgctctccctggatgaagccctttaaagattcagcagcgtgtcacttcagagcagattgactaccaaatgtccacatctggaatacatgatttcaatactaaacaacaccctctctcctcgccttgacaactgtatttgtgcttaacagtccagtgacaggcccctcatctccaccttcatttcccaacatggtattctctggatgagagcctccagctcatatgcatcttaataaacttgtttgaaattctcaaggctacacccactggaagtatggctgcatagaagtcttcccttcagtgggatgtcagggtctaactgacaacccaaggaattataataaaatcaggcaactctacgatgcccatggtataagaaacaagccttacagaccaacttatactcattgtctgagactctatatctgatattgtcagcatgtgagtatgttggaagccctcattggcttctacaacaaggaccatgtacaattaagatatcccaggcagacctatcttgcagcaaaattaatttccttaagcaaactgtcgaccaagacagaccaaaaatagaaatagatttaaatttcaatattgtatagtgaagtgatgttacctttaaaatgatctattccagatatttaaaggataatctttatttatgtactaatgtttttccctgagaaatacctaatatttctcattttttttgttctgactatagagactaaggcagcaatttttttaaagtactaagcttttggacatctagcatgacctgtctattatgccttccacacatggagaagacagcaaactcactgagtgtttttattctcggcaatttgctttgaggccacagcaaatgatgaataccttgtgatgtgatcctgtggtgtcatcttcaaggagcatgctagattactgcagcaactgtcacagctgatctttaaagagtcaggacaacccaattcagagtagcatctcagtagcccggctgttgacaggtcttaaggtgctgtaagctaccaggacacctctcacatataaagccgaggccaaatgtgccaaaatcagggtcactgagatggatccgtgggcaaaggtgcttcctgtgcaagcatttgacatttgagtgtgatccctagaagccaagtaaggtgtataaagagaactgaccctctgtggttgccttcacacacacacacacacacacactttagtaaatgagagcttttcttattcaactttgagaaatctttgacggttctctattcaacatctgtcttaggtaggtggacaaagctactctagagaaggagctggagagtctctttcaaaccttgaagaacatgttttgggatacaagagaatcttagacctgccctgaagacagagtcaagtttaaattctcttgcccttgttctttggtcagaaagatgtagtaagagtggcctaaaagaaagatagatggtcccatctatcttttccattattatgaagggaaaaagtggcagtgagtgttaattataaactaactaagactggagttcagggagagcagctatatataactctagggactggagacatggtttgtgctctaacatgtcaagtcatgcagccaatctcagaggagttccacagatattctgccctccacatgggtcactgagtcaggcctagatgatttaaatatacatcatctaggatttccccagaagggtctgacctgagaaacacagaaaatttccctgaacgcagatatttactttacagaccagatgtggcacccgaatctccaactttggtttctttaatcagtaatcaatcaacatgagttatcaataaactctgttcttagccaggaaaggaaggtgtagtgatgtcaaatagagattcacatgtagcagaaaaaagaaaatatagctcaaaggtcacggcacactagcatgtgcatgctctaacagatacctatcatatgcaggacaatgtgaaggcttccagaaagaacatgcttattccccattggctggcgtggcgtctgggaagggttgatgggaaagccagcaacagttggcctattgagaggaggaccatgggaataactggtaggctgagaaagataagcatttctgtgttgttctaccaacagctgttagaatccactcaagaagtgaggtttaagtagccacaaaatggttcccaacagagatgactggaaatgtccagtgtcctgttgcttgacctaaggcacagaaacctcagtgcagttgtatgagagcttcgtagatatgtactggcagtcaatagaggatgagcccactgactcatacgaacaacagactaacgaatgcatgacagcaggtagattcgacaccatgcttcccgaaatgaaaaatgtcatataagatagaaaatgaggtttgggtgttttgtttttttttaattattattttttttgagtaaggtacaagagatagcactattagtggtaatttaactacaaatgctggtgggcctagaggaccttcaggtttgaagcagtgggtcctccttgggaagagaagtagctagaaggatctggaaaggattggctcagtgccaggctgtgaaaggctagaaggtagtggctaggtaaggaacagttgttggagggtggggtagggtgaagagcattgaagactaacagacttacaggtccattaaaggtcatgctcactagattctgctgtgaggggctggtggtgctcagagtgtgacttttcccagcgacatcagactacgtgattactttgggccagccatgatggatttcttcaccatgtcagttcctgtagcaatttcgagtgtctttcactggtgtatgcctgccatgagacccctggcacgggtgggaagagaaggagtgggtgtctccagggatttccacctcttaaatcaagaattttccaagttgtccttctagaaaaagctccatgtgtttgtcatggagcataacgctcaacactagtgtggtccaagggaatcaggaggaagcaggcaggttgctatgcatgaggggaggatcatgggaagtctctgtgcagggcattccgatatctccagcttgcaaaggcctccagtgagctctttaagacctagtggagctgctgagcatcactaaatactagtccctttcatgtagtgactggctatttcttctactcacatgtcattccataactctcctaagatgttccctatgaaattcaatgcccacgtgccacttatgacttgccagggttcttgttgtgttttaaagggacagaaagcatatgtgctgggcgacagctatagctgttgcttcactgttgggggcccagctgtgcaatctgcatgctgagatcttccccctgcctaccccagaacataatcatattttgagctgtgctatttataaaactaagatccctgaggtgggtcccgttttgactttccatatacaggatggaaatctggactctgaagttgatagaacaagattcacagtaacatcatgggaggaaaaaaagatctgcaggttggaaagagatgctaaaacagttcttcccccttagaaataaccagtcctgctgaagtctccaccttgaacttttagcctccagaacttagggaaaggaatttcctactgtcgattacagggctctcttgagtggtatgtttactgaactttaacctgcactgaatacagttgacagcctaacccagaggaaagatgaaactagtcaccagccagtcagtcttatcaactgagagtattgttttcccaatactatttaaggcaagaaactacccctatttcctccaaagcaattcacatggtgggttggggactctagccccagaggcaaatctgtcttcaaatcttagtttgcctcatacttggcaagctgtaccctgcctcagcttctcaatctgtaaaatggaaatgtaaagtacaatcattatcaaatagaatcaatttagggagtatacaaggaaaggcgcatcatgcatacagcccggagctcggcagacctgtcttcaccaagtgtttactgctcccttccctactgttctttatggctggcttagaatccagtcctgctttggtggctcggattatggtcaaaggaagaaggcaaagtggagaaggccagccagaaagacacaggacactctgtcggctctcctactgccatgacaaagagttcccataagttgaaatcttataaatgttaccatgttaaaatgcctccccccccccactgtttgtcatttgaccatcatactaatactcataggcatttttggttattaatagcccatgtgtgtggatgggaaacagtgtgtgcttgtgagaagagggggtggtagaatagctccagtggtgcagcgggattatcctttgaaagactgactgaccagaagccggtactgttcgtcccctctcccctaagtcccccccttcccctaagtcccccctctccagcaggaggcagctgtgtcttgttccctctcccctgcagcccaagtcacaatgccctaagctgtaaagagagggcaaacagcatcaagggtatgtatgaagtgcacagcttgcatgaatgctcagtagaaaattatcccggcgagccccttgtcaagacaatgtgcttaggagtggctcaaaaatcaattaaggcttgtgtgagactttgtcatgtgccaaagatctgaaggctggtttaggaatgcccactacttctaacacagcagtcccagtgagttaggcatctccccccctctttgctcctcacctctcaattcctacctcctccaatgtccacagctagaaattaagcatgcctgacttcaagaggagaataaaagatctttgttttgagggtgtgcagagcaaggaaggccacttgccatcaattaatctcaggaagtgaactaaatgccctgccacagcagaaacacagaaagctttgccttgaagacaagagcctaaagctaaaccgcaaatccctttgctaggcaaacctgctgtgaggaagtcgaattatattttaaagaggagagttccgcttacagccaaaggcagcaaaacccagtttactgtatggctttgagttcaacactggacttcagaagctcacattaaaacacgtggaacccaagaaattcctgaaagaaggaagttgttactacatagtttcagaattttacccttctccctgcttcaccttttaggacctaaggcttcatcacatggttaggccttttccatcaccacaagcatccctcccagatagaggccaacccatcctgcagtgagctccgagaaatgggcatcagggtaaaatgtgaacacagtgcccccacaacctttccatctaaatggcagatgcatttgtggtatgattgtggaactacagggtgtttcctagacttcatcttctggttcaaatgttcttcctcagcttcagtgagttgtgtgagtctctccctacagaggtgtgagttgttcattcagagaaaagggctttgtgactgcctcattagatgctaaacttttacaggaccaggatcttgcacccctacccctagcccaatgcattttcagcaaccagcagaggacacaataagcaatcaaatttacaagaaccattcaaagtgttctgccctctgagcatcactacacccagcacccagcatgcttccagtatctatgcttagcaagagcctgcttcttttgttatcttatgataacttggtctgggctcttctaatcatttatacacagagacagtgtatttgagttaacacagagtatatgccattaagaaagacatcatggtgggaagagactataaagtatgtctttaagcaatcaaggctgcctggagtttgcctggagctagctgccctaactacgtagcagtgaggaattaggtataatgttcttagtggtccagacagatgttattaaggaagaaacttagaactccagtataaaatatgaatacttctgaaagatagagcatatcacttcaagtttctctcatggttctggttctagtaggaaggttctagccaccattcctgagtgccttttagctctctgaaattaacattttcagttctgttgtgcggatcctgctttgtgtagtctggcatctgacagaatctgtcaactctgcatctaactctttaaccgccatcattgtctctgggatgtggcttttctaggacccagccactgtcttctgccagattgacaatcacagagccatctatagaaaacgttcataccaggctctagtcactctggggcaacatgggaccctctcaggtcctctggttctaattgcattggcgtttcccatttctatctaatacagcatcacttgctacacatcatcttcagagaaaaatggaagttaccacctttaccctgaggaaatggctcaggagaatgtacatggtccttggctctataaccccttaagtgacagaacagaataatgaccttctgctaagcactaacttgttctgattcctgtgtcaagttcatccaaaccttggactcatgacacccatgatttatttttctctggtcccatgggggactgtcacatgctgttagtttgtgcattagggcaagaatttatttagctaacctgtcgctgccttccttctttttctgcccagtggaaaaattaggagggtggcattctgtccccaaccctgagtgggctctaggccattctaccatttcctattattagaatctgtcacagtggcagggtctgatgtgagaaaatataacaaaaggtccccatgaaaggtatgagtcaaaagagaagagatatgatttaacgagtagatgagttcatttcacctaatgatcagtcagtgcccaagagggataatgtgttccttcacatcatagtcccttccctcttaggaaactgaggtcttaagattcctgagtctcatggcatgaagcgctcctcaaagtgtccagtgcctctgttttgggcatcattcattttctgtgctagcctgggtgagagctatttcttcgtataagttgtctacctgacatataccacacataaatcctcatgtctgtgcttctctgcagatctcaggactgatattagcaatgccatgtgaccttcttaggaacgatgtctaatttgggcctgatatacatttcaacggcaaactctgagtcccttgatacccagaaaactctaatagagggtagggtttgggtgggatccttcttacacaactctatatttatggtcacagaaaggccctgagggaggactccaaggtgacccttataaaattacttcccacacctaacttagggaaccagtccctcaaaaacctgcaagagtttcctgatgcctacaacaggcaagatcgtccataactgggagaccagaccatacacacgttttcagctcctgtcctattactccatggacccttcactgtagccatactaagccatatatagtggtctgagaagcatcaccttttcctccatctttctgatgacatgagacttccccagatgtgatagacttcacctctctatgtcccagcttcttcatctgccatatgagagagctatacttgctcacagagctatgatcatcaatgagtttacatgcataatactctgaaatttatgcccaggagaaccagaaggagatagtaacatcagttgaggatctcctgtaagtgatggcaaactagaccgccttcatctttcacaaatcaaccttggccatactgagggacatcagtacttctatgttcccagacactataaacccttctcacttgattgtgtggcatgggcttgcctgtctcattttaaagactagactcccttctaccccaccaagctcaaagacttcccacaatgctttaaacacagtaggcctcattgaatatttgcgggatgagaattaatctgggagatgaacagtcacctgaggcacacagcctttctggagttccacttatgaacacatgtgagagcccaggtacagataatcaccatctagagatgagccaaagaacacaattcactatatatggctatgaaaaaactgaaggggattcaactatagagtccctgtgtgtgtgtgtgtgtgtgtgtgtgtgtgtgtgtgtgtgtgtgtgtgtgtgtgtgtgtgtgtcttgtgggcaggaggggtaggttcagcttcacattgttctgttttaactgttcatcacagggcaggttggcttgcctccctaactttctagatagcgttcatgaaattgggtctgtgaggcttcaaattaaaaacctttgactgagctattagagacaacattcttgccctccagggatttacaaatcagcaatccgtcagggaggaagaacaagacaacaggtttggtgatctgggtaaaaactagaagttctttctgtaactctcagttaagaaaccagcaaagaagggatgacagtcagagagagcaagggactcagggaccactgtggctcacttctcagtgggtacagtgccaaaaaaatctctactacttctatacccagtcacacacacacacacacacacacacacacacacacacacacacacacacacacgggtatttatgtagtgatcatacagggaatgaagtgccactaaaacaccagggtgagcctgacaccagaacaaacaaggagacaggatcattagtggaggatccccacatttcctgccagcaaatgatttggagaaaggcctcactctggaggctgttttatttgtagaagccaaggtggtaaattatagaccatctcaggccattctgggctctgagtctctctcaagctgtccatatcaccacccataggccactaaaacctgcccacactcggaatgattgattctgctcaaaagtgaggcatggcaccatgctggaaagcccacttcaaacaagtcattagcttctttatggatctggggacagggaggggctgttataaggaataagaccttggagtcccatctcctgaagagtagaaaaggggcatttgaagaggtaggaggaaataggaaagaaggtttgggtataaatcagcaaaagagatctgaaagaaaaggatttggaagtctcattaacagtgctatacattccaaggtcaaccagaaggtcctttggttgggtcctccattgctaggctggaaatgaaggaaaatagagaagactcaacatagaccctgcccctgtgtctctgacattagataaagactgctaaccacctgagggggggggggaggattcaaggtcaaagaggagtatcatccacttgtgtggatggtgttccctagctcagccatgatggagagcattgtagataggtgagatagcacatcagatgatggtaactttagtaggatcagcagcccataggcaccaacaggagaagcctgagttctgtagcttggcaagttttggctcaccacctgacccccatttagctattctgatgtactatgaagcagacagctctggcctgggatgactgtctccctcagtccctctcaggcaggcaatgaaagcaagatccactttgaaaattctcccccatcatgcaaactgacatgggcatgcttttcaaaaacccacagccaatctgttgatcattacttatttacaaaggccttcaggcagaaagtcctgtaaaaaccatacttgatacggtatacactagctttctctgcttatggaaaaaagtccccccaaggctacctccaaccatcactttctattgcacataaaatgtagcacgtaacactaaagtatttaatatatatggtataatatatctacagaaaaggcatttgtgtagaagtatgttaccctggatttggtaatttgatgttttgctgaaggctacaactttaaaaagcctccacctcttacaggagacctgtcatcttggtacccaagagccaacagaataaagaagtacccttaagcagcaaaactttgacacagctttgaagcatatgaaaacagtgtaactcctcagaattattattactcgagatcaaagcggcgagtcatactttacatagcaaacagggacagggaatttggctcccaaggtttcacatttttcagattcctctttatttatttatttgcttctctaaatttaggcaaaagaaagcacttgggcttttctctcctttaaatggagaaaactctcagcattagataagccgattacctaaaggtgagtaaataggacttctatgcttggctgacaactggtgtcataaacccagtggcttggcagttggtgccttttattccttccctccctccctcccatgaactgtaaacacgtaaacatgcgtgtaaatcagtggcgccccagcaaggcggcacaggagagatgtaggactccgaggcctttttcacaggattggaaaagtgtatttgtgacaaaagagagggaaggggccaggaggatccatgtcctcagtactgaaagacatgtcccaggcaggtggacacaggggaagcaagaatgcagacaagtgggaattagaaacaatcaatactgcatcccagtaatcacagggagagggtccatggctgggaaagaggcacacaatgtcagggaggcacatagttcccgaagagggaacatttgggatatacagtgctaaaatctccctctcccctctcctcccctctcgtccctctcccctctctcccctctcccctctctcccttctcccctctccttctcccccctctccctctcccttctcctctccttctcccctctccctcctctacctctccgtctccctctccttctctttctctctctctccctccctcctttacccttcccctctctctctctccctcccttcctccctcctcatctcctcctctccccctccccttcccatttctctctctctctctctctctctctctctctctctctctctctctctctctcttacacacacacacacacacacacacacacacacacacacacacacacggagaccaaaggacaacttcaagtgtcataccttgggcaccttccatcttttctttggagacagtctttcactgagtgagaactaaccaagtagtctagggtggatggcatgcaagccccaggaatctaccagtctccctctctccagttttaggattacccatgagtttctgtacttggctactccccagtacccatggattgtagatatgcctttacatttgtaagataaatacttttaccctttggactgccttcacaggccctgaaatctttgccatgtatagtgttggggaattaggatgtctgagaaaacagatggtagtgtcgggagacaatcaaagaaacaaagctgacacaagatgaatttgtccaaacaggaacctgtagagttgtattgaaattctgttgcattcgctgtttcttagatgatgtcttggggggcgggaggaagggaaggaaagatagatcaataaagagagggagggagggagggatggagggagagagggagggaaggagagagggagggagggaaggaaagaggaagggaagaagggagggagggagggagggagggagggaggaaggaaggaaggaaggaaggaaggaaggaaggaaggaaggaaggaaggaaggaaggaaggaagggagggaggaaggaaagaggaaggaagaagcacacccagctccataattaatattgcttttaacctaagcagaactggattgcttctgaactttgctttggcaagcccacagattattaaacttttttttttctcagtcaaaatcaattagcagaaatttgatttccattgacaggataaaaggaaggtaatcttcaggttcattttttattgtgatgatacatctcacatatggccttaagtacagaaaccagtcctcagagggactccagcagaaagagtcttgccgcaggcaaactaaccacagagtccctctgattggctcccagcgtcattagtgccactgctgtttagtaactacacacagacaggacatggtgacagctaagactttaaagcctatgtatttttcaaacagcttttcaaactgtttttcgtgacagaattttttcagctctatcattaactgctgacaagctgacagaataaatactccagcctttaagaagccatctaacgatctggctcccctccccccatggagctgagtagggagggaggtctgggcctgggcttgggcaggtggggaagccagtgaaggagctggggaagtgaccatgccggggttgaggggggcctgcttacctcatcagcttcggggaggtgttgggcgagttcctcatgcccccattacgttgttttttttttggtgacagggttggcggctgctcatcttcaactgcaaatacaggcagcttgtgagattatgaacagtttgagggcagactgcgaaacacaggcaagatatcaaaggacacacattcaaggctcagtcactcactagaaaggcagggctgtctttagaggccccatgacaaagactggatgcgttagtcagtgagaccagctgagaggaggttgaagcaatattgctttatgctccaacccttgagcatgcactgtaaacagactagaacaatatataaatgccctggcatattaaggaaggtaagaaataatgatttatctacacacaaaaaaatcacgtcattattcttgagttaattttggttaagagttaatactttgcttggttgaacaattgaaatgaattttcttgtaaccaaaatcagaaacagcgttgtatttgaggaagcagattaaatgccagcctgccgcctttccaaatgaaccatcttaactggttcccaatccttgcacctacagcaagaatcttgaggaaaggcagaaatcccaggccttggttgcccatggttcccaatgggccaggaacactagtgcatgtaggctcaagagttcccaggccagctcagctctcctccctgccgctgtgccagggagggtacttggtgctggtgaagaacattggcatgaaggaagaggtggctactgaatgatgcctcttaatgatatggcggatggggatagagggtggtggagaggaggggctggaaaccatagactgctttccaaatgtctaaaccacacaggccactaagcaaggtgaagcttcactcacagacaagacagagcagtagagtctgctgctcttgtccaaagctacccgctaataactgctggagatggattagcccgcaccatgcttggtttgtaaagagagatgctggataatcagcatctttgcgcagcctgtcttccaggggcatgtgccataaaattccagtcctgctctccccacccccacacagtccaggctaaagctgtgatgctgagaaggagatctaggatcctcagattcttagagttgattgtcacacagactaggaggaaacagccctgaaactcggaatgcatggaagttaccttaaagctaagaagagaaccattagtagcgacaacatcaaaagaagcttggtatatgttaacatgtatgaggcttagatgagggtggggagggtggctaggccagctcagctgcttgctattgtccagaagacccataacagaacatgcatcttacagtgcttccctgaaaaccctaaataaacataggcggttaggacacacagcaccacaggtattcgaacaatctaagcatactccagatcggcttcagaatctcccacttttgtttttttttaaatatttatttatttattatatgtaaatacactgtagctgtcctcagacactccagaagagggagtcagatcttgttatggatggttgtgagccaccatgtggttgctgggatttgaactcctgaccttcggaagagcagtcgggtgctcttacccactgagccatctcaccagcccagaatctcccacttcttaggagtagcttttctactgtcaatttggggttacctcattctgactgacccaaggcaaagggaaaatggtgtgtcaaggtgagaaaggcagaaaggctgtgcaaaggctcccaaccccaggctctctcccacctgctccatactacactcccacccccacctcccaccctaggctccactcaggctgagaccctatcagtcacttagcgctccaggctgggactatgtggctgggaggatatcacatcttatcagaaatgagtatccacagcaaatcacaccgagactaaacagcacttaaaagattaaaggaaataaatacaagccacataaatggtattgaaaaaaaaaaaaaaacacttagggttgatatgcatctctcagctggcaaacaggcactctgggtttgacctgaattcatctttctttcagaggacaggaggtaggcaaccaaagcaattggaggccagatgaagtgtgagtgtgtgtgcacgtgctcacacatgtgcctaggtatacttttgcatttttctggcttaggctgcagaaggaagtctcacattggtccttcgcataatacaagggtatatcttttagtgtgtggggccaccattgcactgcaactgtgggacctggggggctgctagtacaccacttcagtgagtttttatgtgagttcatgaggatgtttattgggaggtacaaactatacttttcctttcatgagctcacagtgcaacatcccaaaaggtctttcatccagcctagttgacaacggctgggtttacctgagaaccctgcatattaccatggttgtggcaaattgtggaaagggtctctattcgtccctcacactggctgttctgctggcttcttttgcttaactttttcttccccattagctccaggcctctcataaagtaccctctttggttaagcacacatttcccttttatccagtcactgctgttggctggcatggctcctcagatgtgagatctgcaagttaatatgtgttcgccagctctggggagacacctcgttgtggagggagtctaatgcctgcttcgatgcgaggagactatttattttcattgtgagtctgagagatcatccatcataatcatagcacatttagactgggatttgttcacttcaatggaactgtgttcaaagctttactcggagcctggaaatctgttccctgaagagctgggatggaaaatgtccccggcttaaatatacgaatgctgcgtaacggagagcatttcacatggctcaggtcgcacaggaagatcaaggatacgttctctttacaaagagggacagaaaatatatttaattatcctctctttgggttttaccaatgtctgcatatttacagaaagcagttctaggaaaagtagctgatctctcagatataattcttatctcatggcttctatgactacatgagaaatgaaaacaaaagagagacttaagctcactcgctttcacgaaagacaaacatgttcaagcagcagcgagccactgccttgggagcacaaagagtcacaggcttgaacttaacctgctttctggctcattgcaatctacctttctagcatcttcccatgcctccacacgagctgaatgaagaggtgttcctttaaagaaacctgacttgccagcttctttaaaacacaaacaagttcgagaatctaatgtggaatttttataggagccaaactctcccaagtctttgagccctcgtaaaattcaagggcttgtttttgcgcatccctaagtataacacttaatgttctgttgtaacttcccagcgctctcttgtctaataggccctgaatctaacagttttacagtttggggagaagagtcagcgttaggaaaatgtcaggcaggtctaatgaggcttcagatcccctcgttggcgctggagtttaatttaaacttacaatgatgttttaacatgtttgcgttttcttgactaaagaggattcattatttcggtgacataacctccagacaatgctctgggaattgatttaagatgtggtggtaattccaacagccttaatgcagagctgaacatctgtaacaacatttcgctctccttcacatcagcgttctgtttttaagcaagagcaaagcaacgtcttccagaaacattggccgggggctggggcttacttcaaaatgatcagatattttacaagatttttttttaaagcaacccctgcctttgtcttcctctccagactgcaagtattatgccagagaccactggcgcttcttgtaaggatccgtgaggtggagtgggtaatgactgtgactttcaggttgcccaagtagcctgttacttacatggaatgaatccaccagtcccctccagccccgggcattttccctcctccctgttttccccaagagattaaggagggcagagtggggtggggtggagatgaagctctgagatttaaaggtgagtttgttggctggagttaaaaaatagctcaaagcaaataaactcagaaaagtaataaaaggtaacaactcataaacatgagtcaaacagctatctccattacgttattaatgaccacatctggagtaacccacatctgcacacacttagcagatcattagtaatgtcatattcacactggagtcacttagaataaatggcatgcatagtggtattgaacacaaaggcatcaaactgaaggggcttcctactgaagtcagggtgcaagctgctagtcggagagtggggttgttttcatgatcatccattggttttgttttttggttgtttttttttttttaatggcttttctctttcaaattttgtggcccaaagaagttaaatgcatgctgaaagccacagtagctctctgtcttctgcaactgagcttagtgtgttacagtgaaacgctgaggggtaccaggcaactgttaaacactgggacaaagcccagcactccttcacctggcttgggcacgtgtggagaattgggagtcgcattcttgtgcataaatgggtctttgtgatagcgggctctagcttcaaccttgactgccaaacaataaggagagaagaaaattgaaattaatcccgaatgaaattgttcattacaaaagttacccactgttttttaacattaaatacaaccatcattttgtgttagaatggaagtttctcccttgtggctgaatggcagattttccccacccccacccctcaagtgtccatctaaaatactctctggaggggtgacatgtaaaacttaaagaagacattctcctttatgcagaaatttctaaaagtatatagagctcctcttctctcctacaatgcacacacacacataccccaaaactaatatcttagcaggatcaggcagattatcttctggaaagtactggagaaagtcctgctcaatactgttcatgtttcatgtctttatccctcagtattaaactatggaaggcccgatcagccatcttggttttgataccactgctcagcttggtttaaatctaaatgtcatgcattggacactcagaaagagtagtgtggccggatcattcagggcagagctcagaggtagagtgcttgcttagcatgagtgatggcctgggttctagccccagcatcactagaaagggggagattgtgatgtgccacgtttccctgagccatctgtaccatcagttccatcagagagacacaagtactttctagagtggtcctgtttgatctacagctgctctctggcaaacactgaggacaaacagtgaccgcacaattgctgttgtcaaggttaataatagcatgcttcctttcctctcctccaagacagaccacagaagtcccggtgacattgtcattctgcagagagagtcatgtggacaaaaggtccttgactgactggagtccctgagaaatgtaaaggcctgttctccatcaaggagtctggactaattaacactttgggtctttataatgtggacaccaggggaaaatggatcctaaatgagagaaggatgccccacccccacccccagcatcctgtcatatatacacaggctggtaacaggaagtggtggtcctttagaaatgactgaaaagcaatgataataaattccagacagataacccatagtatgggtgggtaccataactgtctatgctagtacctgttgatgaaggatgatgcctgtagctaggaattgccatgagtcaatcaatgagactgggcactaagcatggctaagacaaagggtgggggacatagagaagtcatccttaggatgagaatttctgatctgacattcaggggatatagtatccaagaattcttcacagtccccttactaagatcaatcaaggaaagtggttgtgaaagatcatggcaagatattagtgtacaaataatgacaagatgaaggatgttaccccaccaccatactgtctcaaacatacaaaactccctaaaattgaacagtcacgtcttcctgtacgttatccagctgggaaatctcacaacctgtagctgaaaaaacaggaaacagatttatttgtaaagctcggagggcgtaggttattaaaggaatctgtcattatataaaatgaaaatgggcggctatattgtactaacatggcacagggcgcacccgccccgtggagagctagtaggacagaaaggggagggtttgttggtgattttccatttctggcttttgtagtgctaatagaagaataggaaaggagactttaaggaacaataggttatgtagaagttaatcacagggtatatttctggctctattcaatgcctaggaaacctgaattatgtaagtttgagtccatcaatatagagtaatggaagaattcagctcctacacgagagagagaaaaaaaaaactacatgaatatgttaacaggatccatgtgaccttcactgtaatttctttctataaataggaataaagactcctctagaatcaaactagatagactgtgtattcccatggtacccacaaattccatccaattggattgcatctagaatctcgggtcatttatcttccctgaactctgaccctgctgtacttgcccatcactatgcactcctttaggacatctagttgcctttggcccttttccttcttttttattttttcaccttagaataggcttctctattgcctccagtacagtggaggctcaggtgaaaatcctaggtgttaccctctcagcaaaaagacccagacatgaacaatagaattgggggaggagcatacaagtgaaatgagaaatgcaagaacatccctgagtgattctaggcgagtctaaagagggctaccggagcaagaagaccacttttaattcatttgaaccaaactagggcaggacttaaacagaactcaaaaaaacccagctcaaccctaatcaccatctcccaccccaccccaccctccacccccaccacattcttcctcaagccaaccagatgggaaggcctgcaggccaaaggtagaattgattttttttttgtttgaagccctactgtgcgatggttgtgtttttaggtcatttagagcatggatgaagtctgctcagctcctggcaccagaagctgccttcttctcatgactcttcataaccagggtcaacagtggcctcccatgtgcttttgtatagcccacaattgtttaatgattggtaaaagctataaggctaatatttcctaaaacattaaaatggtgttagctaggaggcatgggaaggtatgtaatctcagcacttcaaaggctgaggcaggaggattagggtttggggctgacctggattctactgagaataccaagaacaaaacaaaacaaaattcgagttttagtctctataaataaaattacatgtgaccagagccaccaacatttatttccctgttgtccctagcatcttttcttctatatcaatattgagcaacttcataacttcaatagagaccatatagcctacaaagctaaagatattaaccagctgacccttggcagaaaatctgtgttgatgccttcagcaggctcctctgcacatctgtccagcttctgacctttccaaaaggcactatactttcccacttgcccaaacaggcaagcaatacaatgggtcagagtcctattatattgaagcacacagtctgaggacttgggggcagatagaggtcatttcgtgacactactgtccctatgacccaacctgctatgggccctattggtcccttcatgttttgaggacctgagtcaggtgagttccacctttttcaatcaagcgaacttaaattcatctaccgggatactctgagagtcaaggcgaaagcccatcctctatgagtaattcctctaagctgtcaggatgtgctgcaggtccaccctgtgagagccctgtacaagacaacagattaaccattagagtagatatgctgaaaatatacagcttcaacctttccccggctagctcagagccatatacagatgattatttcaaccgtcagctgccgcatagatttaaacccccgcatagtaactcctggattcgtctgccccttgtcaaactggcatagcgttagttgtgggatacatgggatggcagtttcactgagaatccagaatgatccagacggctgctgtctctttgttaacaggaagccaaactgatgagtttgtaatgcgtttcttatcaaagatggtttcagagaagaaaatgcaccccatcagtttggcaagtatttcatagaggccagattatgggctttaatcagagcactgacgttattttcttgaagaaagagacaacccagcatccatcccattaaaatcatctcatgccaatgaattatgtatttatgaatttataattatccttgattctttccttcctgctgcatccttaataaaatcatcagctggagcgtacagagtgatgacgtggaatatacaagcatccttgtttatttatttatttatttatttacttacttacttacttacttattttaaggttagtgctgatatttttgagcctcctgtctaaaaccatcattgtaaatgtcagggtggcaattctcagctcaaacatttaacaaagacataaagaaatgtaacagaatgtggggtacctgaaaacaaacttccttctagtatgccttatttattactgtgtaggtttcatttatatcatcatgaggaaaacccctgttaaggtgccagccactgctctctgcaccttaaaaggactcacatgggtaagtgaagctcccagcttactgctgcccattttggtttcctccctgttagattccaaggctaaacactggcattaaaccttgtttactaggtcatcctttcaaaaagatgagatttcgttcattatgatctttcctctattttcattatttaaagatattagatgacgttcttgacttctgagattccagatatgctcttaaaactgactgcaccctctccctaccctggccctgcgcatttctcaagggcattcattcgagtggctgttcccaccaccccacagaatgctatgaggtaaacaaccagtggcttatttctttggatcacttcacactgtgtgcatgagattgctaaggacagcctgtgcaacacaggcttcctcctgggtttacaaattgtcagatagccagaggagtggagaaaggatcatgctgccttggaacctgagtcttgccacctgcccagggtgagaaacaaaaaagtgagagggtgtcagaactcttgcagacatcagtgcaaccccacatccaccgctcccagttactgctatgctggtttacattttcagtttgggttgcgagttcctattagctcgtatgctttaactgatatctcaccctcttcctgttttccccctccccgctaaacagcttcacatgaatatgagtagcagatgtcaatcatacttttatttccgttttcactctgctatttctgttgttaaaattagtgcttggtgggctgattctgccttctaaagaccagccccgaatccaactgtgtctacatagagctgttttctaaaccatgtattatataaataaagatcattaatattaccattatcaggtcatccataaacaccatatctgctgtggagtccattgtgtcaagggccctagaattctaatatgtattccagatggttaacacgatatttctctgaaactctgataaaagcaaaatgcatggattttttagtgcaacccaggtacccagtgaaaaatgtcctgacagagccctttagaaatatgggatgcttttaaccttgggaggcaaggcacagttgggattgtgattttacactaaacacaacatttagtatggtatgtttcttaaggacatagtaaccttctaaagacagtgctgaatggtcagctcagaatccatctctactataatttattgtccggatatatcctgtgcagcattttaagaatacaagtgtgcagtgggttccttgctcagcacactgtgaaaagaagctgtggggtgtagatccttcggcttgaagggttccaaagtgctctggtctcatcttctttgggttcaagactacactaaaaatcaaagccagaagcagagcttaggtctgctcactgaactcagatcattagccaccagaaccccacccataaaggagaattagatgataggggatcttggaagtcttaacagtgtgtgtgtgtgtgtgtgtgtgtgtgtgtgtgtgtgtgtgtgtgtgtgtgtgagtgcgcacatgtgcaggccagaggtcagcattaactgtctttttcaatctctctcaccttaatctttgaagttcaatgatatggctagactaagctgactagcaacatgtcctatgcctgctcttgcaatgctgggattacaggtacatagcagcacatgggacttctgaggcaggttctggggagtgtacttctattgtcatgcgtcatgcttacatcataagaactctacaaatggagccattttcacagtgttctaggcctctttggggttctggtttcagaattactgggcattataagatctattgtttttctttctagagatctgagagatcagatgccctgtgatgcagagatcacaaggtaatagcctgacaaacaaatggagtcactggtaagctctgcttaactccatcctgctaatccagggaattctgtaggggacagtttttttttgtttgtttgttttgttttgttttgttttgttttttgttttgttttgttttgttttttttcagccagaaatttacccacaaaaccatggatttctaactacatttaaaaatcttgcaggaaaccaggtattcattctaggaaagtctgttgtctcacaggatatgggttccgcaactggacaaatcccccactgctgtatatagtccctggcttcacaaggcaggcagtcctcattagcctttgtttaagcacaatactcccaagatagggcaaattcttatggcatgctatgtctccaattgtcagttgatactgtgtggcaaggagggtaggagctatgtaccaggattggaaagcaccctactggcttcaaacctacacattggaggcttacaaaattccaattggctttcctatgtaatgtgaacagtccaagtacttaggtcctagtgatattctgaaaatggatggaaactgtaaaaagtgcattgatgagtccccttgttacactcttgctaaactttctccacaactgttttcttgacttgaggaataatttggaagtctgttatgggatcctccacattgcctgtctattgtcctttaatggctcagcactctatttaaattggctcctattctctttctgcctcccgtaggcaactgatcctttgtccaactgggagaatgagtttggtgtcctgtaccaccctcatcctttgcattattcaacagtggcctttgagccatatttgtgtggccccagtgaactgttcaggccaagtaattaggtttgctaagtgtcataaaacaaagcaagccaaaaaacttttcaatgggctccacttgaggaggctgtgacaaatgaaactcagatgtgaagaaacatggagaaaccccactgttccctctaaattacaggaaacgtgtgctgtctgactgtaaggggctctttttcctggatttctggtgggggggccatgagatgatagacatacattggcagggtagttaagtaatgggatgggggaggtgatacctccttcccaatgtattagtctactgagccttcaagaaacaagctaccctctccctttccagaaaaacgttcctaaatgaggtagactgtcttctttaagactttcttggctcttctcatattactccctgtcatctccttagttagttctgttattaacttatttcctgctctaatgtgtccccaactagactttgaagtccctctaatgtcgttacacacacctcacacatcgatgactctcccacagacttgagcccctggtgaggtttactagtaaattgatcctagtggctagatcaagcttggcagagtaaaggaaagggtctcgtggtcaggagccctggcttcttgatccaaggcctagatctcatgtgcggcatcagcaagacacttcccatcctaggaggttggaattcattaaatgtaagaccttcccagctctgctcagtgatgatttgagcctgaacgctgtctcctattatgtgggaaatataattggagccagccattgactaaaggccacataactagccagccacaaaataactctctaatacttcctaccagactccacctagaaggttacaaaaggaaaaaaaaaaaaaaaaaaaaaaagactgctgtgccagggaaaatctgatttgctttggcgattaaagttctggcttccaaggaaatgaaccagggaaatttgtagaatgccaatgtttgagtctcatgcctgtctattcaaccaaaaccttgggaaaactgggctgaggatgaagttcaagagtagaataactgtctagcaaacacgagttcctaggttcaattcccaacattctatacatacatgcatacatatatacatacatgaatgaatgaagcaataaataagtaaataaagtaataattaaatgaaacctcaggactttgctttttcttgtactttccttttaaatctccaaaagacatcaaaaaaatgagaatgacaagttaagctagataaacaagacagatttaccctcaaatatgtaatacacaagttatataaacctagccatacaaaagaattatatgacaatgtcacatcagagatcaatacacaccccagacagtcagtcttacccagtgggaccttcacagaaaataagtttagagacaagaatgagatgggaagacataccagcctgggtttctgtgtgcccaaagatcatggtcctctgcggatacacacagttgagaataatgtagaaatgggcaataataaagtgtggagagaccagagggtggaagcaacgagtaaagcaaagaccttgaaaatactaatataaggattctaagaggatcactgtgaatggaacaaccagggtacctgagcacacagctaaagagtcttggatagatacatgctataaaacttcacatcccgaatgacagactttggacaatacctgagcaagtcagatcatcttaaacttttttcccctttattctggtgggtgggaagtaaactcgttggagaaaatgatgaaaccctgcctagctcagcccaatttccttcaggctgctacaaagttacacttataactttgtccaagataagacatattagaagcgcatacaacctaagtgcaggggtctgccatggacatttcttatcccgagcaggggaactgatggcaagataaagttactgaacctcttggagaagggttctgtgggttataggaagctgatgtcttactgagtgatcaacctatccttgactctcagcttgttgtttcctgtcgtctgggcagagatctggaagggaggccagcagggaccagcttttactgaaaactaatgacaattgttttctgaaaagtcattgtcaacaaaatcagttcttggaagtagagtcctggacagggaactgcttccccaccatgtgctgtgtggtttggtcggattaataacactttgtaaaccacacaggcaaggcaaagagtgtccagcactggccagcgcccaccacttatacctggaagtttcaaaagcccagcacagaaatgtcctaatggacgctcaaagttaatgaattaaaattattattcatttacaacataagtaaagtatatcttccaagttactaacaggtagaatactaaagaaaataggtaaattattctctcaataaaaatgtctgtctcgtaaacaaggcagtatttatcacatgttgtacttttctttttctttctttctttttttttttttaaagatgtatctttggtttaaaaaataaatttgaaaataggctatacatatagatagaagaaataaacagttgttgcctatagttatgtttttaaaaagtatttaatatttattttggtagtcttatttggctcattgataatgcccaggttgaaaaacaaatcactttttctaaaaataattttactgaaatctaaaacaagacataaaaataaacccttatgccatgtgtcaggactgacttctggccccatagagaaaagcaacacccattggtgaacatggattctaacttggtaattctttgtgagacagcatcaagttggaattattttcagacggatattaatccagtctatttattaactttataaacatgccctccatatcctgatgggtactgtgggaattaacctgtataaccaatagattaaagacatggccattccactcagcaacagcgggagggtggtggggaggcaactggaggctgactctgctttctgggtctttgtcttttaaattcagtgaatgtttacttagctggaactttctccaagtgagcattagactgggcaaattggatttaaaagaaatatcgcaagttgagaggtgttgttttaatggatgcatatctcttgcaaaaagagtttcagatatccatcttagagaaataaaggagaatcaagagaaagagaaaaggcaggaagtgaggcaggaggataggcatttagaggccatctgggagggagcatttcatttatagggttgcagtgccaccttctggttacttcatatttcaagtccccctgatctgaggccatctatctcacaatctaagcctcaatgtgcagctgtacaactgcagttctccagcgctgttatacgtaagaattttattgcccgtcagcagatttctaacccactggttgaagtttaataatcttctgttacctgaagtataggttatataaaaacctagcatgctaattgttgacaaaccaattctaatacacaaagctctgtaactcacccagtaaatacccaaatacatcaacagagagagctcctttttgttctaacagtgtgctattaatacaactgatcatttaacatgagattcacaacgcgcatttcaaaatatggaggaatcaggggcaaggcttccccttattaacttctcctttatttacaattgagaaagaaaagaacattctctcctccccctccccactccccccatttttggagaacaagttccttgaccacaatgccatttgggaaatatgttgatatagcaaagtctgaattataaataccttataggcgtttatataaataccttccatctataagatgttatatggttttgcatggtgatgaggaagttgtggggaagatatgtcaccgatactgtgggcagagaaacactacctgtcattttctctgggggggggggggagatcaccgagacgacgtgatagcaaaggaacacaataaagaggagaagccgggatgtgatagtgtgtctgattatatctgcaaaggaaactgtgaaataaattaacaccaagtacccatgagatgcggatggtagctccacagccagcagttgctgtgcatcaggggaggtttctgttcagtagtaagagaactaaagtgcaggtaggctgtgaatctggtggtgataactaatggccacgccacttaagactcggattagatctctaacagggggaaaaataagaataataaaagactctaaaggacagaagaatgcaatagggtttgtattttcactcagaaaatataaaccccaaatgggatcaaaggggcccaagaaatgaaaaatgacaattcctctgtcgaccctgatcttatctcaagccacactatcacatgataatgctctggggtttaggggagggcagaactgttctttgggtgccaaggaagcagaagaacattatgacccactcggccgagagaaacacactctaatttcaaaaagttattgagatttaatctctaagaactgcaaaaatagctcaggcaacaaccaaaagggtggctctcaacacctatatgagtctttgtgggtagggaagtatattggaaaggcaagatttcagtacttccaggaagatgtcatgctgaggtcctcccaatccagacttcagcttcctaacacaaacacgctgattttatctaccgattattcctccttgatttagcattgaaacaccttaattgcgttcctttgctatcacgtctcggtgatcttccctaccccacccccagaaaaaatgacaggtagtgtttctctgcccacagcatcagtgacatatcttccccacaacttcctcatcaccatgtaaaacaatataacatcttatagatggaaggtatttataattcagactttgccatatcaacattaaaagcaatggtgtctgtctaaaaaattgctttacatcctccccatgatctgagtaagacacttggatcaagaggatcaagggtcggaggacctcacttgagcacatagtcgctcccaccagctacatgggaatttggccaggaagatcataaacattgggaaatggtggcatttgtctgccacatgccctggcaatacagagttaccattggagttcccagaaggggtggaaaaatagaaaaagtgggtgggtgggggttctaaagggatcctgagctctcaagatttaagctgtgagttgactctacgtagacagagggataagccagtagtctaggcaactagctacagctggagcaaacccttccttaggagaaaagtggatgaataaaaatcaatgaggaataacaggtagataaaatcagcatgtttgcattaggaagctgaagtctggattggaaggacctcagcaggacatcatcctggaagtagtgaaatctcgcctttccaatatacgtctctacccacaaagactcaggcaaccgaatgacaaacaaggaagggaagacagcagcatctttagatcaaccacagaattcaaacaccacatgactgtcagcagaaagaatcagagagctgtgttccattcacaagaagcagagatcagttctagaatgatctaagagttgtccagtggcctaaagaaccagctattcagccacaattacattcttcacgacaatataaggaagcatgaagaaacatacgctcaatgaaccataaagacatattcttgacagtttccatgtcactcccaaagtgtctgctgaatttctactattcttggctatggtgtgctgtatgaccagagttcaaggaccactcgtttctataaaaactcatgaaagctaccctgcattgggtttctctgggcttttgcaggctttcagaggagacttaccaattctgacttgaggcttgggtacagccagccaagacagcttgccagagctggcgatacttgaaaactgaactgtgaaatcagcgtcagctaaagtctccctgatagagttagatggtaagtattttggtgttcaggaaccaaattttgttggaactactccactttgctgtgacccccaaatgtagccagggacagtaggtgaatgaatgagggtagctgcattgaagtggaagttcacccatgaaagaaggtgaagggccagattggacctttgggcctgggttactgataggtaagttttaattaccttgaagaagctagggaaagaataagtcacagggaaatatcacatcaatgtatacatcagaagaactgttttggaagaaacctagaaaaaaatgtctgtaaaactctaactacagaagcccattgagaccaaactgtgaaggagtctcaatgccacattgataagtgaaagctagagatcttcctaacgtgacaagttactggttgtcaggaaagtcatcaaaagattttttttaatagctgggcctggtgactcagacctataatcccagtacccttgaggccaacacaggggggttgctaagagtacaagaccaatctgaactacatagtgagttttagaaaccaagagaacaacacaaatgttcatcatcttctccttctttaaaatgagatgtcaacaattatgcgtttgtactttaaaataataagactggggtatgggtatttagtttagggataaactatttgcccagcataagttaggtcctgggttcaatttcaaatatggccaaataatacattaataaatattgtactatactatgctatctaatacagttgtggtctgggatgaggaagaccagcaggagggaaatactggtagatcaagcaagaaagactgagccttgaggttgttagctctcattgccccctaacaatggtgacagcttatgaaatatggcccaaaggccaaatcagctattgctagaatatatgagagagcaagacagtatgtatatttacagtttcaaaatgtgtgcagataatctactcaactaatagtcctatctttatgtcaggtctactcaaagggaacagtgtaaggcacaggtaaaggtgtagcaatattatctctaccaagaacttcaacgaggggcagagagagccagagcaaaccagaggatggtggtggcatgaagcctctataccaactgttatcacaattgcacagaggcaaagaaacatcttgaaaatgaactcacagaaatctgaaaacaaagatctgccctgccctgtctgtccctctctagtctcctctctgatcttccattcagcttccaaaagcatattgaatttactgactctccagacccatcttagaggtggaaaagccacagagacagggctctagtgtgaccagaaaggaggagacccagagtcacattttactgaacatttaagtacctaaagatcctctgccagtatcccggtggcatggcttgccagggcacttatcagacacataccttccagtatagaaaaaggcttttggcctagagatatgtgcctttgttttgcacccctcaaacttccacagattatgttctagaatgaacactgggaggaaacaaaatatggcacagctagcatggctgtgaaggacacttgctggcagccattcattatgtaaaggctgggcactggttgtgtggtatgatgattgataaccctcaagtccccgggctttagataagcccatgatggaggcatacttctctgttcagccttcctcaaagggtggggcttcagaatgagcccatcacaaagtgcagtcctccgggcattctcaatcttggcacctggccataggccaaggacccaacttcagagcaacaaccaagcaggtactcaatactttcagtactcaaataatttcattctttttccctcaacaggttcgttcattagaacgttggtaggcagacttcggcattatggaaagatttatgccagtaagaattgaaattttaaaaaaatccaaaagcttcagtgagaaaaaatagagaatgggagtttcaggatttcaagggatgttagagatcatatcttctgattcttttattttatacaaatatgaccaagatttcagggtattcaagatggaaagcaacgtcctagggagacagcttttgtaagcttatttctgttgagactattattccttgatctggaaattaagtgaattgattctattttaattttatagcctgtcatgctaagcttttcaactctcagctcccatccatgggctgtctctgctataattgattggtcctttcatgaggctagctggacaagactccatcatgtgaaaaagaaatgcattagctatagtcaaagtgcctacttatcattattcccatccataccatgaaggatggtgttctttcgatctaagcatctactcactcactatgtgatttcagtcaagttcatcttttcatgtgttaatgaatgatgataataacaataatagatcataatactcaacatgtgcaaggtagtcatgtaacagagagagagagacagagagacagagagagacagagagagacagagagagtgtgtgtgtgtgtgcatgtgtgtgcatgctctgcacctatgactttccttgcagccccagagataagtcctattattaacttcatcatacagatggggaaagtcgttccggaaattatttagagacccagggcagaaatagatgatgtctattctgaaactgcccagatgaaatatcattgtcttgagaagtatcatgtttcataccctcatacaacactgttcttactgcagcaatcagcatctgctaagttgatacttgatgaccatattaaaacaggatcacaatgggacttacttcaaagtcccccaccacacaaaacagcactccacagattgtacccttcacgtatcttcccctgctctaaggttcctcggatttccaatttcaattgtcagtgagaagttctcactgaatagtaaagagccccaagaattcccaccttgactgtaattggaagatacagaagatgtctgcctgtgtgatgctaaccacattacaattcctttgcccttgcatatattctagaatacttcatagatgcatttccacctcctgttttttcatggcaggtcactcactctacctccttttgaagtaatgcctgctcatggtgctggcttggaagcgttcacgctggaggtattatctcacttctgagtgtagcatgtcccttgcttgtcttgagtagagtgaagtcaaataacagctctcacagagagtaggtgtaagcatctggcctgtgaagtctccagagagggaataaaagtatgatctaagtgctgatggtagattagatctgcctacctcccctgaagtcttgaagagtcccaaatgtttgttcccttggccaggtagggacatctgtctgaagatagtgacaccttcccaaagtgagcctctgtttatatgctgaccctttctgctttattttgtccaccctgactcctacgaaaaacattcggatccactgaaattaataaaactaaatggagcatcacaagtccctggtcttctagaatgtgtgctctataaatggtaggatcctcacctctcttgactttaagaaaaaaaaaaaagtaactggatctttgcctacccatttgttgttgttgttgttgtttatccctatgcgtcatttctagatcttctatcccaggacttaacctccacaaagaatgctgactgtacacataagttgatgactttcaagttacgcctaaattagttccttattccatttcccctcttaagttccttgggcattctagctcttacctgtgcacagacatgctctatggtaagctgctcagagacctttaggggaactccattaatctgcggtgagcctgtttctgcatgccatctaccccttcaatggtggagaatcccttcatctatttatattttactcatgaaatttttactgaactggaatccttcaggccattttctacacgtgttcctgccagtacaagatgccaagtcggtgacaccagactgctacacttctgaccatgtacggacggaaggcagcccctaagtccattcttgatcgaataagatccaacaggttccagcccagaaagctaatgttaggccatgtaaagaacactgctcccaaaggatggttcatgtgcctctgtctataaatgctccagtcactatctatatttctggcacagctctggcccctctgtcatcatccacacagctggtatagttctagttctgaagcaggaattttcttacttcatttaaaagtcatgagaggtgaccaatcctgagatggatgggccttaagagttcacttttagtttgtatagtatttccactgtagccgaggggatgattggcactcacattctgtttaaaggggctaggacaggttcttcctagctaactagaagatgccaagagaatttgtttgtaccttgtactgttgtccttggatgtgagagaaatgtacctaccaatgatgatcaaatgaaatggtcaaaaggaagggaggaaggaagggagggagggagggagagagggtgggagggagggagggagggagggagggagggagggagggagggagaagtgtgtgcatggggggaggccaactttggtttagcccagcccttctaagctgatcataagaaacctgcttcctcacaagactctgcatacatgtagaaatctaccttcaaaacaggcactatctagacacacaaagaggtttctccagtccccagtgttttgaaaatggctgccttcattctgtctgtctttgcagactttgtttagaggagaagcagaactcttgtagcaaatggaggatcacctggcttagcctactggttaaagggaaaaccctagagagtggaagctagcagacagctagatggtcaagtgcactcagctacattctacttccggaagttggcatccttagcacgtacagcctaccataatggggaaatccaaggcacagagcttttctatgctgttttagtgaacctttagggttgacggtgcacataaatgtcacaggtatagatgtggacaatgaatacagagggaggaaaggggtttatgcagaaagaagcaaaatggaaaagaaaactgtgccacaatccttagaaatgctacatgattctctctctctctctctctctctctctctctctctctctctctctctctctgtgtgtgtgtgtgtgtgtgtgtgtgtgtgtgtgtgtgtgtgtgtgtacctcacaggaaatgtgtttcatgtttcccctggagtagggtaagcagttgaaaactgcagtgggttttagtgagcaggcagtgaattacttattatttccccccctctgtagattctgtagatggaaggagacattgtctccctgagagagatgggagggggaaagcatccctgccatactaagagatgttcaaaaataatttccatgatctggaactgaagctaccacacactgttgaagccaggacccttaggggctggtcatgtgtcccagttggtggcctcatttgtccaatgctctgcctaagccaatactatcacaacagcccttgagctgaccacctctgtcaccttcaacacgctcaaggtttattcaattgggaaaaatggtgtatggagaaagaaatactgggtaagaaaaggaaatagatggagcacagccaggtaggtctccaattcttgccaaactatgtaaatgcccctcccctaaagaaaactccaaaaatctcaagtaggaattccaccagcgagcggtcgccatctgggttccgggactccgcgggacctaggaaattagtctgaacaggttagagggtgcaccagagaaccggacagcttctgggacgggcggaagcacagagccgctgaggcagcagcctgggcgggcagcagacaaccggccaccatccggaccagaggacaggtgtccgcctggcttgggaggcggcctcagcctcagcagcagcagtcgccatcttggttccgggactcagcagaacttaggaaattagtctgaacaggttagagggtgcgccagagaacctgacagcttctgggacgggcagaagcacagagccgctgaggcagcagcctgggcgggccgcagacaaccggccaccatccggaccagaggacaggtgtccgcctggcttgggaggcgacctcagcctcagcagcagcggtcgccatctgggttccgggactccgcgggacctaggaaattagtctgaacaggttagagggtgcaccagagaaccggacagcttctggaacgggcggaagcacagagccgctgaggcagcagccggggcgggccgcagataaccggccaccatccggaccagaggacaggtgtccgcctggcttgggaggcgacctcagcctcagcagcagcggtcgccatcttggttccgggactcagcagaatctaggaaattagtctgaacaggttagagggtgtgccagagaaccggacagcttctggaacgggcagaagcacagagccgctgaggcagcagcctgggcgggccgcagataaccggccaccatccggaccagaggacaggtgtccgcctggctcgggagacggcctcggcctcaggagcagcggtcaccatcttggttccaggactccctggaacttaggattttagtctgcacaggtgagagtctgcaccacagaagctgacagcttctgggaactgccaaagcaacacagcttctgagagaggccctgttttgggccttcttcttcgaccaggaggaggtccaaaaacaagatatctgcacaccttccctgtaagagagcttgccagcagagagtgctctgagcactgaaactcagaggagagaatctgtctcccaggtctgctgagagacggtaacagaatcaccagaagaacaatctctaaacagagtcaactataactactaactccagagattaccagatggcgaaaggtaaacggaggaatcctactaacaggaaccaagaccactcaccatcatcagaacccagtactcccacttcgcccagtccagggcaccccaacacacccgaaaacctagacctagatttaaaagcatatctcatgatgatggtagaggacatcaagaaggactttaataaatcacttaaagaaatacaggagaacactgctaaagagttacaagtccttaaagaaaaacaggaaaacacaatcaaacaggtagaagtccttacagaaaaagaggaaaaaacatacaaacaggtgatggaaatgaacaaaaccatactagacctaaaaagggaagtagaaacaataaagaaaactcaaagtgaggcaacactggagatagaaaccctaggaaagaaatctggaaccatagatttgagcatcagcaacagaatacaagagatggaagagagaatctcaggtgcagaagattccatagagaacatcggcacaacaatcaaagaaaatggaaaatgcaaaaagatcctaactcaaaatatccaggaaatccaggacacaatgagaagaccaaacctacggataataggagtggatgagaatgaagattttcaacttaaagggccagcaaacatcttcaacaaaattattgaagaaaacttcccaaatataaagaaagagatacctatgaacatacaagaagcctacagaactccaaatagactggaccagaaaagaaattcctcccgacacataataatcagaacaacaaatgcactaaataaagatagaatactaaaagcggtaagggaaaaaggtcaagtaacatacaaaggcaagcctatcagaattacaccagatttttcaccagagactatgaaagccagaagagcctggacagatgttatacagacactaaaagaacacaaattccagcccaggctactataccctgccaaactctcaattaccatagatggagaaaccaaagtattccacgacaaaaccaaattctcacattatctctccacgaatccagcccttcaaagggtaataacagaaaaaaaccaatacaagaacgggaacaatgccctagaaaaaacaagaaggtaatccctcaacaaacctaaaagaagacagccacaagaacagaatgccaactttaacaacaaaaataacaggaagcaacaattacttttccttaatatctcttaacatcaatggtctcaactccccaataaaaagacatagactaacaaactggctacacaaacaagacccaacattttgctgtttacaggagacacatctcagagaaaaagatagacactacctcagaataaaaggctggaaaacaattttccaagcaaatggtatgaagaaacaagctggagtagccatcctaatatctgataagattgacttccaacccaaagtcatcaaaaaagacaaggaggggcactttgttctcatcaaaggtaaaatcctccaagaggaactctcaattctgaatatctatgcgccaaatacaagggcagccacattcattaaagaaactttagtaaagctcaaagcacacattgcacctcacacaataatagtgggagacttcaacacaccactttcaccaatggacagatcatggaaacagaaactaaacagggacacactgaaactaacagaagtgatgaaacaaatggatctgacagatatctacagaacattttatcctaaaacaaaaggatataccttcttctcagcacctcatggtaccttctccaaaattgaccacataataggccacaaaacaggcctcaacagattcaaaaatattgaaattgtcccatgtatcctatcagatcaccatgcactaaggctgatcttcaataacaaaaaaaataacagaaagccaacagtcacgtggaaactgaacaacactcttctcaatgataccttggtcaaggaaggaataaagaaagaaattaaagactttttagagtttaatgaaaatgaagccacaacgtacccaaacctttgggacacaatgaaagcatttctaagagggaaactcatagctctgagtgcctccatgaagaaacgggagagagcacatactagcagcttgacaacacatctaaaagctctagaaaaacaggaagcaaattcacccaagaggagtagacggcaggaaataatcaaactcaggggtgaaatcaaccaagtggaaacaagaagaactattcaaagaattaaccaaacgaggagttggttctttgagaaaatcaacaagatagataaacccttagctagactcactagagggcacagagacaaaatcctaattaacaaaatcagaactgaaaagggagacataacaacagatcctgaagaaatccaaaacaccatcagatccttctacaaaaggctatactcaacaaaactggaaaacctggacgaaatggacaaatttctggacagataccaggtaccaaagttgaatcaggatcaagttgaccttctaaacagtcccatatcccctaaagaaatagaagcagttataaatagtctcccagccaaaaaaagcccaggaccagacgggtttagtgcagagttctatcagaccttcaaagaagatctaattccagttctgcacaaactttttcacaagatagaagtagaaagtactctacccaactcattttatgaagccactattactctgatacctaaaccacagaaagatccaacaaagatagagaacttcagaccaatttctcttatgaatatcgatgcaaaaatcctcaataaaattctcgctaaccgaatccaagatcacattaaagcaatcatccatcctgaccaagtaggttttattccaggaatgcagggatggtttaatatacgaaaatccatcaatgtaatccactatataaacaaactcaaagacaaaaaccacatgatcatctcgttggatgcagaaaaagcatttgacaagatccaacacccattcatgataaaagttctggaaagatcaggaattcaaggcccatacctaaacatgataaaagcaatctacagcaaaccagtagccaacatcaaagtaaatggagagaagctggaagcaatcccactaaaatcagggactagacaaggctgcccactttctccctaccttttcaacatagtacttgaagtattagccagagcaattcgacaacaaaaggagatcaaggggatacaaattggaaaagaggaagtcaaaatatcactttttgcagatgatatgatagtatatataagtgaccctaaaaattccaccagagaactcctaaacctgataaacagcttcggtgaagtagctggatataaaattaactcaaacaagtcaatggcctttctctacacaaagaataaacaggctgagaaagaaattagggaaacaacacccttctcaatagtcacaaataatataaaatatctcggcgtgactctaactaaggaagtgaaagatctgtatgataaaaacttcaagtctctgaagaaagaaattaaagaagatctcagaagatggaaagatctcccatgctcatggattggcaggatcaatattgtaaaaatggctatcttgccaaaagcaatctacagattcaatgcaatccccatcaaaattccaactcaattcttcaatgaattagaaggagcaatttgcaaattcatctggaataacaaaaaacctaggatagcaaaaactcttctcaaggataaaagaacctctggtggaatcaccatgccggacctaaagctttactacagagcaattgtggtaaaaactgcatggtactggtatagagacagacaagtagaccaatggaatagaattgaagacccagaaatgaacccacacacctatggtcacttgatcttcgacaagggagctaaaaccatccagtggaagaaagacagcattttcaacaaatggtgctggcacaactggttgttatcatgtagaagaatgcgaatcgatccatacttatctccttgtactaaggtcaaatctaaatggatcaaagaacttcacataaaaccagagacactgaaacttatagaggagaaagtggggaaaagccttgaagatatgggcacaggggaaaaattcctgaacagaacagcaatggcttgtgctgtaagatcgagaattgacaaatgggacctaatgaaactccaaagtttctgcaaggcaaaagacaccgtcaataagacaaagagaccaccaacagattgggaaaggatctttacctatcctaaatcagataggggactaatatccaacatatataaagaactcaagaaggtggacttcagaaaatcaaacaaccccattaaaaaatggggctcagaactgaacaaagaattctcacctgaggaatacagaatggcagagaagcacctgaaaaaatgttcaacatccttaatcatcagggaaatgcaaatcaaaacaaccctaagattccacctcacaccagtcagaatgtctaagatcaaaaattcaggtgacagcagatgctggcgtggatgtggagaaagaggaacactcctccattgttggtgggattgcaggcttgtacaaccactctggaaatccgtctggcggttcctcagaaaattggacatagtactaccggaggatccagcaatacctctcttgggcatatatccagaagatgccccaactggtaagaaggacacatgctccactatgttcatagcagcattatttataatagccagaagctggaaagaacccagatgcccctcaacagaggaatggatacagaaaatgtggtacatctacacaatggagtactactcagctattaaaaagaatgaatttatgaaattcctagccaaatggatggacctggagggcatcatcctgagtgaggtaacacattcacaaaggaactcacacaatatgtactcactgataagtggatattagcccaaaacctaggatacccaagatataagatacaatttcctaaacacatgaaactcaagaaaaatgaagactgaagtgtagacactatgcccctccttagaagtgggaacaaaacacccttggaaggagttacagagacaaagtttggagctgagattaaagggtggaccatgtagagactgccttatccagggatccaccccataatcagcatccaaacgctgacaccattgcatacactagcaagattttatcgaaaggacccagatgtagctgtctcttgtgagactatgccggggcctagcaaacacagaagtggatgcccacagtcagctaatggacggatcacagggctcccaatggaggagctagagaaagtacccaaggagctaaagggatctgcaaccctataggtggatcaacattatgaactaaccagtaccccggagctcttgactctagctgcatatgtatcaaaagatgacctagtcggccatcactggaaagagaggcccattggacacacaaactttatatgccccagaacaggggaacgccagggccaaaaagggggagtgggcgggtaggggagtgggggtgggtgggtatgggggggacttttggtatagcattggaaatgtaaatgagctaaatacctaataaaaaatggaaagaaaaaaaaaaaaaaaaaaaaaaaaaaaaaaaaaaaaaaaaaaaaaaaaggaattccaccagctgctagtcagcctgggagaacttggcttaggaaatttcactaaaaaatggaatccaacttctcgatctgttaattgtttttaaggaaaccacaatttcttggactagtatttggtaatggccttcatctgagaggaccctgctggctttcttcaaaacctccttagagctcctctactctcttcccatcacagcctctggccttttcctttttgtgggggtgtagaagggtttctcagatatctcaccatgattgggatctttatggaacccactacagtggacctgttgattcgtttccccagtctgacatcttaggtgcttcctattgcactgaatattaagagcagcacccttgcctggcctctaccaaggcctatttcatcttctcttcttctttccccacattctacagaatgaatcccaagccttgcccatggctgcttttttttttcttaatagttttcttttttaattagatattttctttatttacatttcaaatgctatcccaaaaattccttatacccttccccccaccccagccttgctcccctacctacccactcccacttcttggccctggcattcccctgtactagggcatataaagtttgcaaaaccaaggggcctctcttcccaatgatggccgactaggccatcttctgctgcatatgcagcttgagacacgcgctctgggggtactggttagttcatattgttgttccacctatagggttgcagagcccttcagctccttgggttctttctctagctcctccactgcaggcccggtgttccatcctatagatcactgtgagcatccacttctgtatttgccaggcactggcatagcctcactagagacagctatatcagggtcctttcaacaaaatcttgccagcatatgcactagtgtctgggtttggtggctgattatgggatggatccccaggctgcttgcttttcaaggactctgacattgtgcatatctagctccaacactgccatgagcttctctttttcttcccacagagatgaactgggttatgaaccttattcattaatgcaaagatctaagtgccccaacttacccagggaaaatggagccataccaacctgtattcaaatcccagctttaccactgctttctcatcaaatgactgaaactacacagatgaggtgtactacagctgcctcagtttacagctacattggcccgcagccagtgctaactacctatagcaggggtgaattagaatctgccgacagcagtagcacctgcaaggcaggaagcaaagaccacatacatttcaaattaaacaacacagctgcccattcttgctgctttggcagagtaccttagacttagtgtagtgacatcaccatctagtcggaacattatccaaattaaccaagtagcaaacctagcccccacgctatgtatagaagtaaagacatgcaggattgctgttctgtgctcacataagctaagggtaccactgccggttcaaatccggaaagctagttttcatcaaatctcactgtgccttttcttaccaaagggttatagtgacctgtacttctgggctcaagtggaaatcaaagacgaatatcttttctgtgcatgccacagaaaatgtcctaatgtgactgagccaggcaacaactgtctatctcagatgaagatctaaacagcttaaatgatgggcaaatcccaatgtgcaatggagatcggaggtgccacacatgaactgtgccacccatgtaggtagtgtctaaaggaaggatgcctagaagccagtgcgacagcccacagtctctctcgactggctttgcccactgttagtctgatgtcagattgagacaatgcccaatcatatcataacaaattagctgcagacacaccatagcaatcagctcaaggaacttctcctgaatgtaggctgggggcttcccggctccatagctgcctgctcccacagatgtttctaaaagcctcttcccagaggcccatttagagagaaattaaatgcaactttgacttaattaacgttttaaatgataatgaatacaatgtagattcataggaggcatttacattgtgttgtaaaattgataaaaatttaataactctttgttaataagttatatctccccagacccataaagcctaaggcattggaaactccagacttggtctaatccatgctcctggtggaggtaggaggagggagacgggcttgacatttgctccaagcctgctctaattcaaacctctgcttgttcatcagtaatttatttcatcaagtaaaggtcagaatttgggctcaaggcagagccttgacaagaaggcttaagtgaagagcaggctggctctggcatctgtcgcccatgatagtggaggaggaggagaaatggtgtgctagctggctccatctgtcctccaccatggaggtaagaagaacccactgccttgtggttacagctgtcaagaccagtatcctgatagccggccactgtcctaaaataaagatgcaagcataatttccatgtcaccttgaataaggacctctgtctagtgtacctatgccaacgtatttcttcatttgctgttaaagagccagagttattttttatagcacggaactcctggaaagggaaatgtctaagtgacagtgtacatagaatgggtcctttcttcttccctcattctggcctttttacttcccatttctcaatcccatgtcagagaatgtcctttgaaactgactcttcagtctactgtaacgttctcttccatttgaacccagtagactgtcacaggttatttgctttaagggattcaacagaaccttgtctggggggcaagggaaaggtgcaggacctcttactgtaaaccaattacttcctttgacgtggcacttgtaaacaccagcatcacatactggatgagaatgggctttgtttggggttcttctttgaagatcattaatttcaggagttattttcccaggaggttattgacaaaggttgatttctgccttagacattactcactctagcagctcaccactgtgtgtgaggtgactctttacttgaagagaaaaactttccagtcaactctctgcccaatgtgcctactggaaattaagcaagagatgttggcttcagtgaccttgcttggggcaatgactatatttgaagagtctcttcatgagaacattgttaatcttggtctcttatgatgggtaaaatggtagccaggtcccacttctcttccttatcctattgtcacttcccacaacgcaatgcaaataaataaatcaggatgtagggccaaggttggctgaagagcctgagaattaaaagggtctgttagtgtttgctaccaatgtgtgtgacagggttgagggaagtagagagagagagaatgaaaatggatatgaaaacattggcacagttgcatgaaaacagagggagacattagagacacagattcatgaacttaaagagaatgcatgagaggttcggggaggaggcagtcattgagcaaaagttgtaatgaaatggaaagaaggaactcttgagcccagtgggctagcaggctctctccaggtgatgatactcagaatgtgtcattcaaaacagctagagagaagattgtggaggtttcatcacgagaaatgatgtttgaggtgacgcacatgctaattaggctgataagatcttgacactatgtctgcacacatggaaaactcacattgtatcctatgcatttccgtcaatatatatcaattaaaaaaaaacccatgaaattctaaaattaacttgtatgccaagtaccctctggatttctttttccctgtttcttcactgatgacaggatgaggagtcattgggtcccagaagtaaatgtgtaacattgaagactcaggaggtggggacttggggagtccctccaaactgtctatcaaggtgatgctatgattacagactggtggtgtttaaatgcagcttgctaaacctcatgtctcttccagggctttgaagactgttggcataggtgtgacctggggaagactttaaagctgtttctagtatcttgccctagtatctatctgcctttatggtcttcaaaatgccattagtttgatggaaagccttcagctcagttggcaatgttaattctctccctgaacaaaccaaagaccactgaggataagcagggtttagtttagtatctggcaagactcgcgattactctaaactgactttagtgtgtctcctttccagctaatctgattgggtcgctcctcgcagcctaaccatccgagctgaatgactgtgatctctgtgtacaagaaggaaaagtcatgcacagtttaaaattagcttcagtaattttctgaatcctctgtgcaattgttcaggtaaactcccagtgagtgagagaaagatggtctgaagaatcacaggtatgcttgagctaacaccagttcccagtgcaaacccaaaggcctgcttttctccccccccctcccaacttgattaatttgcttacaccagcgttactgacgaactgtcaccagaatcacatcaggcaggtctaggcaggtccaaatcaatagggcctttcattgtcactacatcataattttaattgtccctttctattacacttggcaaccagaccaccaggcaaaactggaatcaaggataaacttccaaagagagagaatgtccatttcacaaagttatattgggcagagcggagctgattaaaatctatatctatattggcgcaaatgagattttacgttgggaggtttgctctttttttttttttttttcctgtactagaacagagacttgtgaagaagtcaaatgcatagtatcctggtgtttttgaagggagctgacacagtgcccaaactgtctgaagtataaataaaacctacataatcagaaaatgatgctgtaattctagactgagcacttcatctagatttagtgtgcaaccttattctagtcttgagaaatgaatacccagtctagacttaaatattgaacaattcagcttatgcatcctctatggtcactatccaccctagttttgtgtgggtgtatgtgtgtgtggggtgtggatgaatggttagtgtgtgtgtgtgtgtgtgtgtgtgtgtgtgtgtgtgtgcatgtgtgagacagggtctctcattaaatctgaagagaatcaatctggctaggttaaatgacaaatgagattcaggaatctgcctgttttcattcttcacccgcccagcaagtgctggaattagaggtatgaaccatcatgcctggctttttatgtgggttctgggatccaaactcaagattcttgtgcttgcatatcaagtccaaccaagctatctccccaggctcatgatacttataaacaaaaatatctgtaaaaattagtccttcccctctgaaggccttattaatggcttggcttcccattgccttgtgagtacaatattagacaaatggcctcctaacaccagccttaacaaggactgttcctaggtcatgggccacgcctccaaggagaggtgtgtcaaacagcacttagaagacgggtcttcaaatccctgtaaacactgttaatatatgaccacctctgggaaccagctacttcccttaccacttcagaaaacatgtaatggggctttgtgtttcaatttaaagtcccttaaaaacggaaatcctttcctttataagttgaaaaaaaaaattgcagagggaaagtctaggcaagaggggaacgaattaggcagtctccaaagcgcaactggctcaactggaaaccctgcgaccaaagcaagccccgtaatagtgtaatgacctttaatgagtgtcttgggaaacaatacaggcacggcgtaaaagacaaagggcaaaacccatcatggttccactgacactaattcaaaatgatcttcagaacaactaaagaatgtaagagaagtaatctgatctgcccatgtgagctcactttgattccagggcccttctcctgccatctctaattgtcaaaccctctccatttcacgtctgctcatatttaatgaaaagcccactctcaccactgctctgagtctattcactctgtcaaatggacaccacccaaccgactacccacccgaatggggtgcccggacattgccgtggcacactgccagtggaattcagcagagactgaagttctttgttttttgtttgtttgtttgtttgtttttaattgaacaagaagggctgacatagccttataaaggggttcaacttggagtggatttttctaacttattacttgtggtcaaaggtgagtggtctcacacagggctggatgaaatctgcctttgtgtggcgaagtgaagatgatgagacagagaaggcaagccaccactagagctgtcaatactgcttagggcttgaatcctgctgtctcccacagtgagattagtgatggaggagccagaaggatgaaaatattgtgaacagaatatatctgagaggatgggacattcttaccccaagattttcttctcctggcctccaccagtatttggattaaattacagagctgagaaacccctctaactatggtttttttttcttgagtaaaatgcaaagtgcacacactggacaccatgagcctcaaatagggacatagattttactatgattagagcagaaggccagtgggccaagacatgaccacagctcatgacaggatcctagctcagagccagactggcttctttttttttttttttctaacaaatctgtggccaagcagttattttagaaaagaagttgggctgtaggctgaagagtgctggcattcacagacactattaccaatcaaagagatgtgacccaatggtgccaccgtagcttaccccattgtcttcctaaccgactcatttttgaacctgaggtcttggtgtacatcacagacaaatgctttgtatggttgtgacttgggttacccaggctgcatagcacataaatgaggaaaaattcttgcaggagaaaagataaaggggtatggactcgaactgagcatatgtaagaacaaattgaaaccaaaccagaggaaaccaaaagaaaagtcctttctaagctcttgggccaatgtggttggtgcagtccataatatttctcagtacaactctcattaagtaccacttttaagtcagttcagtccctcagcacttttcaaggagcaatgcattgtgaaacagaagggggctcactggtctcagatcaagcctcttcaatatatagcttcaatatatagttttagtctatacctcaacacacaacttacagactataaacacgaactggagctttgaacatcagtacctggcatggcttagcaatctagctagtgaaggcagttatctttcctgccagacagtgacctgtggtctcaagtccattgtgttgaagccatcttcgacacagacaatggtgactcagctacacacacttgccataggaacaaatgctcagaaactaaatgttcctcctctcccttgtggtgggtgtgaaccacagcaaggaagaaaaagcctaactacttttgattattcaggggaagagtggatggacagagtgccaaaacagcaccaagaattgtgctgggttctttcaagagaaatggttaaagcacggagagacagtcatcgtctcccacttcctatactatcaccaatgggagctcacagttatggtcgtagttcaagagcattcaagtccttgtgcagaatttaagatctcctgccagtggacaaggaaagacatctcagcatctcaaaccaaagcattccacaacaacatcatctaccaactgtgccagccaaatggaaatggaagaggaatttggttcatcagactcagcagctgtcaaacacacaactatttcggcatctagtgcagggaagagcctggcggtgacaaaggcctgagccataaagtgaagaaaatcctgcagatttgggatgtcaatcttttgatattcagactcatgactgctgcacaataccttggtaaagtgggactaaattgttgggaaaatataagatgttaatgagtgtcccaggagcctcctttgaacgagccaactttttgaaagaagcactagaaattaccagtctatggaggttggcagatttaaaaataaatattctctttaagaactgaaaataccatctggtactaaggaatgagactctagtaagaaatacataggaataaacacacacacacatatgaatatacacacatgtatatgaacaaacatctgcatctagatgctgttgtattttgaaacgctagcaaaccttttctcctattccttttcttccatctttttactctaccccaattaatggtcacttataaatccaaattcctgcattttcacatatcttctattaaaatagtgcttgctatcctgtcacttggctttccatcttcacctatttaggcaagagagaggaagaccatctgcaggctgtcacatgcctgttttgttcactatcccaagaagcataaaccagggcaaaagggaaagccttttcatcatatacacaggaacacaagcaacatgtcatcacatacaagaccacattagaatggcaacatgagctcggtggacttacaggaccacagggcacaacacaaaacacagggctgattaccacagacaagcacagacatggaactgggtgtgttgaggttaaacttacaggcacggaaactggtggagcaatcattaacagagacagaagaaagcgggaaggttctctcaagggtgtccacgttaccacgcacacggcctgacatgcacgagcagtcacgctcagaacgtccgcaatcaaaacaacatgctcgtctcattctcttgtagatggacatcttggctataaccatgtggttggatgggaggagaggaagagcgcggttaatggcaaggtcacatacagcaaggcagctggaagggcgctggaggattgaacacaggtcttagttcacgttaacagtcttgacccagaaacagaagaaaaaaaatgcagtgattgttggtgacagtttggttgtacatcaaaaataaaaagaagcagtgaaaatataaattgcctttatcattcccaaaggctgttgcatatcatttttgtcccctcgatggagccgtgaccacaggaagaaggcatggctgaacacatcccgtttcttggatgaaaaaaaaaaagcaaattacagacagaaaaaaaagatgtaaccaccattctccccctgacaaaattaatgcaggagggcaaaagagacacacagccaatcagttaaatgaattgctaatttggtacaataaatgttttttgcaggatataaacatatctaatatgtaggttttctcattttcatctatttctgggcattaagcagagcctgcgacaagtttccatcaaattaaatgtgaaacgattacgtgttaatatcagatctgaggatgctttcgctgaacttcccgggagtgagtttacatgatagctacaggaatttaaatttactcttgacagaacaaatatccaaatctgtccatataagaaatgcctctactcagggctaacgctggatacattaaaggaagttcacaaaaaataaaaaaataaaaaaatcacccaaagcaatatgagatgttggtttcctagattgcttttagctactcatgggagtatcaactgggagagctgcctttctctccctgcccaccagagaattagaaggcaattagttggtttaatcatacttttttccttacacagaaaatattagccaagagagattataaacaacaaaacatgaaatacttggcatgtgaaatatcttgctggcattttcaggaaccctcagtggttcttttaagactctggcatagtgtgaaggtttggtactgaccctggagccacctcaaataccgacatgcaaagctcgttaatttaatgcccccattgtttcctgttttactcttgtggtcaatttatatttcagtacaagagaagccactgcacctctttttgatgctacaacaggcaaacatgtttgcttctcacttagcaggaaccagcctgctcctcttacagggtaggagaaaaactcattaatcttccaagtatcacagccaatcactgaacttggaccaaggaggtgttatctccactcccaccccgtcctccacactatccttatttcttttcctttgtagagaatagtcactgtcttagtttaaaatataacttgtggttttactctctttgaatgttacagtcaccaggaaagggtttaaatctctcacatgggtcaagccctgttctaagaccttaatgacttgccatacagtgggcttgtcaagcaaggagaacatcatgactgtgaagagcaggcactggggggagatgaatgagagacctccaacagcatctccattcctgtgaataggctcacattcccagtgacatggtcctttagcatcctaactgttgcactgattaacatgcaaccccagccctgttcaacttaaagtgtgtcattcttttgctcttagcttgttaccaaaaaaaataaaactaagaatctgccatagcatttgagtcagaggaacccccaaggcttgcagccaatgtccaggtcatcttgatcaacagcagtggctgaagtcaagaatgggagaaaagaaaaatcttcaatggaagacatgaaaataaatttagctgaatcgtatccagatctggtatttaacttggaaagccagtcttttgctttttctttcgtaatgctttaactggacctatggacctgttacttacaaaggcgaggagaatggagatgatttttttgttttgtttgtttgttgtttcactgtagataaattattttgaaagttgttttctttttttctgtttttaaatcaaatgctgtagcagaaaatcccatcaaactcagaaatgctatgtttctcattagcaacagtccctggttttcattttcatactgccatttcgggttcatgcatggtaatagaatgtgacacatttatggggaaagaaagttcatgtgtgtgtgtatatatatatatatatatatatatatatatatatatatatacatatggaagggtgatgggaataggtaactttggaatctttttccccccacagaggtcaacttgtcacaatgggcaatggaagcctcccacttccaaaatgttcaggaaggagcaaaacaccaaaccagtggctttcagggactgtttgcaactgtcatggttggctgttccggagaccatgcactgttgtaaaatttcatattgttagcatgcagtaacaggctgcaactggtaactgaggcagcagaaacccatttgctataagaagattaactgttaattataagcagtcacattccagagcagcatatgcataaaacagaaaacatgctcttagtcaacactcctgcccagtcatttcacactcccaccaaatgcagaaaagaaatctcaaaagacaaagagcaacacacacacacacacacacacacacacacacacacacacacacacaccagcaagaatgatcaacatgaggctcagagacaagacaaaaacagttaaaaatgattgagccccacatattgacaaaccttcatgaaccacaaggtctagagtaaagacaaccagttaagtgtgtgccccccttctgcaccaccccagtcacgtgtgtcatcacctatgtgcttctaggtctgtttcctaagccgaggagaagggtgattctgaccttgcatctgatggagcaatccatcagggttgagggatgtatgttcagttaagagattccctctggaccgttattactcatggtgaagattagcaaagaaaagctgaagatttgcctcccttgtagtaggtgttccagaatatgtgggcattttattcttgggttataaaataaagttgtatcagtactacatcacagacttcctctgtcaccttcctcaactctacagcttcctaacccttcactttggttccagtgaattacagatttccagagccttcttagtggctattttttttgtacatccgattttgggtcagaggatttgtttccagtatcagagaggtactttaaacccctaaggttgagtttcacagacctacttgcaatacttcagtatctatttaaaacacgtttctcatgtattcctagtcattaaaaaaaaaaaaaaagaaagtaagaaaatcttctctccactgttgtttgctgagttcctttcttagttagtagccatccaccgctcttcccagtcaccaatgaaaatgttttctgtagtgtgagagcagagcagagtaggtctatgaggacatctagtggactgctgtaggagagcaagcagctccttaacagagcaaaccctgaccttgctgtttcatctctcctaggccttgtctcctctctaagacttgaaatcttgtggtgttatttcagttcagtggcggatgtttaggggtagtgaggacaaatggctgaaaggtcctgggacagcatcctggggcggtcaacagtggcaacttgcaaacacattggtttaagtgtattggtggatggggtccccatgcctcagctctgcagcagcttcctgagagagggactgggccagattattaatggtgtggctacttgtcactctgtcttggggctcttggaactttatgctctataaactgcccccataggccaacttaactctgggaaagaaaaatatataagccacccgagacttccttttctctttggcccacaaaatgttcttgttcttggaccagtaccaatgatgtgaagagatcatgtcagtgccaagagtctgatcctgggtctcaccttcctctaaaaaacagataactttgtttgagcagtttcatcgcttcagaagaaagctttcatgtgcttctcttcaacacaataaaatggatgcccatccaatacttccattatgacttcctagtagtatttatagagacaaaacagaagtacttccctagtggacaccatcaaagctatctgtttactgttgaatgtttacagtggaaggctttctcagagacacacttgcccgacttttcctctgttgtcaaaggtcgtgttgctaagaaatgaaacctgctgcagatggagcatggtcacttttctttccttggggcacactgatgcaatcaggtatcaggcctcaggtcctctgctggttggcccttctgcaccaagtctggaatggaaggaagggttgcagcccatgctgtctgcagtgccatctacctccggcatcagcaaccaaatggccagccaagttgcaattgcagaatcttaatttggggggtggattggaagggagaggaaaagtggccttgccaaagaggccaaagtggaggtttccagatgctagagggaaaataatttggtctccaagggagtatatgtaagaggagactagtgtgaaaggaaaaaaaaatgctgttaaattaaggcacacttcttagaccacagcccactttttaaatcagtctagggaagggaagcattgtttcttaacatgaaaccattcttcaaaggctcaaattataaacaaaatcctctacaaaagaaaaacccttttgtctgaggtatattgttagatgaaacactaggaataagagggtcttttaaatcctataaatgagaaatgatatctcccctgaacccagttcctcctgttaccttttgaagaagaagaaaagtcttatgcatggctttctgtgatcagaaaaaggcaaggacagagcctaaagtcagccacctggagtacacacccagctagttgatctggctcacaacagtcacgctgtggcagaggaaggtgagagagactgcctctggagctgtgtgttgactggctttgtgtggccgtctagttctcaaagagtgctagagtgtgaaagctctcagggtgtagaagtgatgcttccacgtactttccgcagagccaatttgggcagaactgtgtgttgtattgaagaaggttgctattttgttttggcttcacccagaacattatacattttccaaacagtgaaggctaccagaacttgggagtcaacttgcttcttctccttctccttcttctgcaaaggaagatgaaagacctgggtgctgatacatctccatagtccagagccaatgaatcaatgagttgtacattgggtctcctgttttcagagagtcttatgtctgtaagtcaagacccaaagttgatgtctgccagttgtaggttatacatagaaatactgacctttaaaactatatccgattggatgacagggatcttatgtctttagtaagttagagaagtctagaggcttgcttagattcctacatggttcactcatgaaaaaaaaaaaaaaagagtaatctccttgaattaactaacagagttttgttttttgttttttgttttttggttggttggtttgtttgtttgtttgtttgtttttgccctgaaataagcacatggctcctccaggatgcttaactttcccagaggaactgtggaggaatcactgagcgttgacttaaggagaagttttgaaagcaaggaaatgccgtagactgtaggaaataattaccacttgtcttcagaaaggcagatacttacagtcccaaaggagtattcaattaaatctccagcaagcaccttcttgtacagagaggcatctataatgtgatcgttgtatttctctctctatggaatatctctatgattatatataaaaatacacatttttacatataagctaccccaggacatatcatatatatatcacaacttaggaatatatatgtagcctatgtgtttccttcaagagaggaattcaagctctgtagaagggaaaaacaagtgtcgtttatcaaaggcaagcatgactatgacccccaatggacaaagcatctatagctagagttgtaattactctagcctaaccagtgtcccttaaaagtcctgagcaaaggccttcaagagaaacacactgttgtcagggtcttattttctaatggaaaaataagaccgtgtccagagcttgctggaggctgggggatgggtggaagcatagagagtgggctctgggcactctccagttcctggctactctacaaggactgtgtagggcatgagcgagttggggcatgatgtaactgctacatgcaacacgaataccaaaagtaaaatgaaactaaaactgtacagaaaggaaaaaaaaaaagatctcatctagagaaaagaccaggagaactgactctgggctgctcggaacccattttactcacaatagatcactaccagggtgcagttaaaatagagtaggggccgtattccaaggcagcaaagaggaaacaaaataaatcaaagatatgtcaatgattagaaattaaaggaaattctttcacacacatcaatctagacatgacttgtccctcaggagtctctccctggcaacttttcagaggctgggaggagggaaagtataaatcattagaccaggtttgtgacacagaaaagaaaatgaataaatgctagtgcctgagagattgctccttggctagacatctggattggactttcttcctgaacagatggagaactaggaagggatggaaagagatgtgcatgttaaactatactaccagcacgggatctccacaatggaatgtccacacgccatacttcgccgattgaggacatgaaacattgaaggttattgaatgagaaggaatggaacaggtagggagggaatgggaaggagaaactgggtagggacaggaggttgggaaaacatacagggtctggagactgtcagtggttttgctcttgtgcaagctgtattattccatggtgaattgatgcactaagaggtttggataaatagctgggtgagtcaactgtcctttccaatcttaaacacgaagaggtgcctggctggtaccttagcatcctcctatatataatgacaatgataactatttcttgtaaaagtttctttagagccaaacatattttctctgatttcttgagtgcctggccttcatagggaggtttatattcaattattcattttattctaatcctcccaaacatgtctgcatcctgccctccaggctatggccttctaattgggaataacaacatttggacaattctgattagtatcaaatattaaccacacagcctatggccttgccacacttaagagtagcttggcggagacaatccttttgcagcaattgtgtctcatgcatgatggcagatcaaacatttcactagcttaacctactacaagggaaattaagggaataaaggtactgtacattatagtgtgattttcacaacaagaaaggtaaaagtttactgctgtctacttgcctgaaaaggaaaaaaataccctggaagtcaaattttttataaggattttaaatgggatgtgccacaatgtcctataaaggacattataatttcagagagagtgagagttctctcttcaactttcctcttccattctgtcttcctgagtgaactctccatccagatgcaaaggggatcctttcaactgagacctggtgaggccacctcctttcccaaaattacctggcagttttcaggcagaggactgaaattcagcttgtcggcttcttctctgccttcctatgtgatcccactttgtacatcactctccagtgtcatagaccccagcagccttctatccatcctcaaaacactgcaaatggcttcctaattttcagtcaattcccttgctcttcctcccacccatatctcatctccactaccacctcccaaaggacctgccaaagtatgaagcagtaagagccctcatatcctcagacatcccttgtcctcttcttagcaagtggacctctatgggtttatacatttggtaagatgatatgggtttatctgtatttgctagatatctttgcttggaaagaatctcattcggcattccatcattggcaccaagaagagaacctcatgaagaggctactcataagcacattgaatggctgctcaagtagtagcccatagtctcaccacttcactaaggctcccaaaggatgaaagcttatagaaactccctcgcatggattattgacctcagcattcctccagccattttacccccatcaccactgtgcgagtttccttatggagctcaccatcttgctctggtgttcccccttgtttaaatctactctcaggatgccctgttccttctgaagaaaatgactctgaggatgcctgctgggcttctacgttctcagacacatggtaagaaggctgagtgatgcctagggtctgacagttgagctcatgttgtcctttcttcatattcacgtgctgttccttgtggtttgagcgaatcaggaaattgttctagggctgctgacagagtttgggggaagcagaatatacatgttaagaagttggccgtgccgggtgtggtggcgcatgcctttaatcccagcacttgggaggcagaggcaggtggatttctgagttggagggcagccgggtctacaaagtgagttccagaacagccagggctacacagagaaactctgtctcgaaaaaccaaaaaaaaaaaaaaaaaaaaaaaaaaaaaagaagttggcctcagctggtgtgtgaaagggtatctgagaggatttctacaggaacttcgctagaccaagtacttcccatcggtatttcccaagaaaccaacttattaatgtttaggtggtaccatctttctatcttactgttttaacacgttcccctcaggcagctcagtgacaagacccttgggtggcatatcctagaagaaatggtggccttttgactaatttctgcttgtaaaaatgtattttatgggggtgatcttccataactctcttcccacccatttaactcaaggttatcattgctcttatcagaaaggtcagggccctcagaacacagcaccaagataggcctcggagacttgaatctatgatggctggctgcatggctatcagcaatttcaacctctcactaaacatgtaagggtccttgtttctctaagttgattaaatatgtccctggtaattatgtagggttatggtgaggaccaaagcaaccatcaggaggagcttttagaacctcaagtcatcatggaaggagaggtatcacttcattcatctttctctaatgtttagaacaatctcttccagggtgtgtgttctaattgctgcaaaaggttggccctccccaaagcaaagaccagctttacagcgtgttgtctgtggaagtcataagccagtgttcctcagtcactgagggtccctaggaaagctttggtagaagacaactgagacagactatgcagaagcttctgagaccagagcagtttgccccataaagcaatgtgccttatgtaggggcacgttgaggttactgacgtaaaggatggccttttgaacattggtggctgattgctttactgggagtactagttttgtgtttgggggtgatctaaatctgaacctacaagaattctaaccgaaaggcggtccggtgctttgatttcaagattagactaggttctgagactcattttcctactaggattatgtatagtctatacttagggaccacctagctactagaaatcctggtattaaaaaacattccctcttccatagctgtaggtatcctccattttatccatgatgcttaactgtgtgggccagagatgtctacttctagagaggtgggcaataggtactaggttctcacccaggcactgactgtgatggtttttcttttttcatcttctgcttgaagcgaggacaggtatttatgtttctttaaactgctgggtacaatacataaacacattcaagagagcacttggtgtttaatgtccttctaataggaaaaggagaaggaaaaaggaattgaggggtggtgaagggaaacagggcggagagggagaaagaaacactacttacgccgcctgcagccacattttttaattcttttgggatctgtgacgtcatcatgacaggccttgcagtaaaaaaatgccctggagaaagagaatggaaaaactgacacatctcataatccacccgagtaaaatgagtaccacgtttccctcgaggtggtgccaaattaatgaaacatgccagccctaatttcctttcatcttttgaaaagtttagacatctgcagacggaaatgtttgttgtaagaccactcatttcaaacccaggattctgtgattggagttggtgcttctttttataaactttgcaaagaaatggggagaaaggtcctgctgatgtcacatactgggtctgtgactgttgtttctgagaacagcactgagtactggtccttggaacacatggtcaaccatctctgagtctttggagtgtactttaaaaacaactctgaaatcccaaccgtctagttgaatatatattaaggggctcaaggatgatgaccctcagtcagacataaatactacctttatcacttcgaaagcaccgtttcttattaactaaaataagaaaggcttgagagtcactggagggaaggagggactacagaaacaaagagtgcagtggttcctgtcaactctctcctaagattcaaagcccattgcattccaaagctgactagatccattccattatagcttgctctgagcatatataatggataaaagttttgttctctttatgctgaccactggaatgggataaggagaggaaaggttgggttgaatgggctggaagaagaagcattcaacaacaatgacaatgtcccctaatctgactttagtgtcaatctgagacttcaatgtgaactttggttgtaccaaagatactttggatgagaagaactaagatgctctgagcacttctcagcaatagtacccagaggagtaacctggggacctggcggttggcttgtgcccttccacttgagatggtgcagaagcagggccataaaaccgctcagttattaactttcaacacaagagtcaataggtgacagaagatactcaacattctgtaagtatattaacaatgctttgtgttaaacggttctgcccaattataggctaatttgaagcacttgaatacattagccagtctgggataaggtgtgatgttcaggaggttacatgcagttttggcgtgagctattttcaaattatgatggtttattgggatgtaaacccatcataagtagagaagcatctgtactggggaggtaataaaattcgctggaacaaccttccaaccctctggatccaggaactaacaaaatcctgggcttaacgcctttaccactcccaacatgaaactgagtgccaggaataaacagggccatttctcaatggaggctaaagaaataaacacaattctaggtcttttatgttttccacagggtgtgcatttctacagcaagcccaaagctctttgtttcaagaggctccttcacaattccttccaatgtcagatggcatatactctgcaaaatcagaaaggacagctgttgccctacaaggcactgcaatgctgcatcctcttactcagggcaagtaagtttgaatctacttcctctggccatcttctttccattcgaagctctcctgagtgacagcaatacagcagtaataacagctaactcttacagggtccggactctaggccaggtgctgctctcagtatttcagaagcactaacatatttgatctttaaacaaccctttgaaagaggcttaattattacctctgttttacagataaggaaactgaagcagggagagattaaatggcctgttcaaggtcatactgctaaatggcagaatctagattcaagtccagacgccaaaaatcttgaatgtgttcctctgaagagatggagagatgagtctaaagaaactaaaacccaacactttatattaaacattttacttttaactgacacaactatgtatatttgggatgtacaatgtgctgttttgaaattctgttacagagtggctaaatcaagcaaggctacacattttctctcatctagttgttactttgtatgtgaggtgagagcctttaaaatctacctgaaaagaaaaattgctaaaagcaattttcatgaacacaatacattgtctcaaaaacaacaacaacaacctatgggccagggagttgactcagcaggaaacagcagttgatgccaaatctgacaacttgagtttgatccctgggtcccatgtggcagaaggagaaaagctgtcttctcaccttccttcaaggtgagcaaattctcacatctattcaacacaaataaataagtaaatgcaaaaataactattttaaaccaactatggccatggcactctgcaatgatgtcttgcatttatcttcttgcttaaattaatgttttctgtcccttgacccttatcccctgaggtgtctgtacccctgctttttggaactgaccagtctaccctgtgcttctgtggacttgactttataaggtttcacatataaagtgtgattgtgtagtgtttgtctttctctgcctggcttctttcacttagccaaatagctgcttcagtcagacaggtgaggctaatgagggagacgagtaatgagctaaaggtgtccatggattcttcagattaaagaggaagattcttcaagcctcaagttgagttttgccgagtgaccgttctttgggagctgcctcactcatggaagcctccaccacattctcttggcaatacccttccagtagagctacacacttgtccttgtaaactcagagatcccagaaacaaaatcccacaggtcccagttaaaatccgtgaatattgattccaggagcctttccccattcctggtgtctcctctctcctcctgctgctcatcttctcactccaaaacaactcccatcctcttcatcccaacagcttacacaccaacagaaagaccccctccagatcctgctaagctggccttagggtctccttgtcctctgttctgctgtggacaagagttctgcttggtaagagtcagaggtgactggaagagggaaaggatgaggttgctctttagtgggttgtggaatagatagcaagcagcagaagcatttctccattggagagcaaagcagtgagtagtcactacacccacaccatgtcctcttctccccacccccacccccaggcttccaccaccaaacctttgtcccttctccctgcagctccatcctgtagctgcctgtaagatgctttgctgtctctcactggttttaatcatcttgctgtccacaagtttatacgaccccctttataaacctttgcccttgttttccacttaagtgggtcatctgctccttgccaggaacccctatcaatgtggctccatattgatatctacagctctcttttctcctgaactgcagactcttggatgtacctgcctttatcatgactccatggtatgtttgggaccaaccttccatttgctgtggcccagacagaagtcatttcctaccacctccatgatcctctggtgtttcccatctcagcaagaggaatcatcatctctgctgctctcatggttcatggcccatgtctaggcttcagctgtgattcctactcctccttcatttctacaaagttcatgattacatactacatgttccccagactaatccaaatggagtcacatgactctacctccacaatctgccagcatctccctacacttgagtgagtgagtgaatggatgagtgagtaagtgagtgaatggatgaatgagtgagtggctgagtgagtgagtaaatgagtgaatggatgaatgaatgagtgactgagtgagtaagtgagtgagtgagtgagtgaatgaatgaatgggtaagtgagtgagtgagtgaatggatgagtgagtgaatggatgagtgagtgaatggatgagtgagtgagtgagagagtgagtttgagaatgactcccaggttggggtatttcatgttttcagaagtaactaggactaaaaatgttaatataaaagcagacaatttcttttaacttggcaactaatcaattatttttaattatgactcaaacaaaatatgtatctgctaaagaaggtaagagagacaccagattgtgttccaaagttatttaaaaagacaaatatttaggaatagcaaattaaaagcatatgaacaaataaatactcatcccagagtagcatcctcatgggattacatgggttcactcctctttctctaagccttgtacctcaaagtcttcatgacccagattccactaacttcttgagtgtgtgtgtgcgtgtgtgtatatgtgtgtgtgtgttgttgctgctgtagtcttgtttcttcagccatagcagagggtgaagacccaataagaaatcaacataatctacttcactttttaaaaaaaaaataaaacttgtttagttttattcaaatttccaatgtcctctctgaagttttctatattcttcatctatttgaaatccccctaactgacaacatttgctctgacacatcgcacaccatggaaaattacaggctggagttgtagctgatggtgtcagcatgtatttgtgaacaccataaagcacagaaacgagacatattacattccctaatataggaggtaatttgtttcccgggctgcctggtatttgtgacattcattagcgagagacgcaataggaaatagaattacacaaatgggagctcaggttgaatttgctgtttgggaggtgtgcatgatgtatggtcagctgtgctccctgcttaccatgcttagggcagagatgctgcttcaggcttctgtgccccatgtctggacaaggacataactattccagaccccctggggctggggctctctcagacaccccactttccattctcacccaaacttccatctaggatagtcctgataaactcctgtctcaggatattctatccatgaaatggttagagatgtgtttctcccatataatttagcaatgtcaatcatcctccaatttgcaggagtaaacttattagagatctcagatggaaaaaataaagccctcaaccccatgtgctcttttccttgtaagctttttaaactagtatggccccattcactacagttgaataggaagaaagaaattcataagcctggctttgtcaaatatcattgctctatactggcacaacaagagtttgcaaatacatcctattgttttttgataatactattactttgcataggctggtaaaccaagccaagataaagaagaaacttgaagggctggagagatggcttagcagataggagcagcacagttgtttgacagagtaacctgcttggcttacttgtctctgaaagtgaacatttcaaatgggcagagtggaatcacatataatgatagtccatactgaaatgcaaagccctatgattccctaagctgcttagacaggaataaagacactaataaaaatttcataaaacattgagcctcacattgaacccatagatgcttcatgattaaggctgacaattttagccactgcttagaaagttgcaaacacaaataggggaagtttaatgttccatcagaaattaatccaaactgttgggaattctactcggcacttacaggagaaaatttgtaatattcagagatattttacccagatggtattaagaaaataacctcagacaagaggccagatgtctcatgaatcctcgtcagaatctgaatgacttgaagtcacttatgttctacgggcttcaggtaccttccttgtaagacaagagagcaggtaactaggtttcctgattctaaaactttaatattcaaatttaaagacagatactggctatgtgaagagattgctcaaggaaggggcttcaatagttctggacatatgaacacgagggggttggtacatcaaggtgcctggctggaccagaaagaaaagtagatgaaaataaactcttaccttttaacttctttggcatcacttgcgatgaaaaatcctaaagtaccttcttggatcttaaggtggttcccagggttaattaatattctgctccgtgaacagaaacaaacaaagaagacacaagtatgagctcatgttcaggataaaaccttgatgataacaccaccctgctgttttcataggggccccactagtctaatgctccccccacaccaccaccccctgccacccagctttgttttctgagtgactgatctttactggcccagacatctagttcaatcatggcatcctttagctccaggtgatacactccaagtcaggaaaatcaaagcagatctgggccttagggtctgggtttgtttaacagagttgtttagctgcccccagatacccctgaccagaagcacagttctccagaatgtaccccattctgaaactgattttgatggccagtattgaaacactgtcagcctaatgaagctctacacacacccattctcccttaggtaatatagcattgatgggacccctatatggatgcagaaacagacaaatatacataccacatatttccatggggaatggtacaagacacctatattatatataatgtagaaggaaactatacatcttttggaaccctgataaggacatcaaagtagactgcataaagaacccgatctatatacagttataaagaaagctaccttctgttggatagcctcaactacttcagtctgcttttataaaactgtatgggttgtgtgaataagatataaaggtggcattccttcattgggtcactcggtgttttaaagacaaataaaaattacctcttaaaaaaaaggaaaaaagaaccaaaacaactaccttgtcttgcagggaggggaatgaaatgaaatatacactgccctcctagtaccagaaattgattagctgagcaagttaggtttgggatagcagtaatgacaaatgcatcctaacctagcaaatgagagaagcaaaccagttcctgtagatcaaaagcagagcactagactgtcttaagcaggctttgagcttggcagatgttgaatttagcaacttgaagcaaaagacaatggcaatagcctttgatctgaaaagctggtgattagggaaagagatatttgggctcaagctaaaaaattccctagctacccaaagcaaaatgaaggatggtaattaacatgtgatctttgtctagtggtaagaccattctagggaagaaaaaaaaaaaaaccactgttgccaaaggagtcctctatctgcagcaaaacaaggaggactcaggaaaactgctgttctgttgggagaactgcgatcagatcattactgccaaaatcactgttgtggttgcaggagcatccaccattagctgtaacaagacctgatagcagaaaacagggcttgtgccattgctgttattaacaataataatagcagagtgtgaagagttcactgctctaccccagaatcccgagcagcaatgagatgccttctgaaataggaaccataagcttactctaatggcccagcagtctgcactaatgatacactgcaaaaggcagaggttttacaataagaccttataatgaattacccctctgctaacccccacttttatatcacaagccctctgatttagcacaatcatgaggggatgaagtttgagattattcaagtttttttttaccgataaatacatatgaaaaaaattgtatttgtgttcctcaaagcgtatgtgagactatacagtttatattgatttccctttcaagtcagttaaataaggcattttagatgtacattttcgtcccactttcctgaaaggcagatcctatgtgattgcctctgaaatcagaagtagggtccatgttctagtatgcaggtggtaactttgggccagtccctgaacctagagcataatgttcttccccacaaaaggagtggtaacgctaacaatagtgtttggtcaaagaactaagtaatgttaaaatgactcaatacttttcatttatggttattgttatcattttattctttcaaaagtgcccaggtctattgtgtttcatcagaggtctcctggcttgatagactggaacactgtgtttcttattaaaaaaataataataataacctgtgagatgaagttataactttttttttttcaaaaaaaaactgtacgtgacagaataacacatgagttcatctatttaaaaaattccacacacttctggagccttgaaagtatattcttaaaagttaaggaagtcttccttttgctaagaattcacataagcatgggagaagacttcccaggttttgggtgggtaggtgggtggggtcctatcatgatttgaacaatggaatctgaaagataaaatgtgacaggcgttgtattggtgacatgtatacgcaaagacctctgtttccttccctaatgctttgtgccccattatctgtaccccatcaatgcagcccacagtgcttttgtgagatgcagtgatctcaaggttcccatcaagagaggtttcttttttatttccttcgatcttcatgtacactgagcaagaattggtctatagtgtgacatccaggaattggcagtctagagaatgcaggtcagtgccatcccgggatttgaagtctagagaatgcacgtcaacggaatgtattgtggtcttcaaatgccttttaactgaatcagtgctctggagagggcttgcttggtgctggaggtcaccgggcattcaagtctcaggctctagcattgttagtgaagtactaaggtgcgtacatccagaaaccattggggtctgcctctggtcatttggaggcagctaagcctcactctcctaatccaggaaatgcaatatataacccctgggtgtcaatgtttctaagagaataaaggcatatgcttatgtgttaaggatacaatatgcccttaatctttggtttctataaatatcagccggtgattaaaaagtgagagtaaacaagctgttacagctttaccagcctgctcgccattttgtcttcgatgttaattgacctcttgtgaacatgtggtctctgcacaacatctggaaagtggctactgtaaattaactttggtacacacagagtcactcccatttcttgagttttacagtgatgtgcaagagatagatggctcactgtccccagaattccctcatgttccctatggacagactgagaagattaaagttatatctgtatgaagtattaggctgagatagtcttggggagctgaaagattcaaaagaatgaggccagcccctgaggtaaatggaagaagtccgcaatcacaaggaacgttgtgccagataggctagacttagttctaagggtagtgaggagcaggcctgtgatcccaggggtctacaacatgagacattttctgtgtaggctgtaagcttcaaagactcttcggagacatacattcctgagtttagcattgcagatgtcataactgttatctacattcaaaatctaaaacatttaaataaaattttagccctgcccccttcttggaaacgtagataagaattctaggcaagaataacattttcttcccccaatgaaaagacttagagtttgctattgacctatgaaaacctccccaccccattctcttccccctccccatgctcactaatccacccactctagcttcctggccctggctttcccctacactggggcatagagccttcacaggaccaagggtctcttctcccactgatgttcaactaggccatcctctgctacatatgcagctggagccatgagtcctaccatgtgttagtggtttagtccctgggagctctgggggttattcaatgtcaagtttattttgttattaggggatgccaaaactcctcctccccaaacatcattttcaatcagttctctggctccaatttggtctaagtcatgagcttatcagagataaaactcaagatgtgtctctaagagcagggtcctatcaagaggcttcctttcccatatatccattaacaaaattccaacaaggacatcttggcaggagaagacatttcctcattttaagaaaggtataaattatcctctttttaccatgaccttgctgattttaattgaaaatgcctagtgacagatggccactcagggcttgtatcatcccttctccaaaagttttccctcattgcttttctagttctgcagctaggcttagtttttgtataatatcctctttaagagcaaaacatacactttctataaggtataaggaaccactgttgattggaagactgagaaacaggatccctctatttatttgtgagtttctcatagtagagcttagattcctacatactattggtactttccagagctatagaatgaatgaaaagcctatgtcatagtcattggctgcagttctcaaagtttctcctttcctctcaagtaaatgaaagcagcaactttgttcttttaaaaacccaaactgtagttctcatcagtcaggctgatcaaaggagcgaccacaagttcttgtggattgaccaccaagctatgaagtataaatatgcgaatatgcaaatgtaaacagtgagtcacttaggcagctggagcaattggtttccatactgaaagcgcaacttacttagaactgaaacccatgtttctgattgcagaacacatcgacatggaatgggctctactcaacagcagatatctgtaacagggtcctaaggcagacactaccttgcaatctatttcattggctatcccatgcttgaatttggggtagtttggaaaatcttgactaggctagggagaaatcttctttttcctctctctaatatttaaggtgcaatggctgtagagtatttagttgtccttccttaaatcttcctaaaccttactatttgaggagatgaccaatgattggtaatttaactaaaatagatacattaaaggagactgtaatccaccatggataaataggcgtgtgtgtgtgtgtgtgtgtgtgtgtatgtgtgtgtgtgtgtgtgtgtacaagtatgcctatgtcccaaccccccaccccctcaaggcatcgtgtaccattccccaaacaattaagaaaatatcacaacttccgtgagggtatagtttatacttgaaaacactgtaatcctagttgtgtctagcaagctaatgggacttcattaaacagagtaagcaaatccaagccattgaggagttcagtccatgctatgtccagaagaatcacaccactgggaagatatctatgtgatcactcatgggcatatacaattactgtcagcaggaacttcatttggaccaatttgtgtcctctctcaggaagttcaactgcaatgcagtttgtgctgtattataacatatcttaggaaaataaaaaacaaaacaaatctcaaaccttatcacctctcttgaattttccatttcttctgggctttacaataagtgctgttggagtcccacacaactagacacatgcatttccattagaatatgtgtagaagacacagtttgtgtattccatgcttcaatatgcataggtctagtccatttacatacagagacaccataatcaaggttgctcccagtaggccaaactcaaatagccatcactgtggtctacaacaatattggcaagatctggtttagcctgagtgtctatcaatcatcttaaatttcaatatattgttttgtgttacaaaaaagactaacttcatgagagagaatagagagagctgatctaggaaggataatactggatatgtggttctgggagcaagccatactttctggtacactttaagacaagtcatgcctacatcacaacatgccttaaccacaaagtaaaaggacccaaggccaaaagccaacagcagaggtgcaaccactgtggacctttgaagatgcatagtgttgcaataacttcttgcagttggatcatgtcaataataccaaactgacaggaagccacctctattcacatctactacaaaataaaatcacagaagatctgacattggaaagagtgccaaacaacacaaacacacaggcacacacacaggcacacacaggcgcacatacacacacacaagtatgaacacaaacacatgacagcgactaccaccacagagaagaacgtgaacaggttggcattgcactttcagccgcactgtctaagagattgcattattgaaaaactatgctgaaaaaaaaaatgtaacaacaccaatcacccctgaacccaaataattttttaaaatgccatcgatgataatttagtcatgctccatgcaacacaaaacagcggcaaaacaggatgaagtcacatggtaaaagcttagatacttcctgttaagaaagatgcccaaacacacaaggaaaaaaagaaacccatgagtttgtcccaacaaacatgcttattatagaacataaacataatagctaggcagtttattattggcactgctcaagatgttagatagtcaaaacaaaattaacccaaacgaatacaaggagaggaagaagtgcaagggcttggtctctgttttgtggataaaggacagaaactctgatctacaaagtgaaaactcaacagagagacgtggaggtcactgggaatgtggatatgcaatgaacacaaaatgatgcctgtatctaatggacgccaggacaacatcaggacaatacagataacagacacagagggctggagagaactgtcctccttttcaactgtaatgggatttgttaccaccattggtactatgattgaagataggactctgcttttccattaatttacttatttgtttgtttgcttgcttatttatttatttttattttcctgcaaagaagttagtgcatcaaccaaaataatcaacaaatcaaacaatgacaacagcaggctactttgatgtattctagttggagacaggtgatatatatatatgtatatatatattatgtatatgtatagatatactatatatatatactagacaagggaaggagattatatatatacacatatataatctctctcttcttgagttcttggcaaatggttagtcctgtggttaggagtgaagacatagggtggagattggaaggaaagttaacgaagaatgcataccgctttcggcttctgcaaaaacgacaagaaaagaatttcaaatcaaacaatttgataataaattgactgacaccaggaagaaggaaggaataaaacctttgtttcaaagcatttgaaggatgtgtgtgaaaacaaggtttatcagcaaagcatgaaaacagtatcatgggtggaaccaacaacagagaatgtcctttaacacaggtcagaggtaggagggtggggaagagatgaggcctctctacattgtcttatctggtccattacaaaattggaaaggaacaagattaggtttctcacaaggatagagaaaaagtgtggtttgggacttaaaatgttttgttggatgagtcctaggtttagtggggcagcgtctgatccacattccctccagcacaccttttcccacaagcactcctgtgcttccacactgagaccaagccacattgaggattaatgctggcaactacacacagaaagccaatacaaagccaaacaagttcctggggtttgtttgtttgtttgtttttgtcttttctgaggcagtgggagaaaaacaaaacctacaacctatttcactacacatggctttgttgaaaatagctcaggttaccacccaataagaaggcctatcagagggcagattgtttcttcatagaacctggaatctgttttcctagaacagtgcctggattccagcagtgccctttcttttcctgtgtccagagagaagttatgtacaagctgatgggctgatgctcgtggcttggtgcagtcttctcttgccatagattattccagaaggctctgaaaacacttgttggcattagcatcacctatgtggtgacacttttctttatttttatttacttatgctttgaaagggatggataaaagtgatatagagaaaacactcatatccacaaaagtgtactgacttggcaccacaaagattaccattggtgatgctcacccgctcaaaagaacagaaaaccaaaaaaaaaaaaaaaaaaaaaaagcaaggacccataatttctcctccacaaacatgggtccaggtgaagccaggaataaagaggagcaaagagtgaccccagaaaattatactttaactgttgaaagacaagtggctggacttctctcgtgctcaaacaatactgtaatattatttcctttgccaacatggaaaagaaaaacatatcctttccatacatgtaattttaaaattgctgccaccatgttctacacatggccaccaaatctaccattttatcttccgttgtctggttgatttggattttccagaggaatgcagcattcgatcagattgaccttggacaatctgatcttacagggaagagacaacatagtatccacttacttgtgatctagtgtttgttttgttttgttttggtcacagatacacacttagaaatgggcttgtgtgtgtgtttgtgtgtgtgtgtgtatggtcattcatcaagatcatgaaaactccttaaacgatgctagcatgacctagcaagtgttgccctatattgtgttcagttatgaaggtgtgtgttggggtgggctgccctctgcccttgtgaacatggaggagcaaaggcctcactagagcatagacaggacctggatgcgtcatttcagagaacaaaagccactctatctatcaaccagctctctttcttccaaaactatgactaagagtcaaggatcaaagatcacctatgttatcaatactgcatgtaggacccctcgactggattccttgttcatacagtgctgccatcaaccagcagtaaggtcatgtatcgactggggtggtatctgtttcagccagaccccgtccctcatcagtctgatttgcacatcattaacggaaaaataaataaataacgagagctcctgcctcagagctctcctctcctggctaatttacatgaagctgatattctgccacctggatatgggctgcggtgggagaaacacatatggtacacaataggatgcttgcaatttggctattgagggagctggcacctcccatcacagctctactgcaggctgcttgtaaggaaggccagaggccacctgctttttgcttacagcagtaaaaggggcttcaagagggaatctgctcctgctttcatggatagaaggcatagcatagtgggtagagctactgagaatgtctctctcctctcctcctcttctccagggtaattgtctctggatgcccactgggacatggaatgacagagcctgccatgtcttgaaatgttttgcagggtcagggagctgctgagttgggttccaaacaaataaatcatattcaagaaagagaacatggacggaccttcccaggatatacacttccaactcgaacagcaacttaccggctctctctgttggcagacttgtactcaatggctatcatcaggagcttaagcttcacaaaacacagcctgcaatgagaaggaaaggcctcccagtcagtacttcctgatagcagagccatataccaaacttacctaggaacttccagtcccctaacacggtcattatccaggggatcctcagtctaccgccaggtgccaaaggcagggccagtaaaatgacacctccccatatcccccattaaacctgattccccacaagtgataagtgcaaattgggctctggtctggatgtctagacacagaccccaagcagagatttgtgtctggggatttacacccgccagattcattagttactcagttgggtagtaaaatgttaactatggcgggggcgggggaagggagacttggagcagtgcaacctgttatttggattccatttcggtcttttgtacaaatggcctatattgttgttcagagcagacccctgtgtgcttggaatgatggtaataatacttagcctccgtctaagtgcccagcacatgactacagctttgtcactcctggctctatccaagctgtctcacctcatctgcccacagttctgggctgcagaccagactgtttcctgcaggcttgttcctgcctctctggcttcactcttgtaccccttctgccccccaatatttcctcttctcttttcttgccaaccatcttcccaggtcatatcttgtctatcctccaaccagtattctgactattgcttccttttcagatttatttccaaaacatctctagctcctttcctagatgcaaatcttttagctcctagctaagtttacactggctgtggctgcttctcatagttgtgcatatctgaacattctctcctcagccacagaaacatcttcaagacgtttggagtttctccacagtgcatggtgaatggagacactaacagagaggaactccttacggagatgaattctactcacagtgtctcaactccaagaaaataaaaggagctgtcatagcatgcttgtgcagaaaaagattcaaagtagtcttattcatgtggagtagaaaagttttaataaatgaattttgaaaattgttttaagatgttaaggccacaaagaaaaaaatataaacctgaattcatatattatgatttagattgaggtgtgcattggctatttaaagagataagggctcacatgaactaaaaaatgaaccatatatattatgcatcccatatttctataataagcattatggtatattttaggaggttttaaataatgaaccattactcagtgataatgacaagtgagccctggctcagcacagtaaatggaaagagttattaggtcaaagggtaaggccttccttgatggctctactgacttctccacaccttcctaagctggggatactacccttcatcaatagttctgtttgactgctgctaaagctaagacctagaacacccacacagtccatgccatggttaagtactaggcctctggctgaccctaggaggaagatacatcttcctctccagtgaagtgtgtttttcatcgggaaagaacaattataagccaatatatatgtgaatcaataataaatttctaggccatgacaaatgtagaaattgttttgacttgtgagaataaagactaactaggaaatgggtttaagaggaccaccctgaagatgcagagagcaccagagatgagatgggaatgagaaggtttgggaaagggatctctggggtcaagtgtggggtagaaatggcaagaacaaaagtcctgaggcagggaaatggtctgaatatttgataatcagatacagagcctataaagctgtcattgaaagaacaaggcaagacaaatcatgagtgggtcagaaaacaaggtgggtaaaaggccccttcaaggtatatgttgcttattctcagtaaaagaaagacatggagttgatttgacttatgtgcagatatatgtgtgtgtaaggggtgcatgtgcacattgtggaggccagaggtctgcttgaggactgcttctcatatattgttttttgagacaaggtctctcagttggaggtgaagatcaccaattctgcccaactgtctggttggtgagattcaggaatcttcctgttcaggccgtcccagcgttaggattgcaaatgcatagagagcaaacctggctttcacacagatgctgaggattgaacttgggtcttcatgcttgcaatgtgcactttaccaactaaaccatctcattccctgtagttagtctacaatgaagaattgacttgggctggagagatggctcagcagttaagagcactgactgcttttccaggggttctgagttcaaatcctagcaaccacatgatggctgacaaccatctataatgaaatctgatgtcttcttctggtgtatctgaagacagctatggtgtacttatatataacaaataaatctttgaaaaaatgacttagtaagatctgctaggcatagagatgtgtagcttgcaagaaaggtacgggtgaagggtgagtacctcatattctctttagaaaataagatcaactgttttttcttacatgagaggtcctagctccttaatattgcttttgacaatcaggctttagaggaacacttccgtacagtgtatctgggctctccctgcaattttaaggctgattcctgctactggtctgctagacctagaccttgaggtagttgtgcagaacagttctgaaccaccgacccaagtatcaccaactatagcaaggaaatggtcttcttagtttatgttccatagcactccattaactccttgtagagctgctcttcctgaagtttaaactgttttaataagtcatattctttattcactgtttgttgaagaaaattactggatgaatctaaacagtatccaaaaataaaaataaaaaaaaattcagtaagaaagtgatctcagcagagaccatgggaccactgtcatttttatcttggagtctggtagttcatgggatccaagttcttcattgtttgtacagacttaatcctcctgttgggacgggaaaggttcgctgctatgtgtgcattcggttgctttacagcattttagctaagatcaaaagtagattgtatcccttcgtaagtgaatccaatgcaggcagtcttgtgcactgagttacagatggttacgagctgctacgtgagtgctggagatcaaaccgaggccctccagaagaccagagcctccttctatagaagacaaactgaagtctgaggagggaaaatccacaggctcaaggtcaaatggcttttgcatttagaaaggtaagtggagcctcagtctccatgtggtgtggggtgctgctgatcctcggatgagcagaggaagccaaaagtgcaactggcccacactatttggccagcacagtattccttcaaatactggaaatagacatcaacatgtgatttcataaaactggtttctcagctttccttggcaaaccaaatatggtcacactggagccatccttcatggagctaaaagggactcctcagggggttcactttctccagtgtcccacagtgcccaccccttcctactactcagactgccttccctttccatctttattgatgtctgcctctgcatgcatctatagtttaaatattgattaaacaggtatctctattcctccccctttctcagctcgctgtatttccatgtatatagaacttgtgtagaattgagaaaaccaatcagggctggggaaagaatgagaaaaaaaatccaaaaaggcttcacagcataataaataagataaagccagctgtaagttagcaagagtttaattcttagtttctaaaacgaagtctcccaatatgtccagagtgggaagttgtcactggttgcaaaaactacagggaaataaaaatgaccccccctttttcctccaagaggggaaaatgccacttgtcacaaaaaggtcttaaaccagaaatctgcaataaaactgttgtaataacaagttagattgcttcccttataattattaagttgaggtctaccaaatttgactatgccattatacaaagccccctttcttttattaccagcatcatctgttaactatagtattttcaacccagatgttcctgaacaaaggctctcaagaattagagtccagctgtctctaactacccagagagaaataaattgtccctgccattaaatcagtccccttgactgcaaagattacttgctggtgtgaattaagcatagaaacctgtcatggagtttgcactttccagtatgcttacaaactggagacaaagatggggcttagagcaaaggactgccacccggaaagtgtcagaaaaaaagaaagagcagcttctaaactatctaaacccaccgagccttctaaacccagctccccctatgagcaccagctcccctccagctactcagaggcccaggaacctcagtataacttccataatcaccacggaagtggtacaaacactgtgtcctggaaaataaggggccagagtagaaaataaccacatttaactttaattggaaaggatggcttctggagaaaagaagatatacttaaaatatatttttttaaacagcaagatttgtaatactgagcacaaagaaaatagtaattttggactgttagtggagatattagactccatttctttgtaattttgataaggatggatgggacagttttcagaacatacctactctcaaatacaggcatgtctatccatgcccagcacacaggcacacacacgcacacacacatgaacacacacatgcattcgtgcacacaccaagcacagtgcctgtcttccctaacagacctaagacatttaaacttgaaaatactttaattctttgatgtgaacagttagagcttttctaaagtgctaacaaatgcactttggggaaagttttactgtccttcttcctctgaaacacacaccacaggctgtgggcttacactgcacactcagctaccagggaaaatcagttccaactagattctttgcctgatgcctctctccagaattccaaaccattattagcctctacaaccttgcacgagggtttcggggtgtgtgtgggggggtgttgattgccagtggtttatctcatggttcagaaagaactagctgccacctcctcagttcctgtagccgaagtagtcaccagtgtcacactcacatctacaaccatttacaacccaatttacaaaattcccaacataggcggctgggtagcaccatctctgacaggaaaaaatttttaaggcaagatttaagtttttacctaagttctgttggcacaaatttttctgaagttaggctacgtgagtttaccctggaacaagtgggtttgtctggtctctgtttcacactgagattagatctttttaaaacaaccaatggaattatagaactcaagttgacactgggcaagaggcctttctttacctatgctgtaccaattttgactttcttcatgtggcttcttttgaaaaatctgtcccatacaagatgacacagagagtccaattttctcaattccaggcatatggaaagcaggtggataaatgagaaaatggagagttccccctccccagaatcttcttcattgcctgaaaccaatatagtagcatccacattttgcagccagaattgggggctgaactgccctgcagcacagcccactgcatttccccaagttgctcaagcactaactgcccagcatcaaagctgaattttaactgctccatcagctgcagagagacagagagacacatcgtattttaaacacatctcttgtcctaatcccctctgagctgtaaaacctcatacaattaagcttttatattttgcaagtgatgaatgactgattagtaggctcgctgtgagactccagacctggaactctgtgttcttggcaacccaattgctgagcctgctttctatcaggtcatcctgcccaccttctcccacccccacctacctgagcatcctcacctttactaactctcacaatgaaactactaccactattgcctcccaaagcatcacatgtcaaacgctaggcaatgtgcctctctcccccatctacagggttattatcagaaaacctcaaaggaacatgtgtgttgcaaaaactgcctatggtgctgtgaggcccagcttctctattccctggggactttcccaacatctgaacctaagcttctttcaggaccagctctataaaacggcatcatctcttgtttcctcggtgtataggaagccttgagagccctaacaccagttgtatgcgtttaccagcacgtgaaggtgttagtgctccctgagtacgggcatgggctccctcaacccaagttcaaactctgaagacggcactaactgggaaacaaattctttacttcgtgttcaaaagaattgtcatcaagtttccatgtttaatagttaatcaaatctaagaaaacaaagttgatgcagtggtgaaaatattctaattcatcacatttctgttctattgatttgtgactaataataactggagaattttactaaacaataaaagtaaaagaaacaggaactgccaacatgtctatcccttccctttccttctttccctttccctttcccttttttcccttcttcccttgtttccccctttccccctttttttccttttattcccttttttccctttttccctttttccccctttttccctttccctttttgcccttccctttccctttttcttttcccttttccctttttcccttttcccttttttccctcttcttttccctttccttcccttcttccctctcccctctcttccttccttcttcctgcctgcctgcctgcctgcctgcctgcctgcctgcctgcttatagttgatgagaatggggttggggaaggcagaccgaaagggaagatgagtaataagtactaagacatggggaacacgaggaatctcaccacatgcaccacatctaaggccagacatctggtgctaccacagaaaaagtgcagagaatcttaactcagcaagtggctgacctgagggccggacttcagttctttgtcacttctttcaatatgttggacagtgtcatattgctcaaagaataagactgtttaaggttaaatgcagcttcagtactctaaccttgctggaggcttgagactggtcatttgcatttttacacgcccttgctggaaaaggaggggagaagcaggtggttgttggtattttagatctcaaaggtgatgctgaagaggaagttgatgcaaaagctctgatctttttttcaaacttacgtttttgctagtatatagaaacccaccaagaagaagagggcagttgacccccaggtgctggacttacaggtggttgtgagctgctagagagagcactgagaactgaactctgaccttctgcaagagcagcaagcaccctcagcctagctctctagctcccaaaggcccacatcttaacataagcttgcaagacgcaaatccacccgtgattctctgatttgcctaagtactggggctcaaagcaggctgcagaggctgcaggacagagggtgggatggggtggggtgtggggaggacggagcagcttcccatcctcagatttcagctaagggtcacctcacttgttcatttaaaaataaatcattagtgcgcactttaaagccttactccagattttaacatctggagctgaagtgtggatatcattttataagtttcccaggaaagcattaatgagccagccttcgactgtcacctactctaacctgttcctagttgcacgagactggaggagcctcaaaaccctggttctgttgttctgtcctttgttttccaagtggttttggaaaggtgtccagaggtcatctgagtctccatgtttgaagctaagggacctcttgtgtacaacgtgaggtgtttatattactctgacacccctagccctttcagaataaacctcacttcattgtttgagacaatgcaggggtaggttaggtaagatcgtgcattttgtctaaatgagcatctggcttgggatcgatgtcctgccttttggtcacacataaggtagaatcaaagggctgccactgtgtctgggatctaatcctgcaccctggagacccctcagcttgaaattttgaagaagtgagttttgggggcctctgcctcccctgcactgtccccaccctttctgttttcttcagagacgaccttcaatttcacctgctaccggccccttctccttttgtaggacgactctatctagcttttgagaaaactccgggttctcttgagcaccaataccacctgctaggtggcatgctgccagcctaggggaagaggaaatttatttctttccatgctttgcaacatcattggttgcatattgttttagtgtggtacataattatggaaaccactctgaaaatctgtatattttatctgtgctttattatacccggaatattccccgattcttttccgtctccacaaaccggcttaaaatatatttgggcgtcctttatgtcatcttgaaattgaatagccaattcttacagtaatgaaaatacttacgcggcagcctggtgatatacaacactacactctaattacggctgcgctttaattaacccgaattgaagagtgttatcattaaactgctggtaactttgagttatggcttttctttaatttaaagtagaaaacacagataattaagcctcaagataatcaaatgcttgaagagagcttcaatgttttgggttgttcctaaatctcattaaatgtcctttctttattgatcacttccacctctgccgaattgctgcattacaggaataatagcactaagccgaacacattctcactcacatcggaagctgttttttttttttttcttcccatcccgacactttactgaacaaatactaaattctctgacaacaaggtaggtctaaaatagcttttccctcattagaacacactctaaagatgagtatcgatcaagggaaataattcatatcttactggtgttatgcctgactctcgtgctcccaaggaagctgccttggagcttttagcttcctaccttcctcttcctccccacacctggaaaaagtcaactcttctgacgactaacggtgagaactgctcctcctagaagctggaactgggctacacagcctctgcatgactgcagactcccaagtagtcatagaaggctagtggagacgcccaaggctgcaagcagatggggttgacctgggtagctcaggtcactccatccttgtttatgagaaagcatatccagccctttcactaaaacaagtgggagcccgttggtattgtgcagaaacatggactctgtggccaactcggattttaaagaaagtactcaggttttggtttggtttgttgtttttatggttcagaaatactggtaactagccttgaacaaatgaaaccatgccaaatccacaggttcagtgcaccattagtataggggctgaagtccttgcctctagttaaagaaaaaaaaaaaaaaaaaaaaaaaaagacttccatcccctctccccaggagtaaaggaagagagaaagtggaaaggctggaagtgacttcactggagctttcctgtcaggctccatactagttaaatcagctgtggtgacgcacgcctttgatcccagcacttgggaggcagaggcaggcagatttctgagttcgaggctagcctggtctacaaagtgagttccaggacagccagggctatacagagaaaccctgtttcaaaaaaaaaaaaaaaattaggaaaattaatggctaagagagctttgaaacttcccagctcaaatccctgacattatagggcccccgctctgggtgctgccaatttggccctgatggtcagaccacccctgtcttgaccatagaggacttcaagagccttcttaaaaagccagcttcttctgttttcattggaagctctgacttctccagacttcccattggaagcaggctgagttacaaaggagggcagcctcccagcatctccagaagcttaacttcaccctgtggcaggaagggaagtcattcccagggagggtgctcaggggagttacagtagggcttccatttccacaaaagcgctccttccgaaagagaatcaattacctgctcacttttccagtccatttagcatttaaactatcgcttagagacagggtgagaaatttctgtaaacaaccaaaccattttggagtgcttgggggtttgggctcagggattggcagagaacacctgctgtgttctctgacaggaatctccatccctcccttctgcatagagaacagaacaagagtcccaaagcccctaactttcctttactatgaagggctctcaggtttgatttagcacttttagacttcccattctagaatcccagagggtaggcttggctggtaaattgccggcttaaagctgtggctcttctcctgcagctcagatccatctgtttcttgccagcttttatcactgagagcatttattgacttttgctaaggggtcaggtcctagtgggtcaggcttagaggtccaccactttcagagtttctgttttcatggggaacacacaccttgttccttttttgattttacttcaatccagagatgctaagtggtaaatctggggtcccatcatgcctcaaggtgggcacctagaacactggggaccaggatgcttgttcttccagggctacggggtatgtcctgctgcaggtgccctggggaccatttcaggttcttactatttgagtacagacgtgctgaaaaagaccttttccaggcctcctcctgcgcacttgagagcatagttcctcagtaaatagccaaagtgctttaaatgtctacagacttgattagaaggactttattagaggataaaattcatttatcctggaactgacaagatttgctttatttctctattaaaggcagatagatagggattgagtgtgaggccctgggttcaatgcctagtaccacagacagacagatatagatgaaatgaaacaaagcaaaaccagggccacatgagtttgtgccacctttcaaaggcgttacttaagatgtgcaggcaaattgcacacattgtaagtttgtataaatcagatttcacatcaagattttcagacctaggggatgaactggatccagcacaaaacccaaaggcaggaaccttatcagaacatgcattgttgttcacagacatgcaggactgaacccacaaggacccctgaacgagtgtcaagtgtcctgaccagtgtgcgcagaggtgggaggtgcaaattaatatccagtgaatggtcacttactcacaaacagtagggaaggacagacccacgaaggcactggagagatattctgtgtacatttcattggagactccttccaagtagtatttctgccatgtgtcttcctcaatctaagagaaaagtgcacaggaagagggtttaaagtatagacaagctctgacagagggggggctccagttacagtcttagttaaagagacaaatgcaatagtgacacaatgaccttcctggtgacaacctcagcagctggcgacatctccacagcacccaccggaagctcccagggaccccaaaaataattgaattcaggtagatttccctcaaaacactgcattgctttaaaaaaaattaattacatgtgtgtggctctgtgtgtgactctgtgtgtgtgtgtgtgtgtgtgtgagagagagagagagagagagagagagagagagagactgtgtttctttctgtgtctttgtgagaatatggatatgtgtatgtgtgtgtgtgagactgtgtttatgtgtgtctgcatctgggtgagagattggatatgtgtgtgtgtgtgtgactgtgtgtgtatctgtctatgtgagagtatatacatagtatatatgggtatgtgtgtgtccttctgtctctgtctgtgtgagaatatggacatgtgtctatatgtgtatgtttgttttgtttgtgtatgtgtgtgtttgtgtgtatgtgtgactgtgtgtgactttctctgtgtgtctgtgtgagagtatgggcatgtgtgtatgtgtgtctatgtctctgtctgtgtctgtgtgagagtatgggcatgtgtgtatgtgtgtctatgtctttgtctgtgtctgtgtgagagtatggacatgtgtgtatatgcatatgtttgattgtttatgtgcatgtgcttgtgtatgtgtgactatgtgtgtctttctgtctgtgtctgtgtgagagtaaaggcatgtgtgtacattggtctttgtgtagaagatggtattggatactgcagtgctggagttataggcatttgaagactacacaccttttgtgagccttagatccaaattcttgtcctcaagattgtgtagcaaacacttttaatgaccaagagaggtctctaagtccttgctttgctgtgaccctgcatgatttctaaggctaagggtatggggaacccatctacaatgaacaaatttgtgttaactgatacaaatttctggagaacaattttgcaggcattttcaaaattcatagaaccatatactcttttatgcaggtttcccattttcacatatctattgtaaggaaacaaattattttaacaggtaagctaaagatggagttgtaggtttgtgccactcttgaaacttgtttctacatcataagcacataaacatacgtttttgattcatgatatatcataaataagcacaggtcatgtgaaattttagaatcaatgagagattataatgacatttttatctgttttatttgtttattagtttggttttttctgtatatgtatgtgagagggcgtgaatgccacatggacatgggtaccaatggaggccagaagaaggtatcagatctgctggagccagacagtgtgggtactgagaactgaactcaagttgtatagaaaggcagcaagtgctcttaactgcatggtcgtctgccccgaggtgattttatttttaaaagttatatctgcttttatatttatagggctgtatgaaaaagtctagaagtatttatagcagatcagtagcaactatttttgagtggcaggatactagtttttaaaatagataatgtattgtctgaagacttttacacacatgcatgcacatgtgcacgcacacatgcccacacactatgtattacatttaatctacatattcctactttggggaaacattttttttctcaccctactaagaatatcacaataagcaaaatatagtttcaaaggagtcatgcccaaaacttcattaaaaagcatgtttttatttttttctaaataataaggtctatctgggtttcccaataactgtctccaagcagtgatttcattgcactcaatctttggaaactcttaaattagacaacaagcctgaatcactctgcattgaggagtctgtgaccgccttggctggctctgccctatagcttcccaggcttcacttcctgtgatggcttaagtaataagatgacaacaggaagctgttctagccacaggaagtagctcttaacagtttgttgttctcttcttatgctgtgaggaatcctgaccatgactgatccctcagttaactgagagaactgaaacatccgggtgtggaggagatgtggggagcctgagaaagagcagaggcttcaaccatgtggttatactcaggccatcaaatccagaataaaaactcaggaagtgaatgggatgccccctccctcatgggcttcatgctcagcctgagatcataagttaccctccttggaaggagctgcttctgtctgcctctgtatgtcaggtgttagctacgcagagctttgtggaaaaaatagtttacctaaaggtataagagttctacctattttttttaaagaaacattttttttgttaaagcattttttgttatttaatacattttatcagttcttggagaatttcatgtaatataattttaccatagtcaagccccttctacaagtcttaccagatctacccccccccttcctacctttgtttcttctttttttttttcttttttaaaactcatcaagtcccatttgtgtggcccatatattcttggatgtgtgttcatctactggaggatgattgacctaccaggattttcacctggtagtacctgcacctggtagttgaactatcaggtagccatacattaatgaaaactgatattccctcttccaacagctattaattgtcaatatccccttagctagggatgcatctttgtgcccacctcctgtcttcatgctgggactttgtctggcttgtgcttgtacagctctctattaatataacagacatttttttctaatttaaatattacaagtgatttccaaacatactgacaatataaactttatcttaacattactggtaatgtccaaataatatgggtttcatattgatcgcttaattattaaaattggttggatgcttctgtgaataatgaattaacagttagtcagtaaatttggtaagtaaatagaaacagtttctttatataataataatattgttatgcttttgttaaacttagcaaaaatatttcattgatttattctctcagtaaatatttactgaatatgttctatattttaagacttattctagaggctgactagatctaattttaaacttgtgtttattttcccacattcttcctgatatgtttcctggctaggatataagcagccatcctactagatgcatctgtctctcattgattctccttgcctctttccccaaaggtttgtctctgtggcaaatgtgcagtgtttgtggactgaaagccaaacaactgagaaaaacgttcaaaacattctataaaacaagaatccctcttccatatctgtatgtaaattctcagatggtgtctacaatgctgaacacaatagcatcaaatcaactgtacaaattgtaaggagtttaaaattcattgtcctgactatttaagactttcatatctttggagtgatttgcacatgcacagcctacaatgttttttaagatttctaatcaaggcattacacacataggcacacatatatatatactcacacactataaaactgctaatttaattatactaatatctttccaaaaagacatacatttagtaggaatgtaaactagtacagccactatgggaaacagtgaaacagttcttggattccaaatatgattgcttatacaagcagcaattccagtcctgaatacataactagagaaaatgagaaggggtcagaatagcattattaggtctgaaaataccaaagtgtctatagaaggatgtgcagacccacaaaggcatgctggttagccttctcaagaaaggaagttctggcacatactacactatggataaaccttcaccacatatgctaaaacagaccacagtcacaaaagacaaagattggtgggggggcccagttacttgagattcatgtctgaaattcacggaagtggatggtgcaaagggcactggtgaggttagggaaagtcattgcttttatggcacaacgagtcaatttttcaagatgagaagaattctgaagatgggtggtggtatcagttacatagccatgtaaatgtacttcatgccaatgagttatgtgcttctgattataaatgatgctaattgtcctaaacacgatgatgtcaaaccatgctaaagaaagaacatgaagaagggaatcctatcacaagagccagggttaggaaccagcactgtttggcatcaggatctcattcttgcctctccttgactcctctggccttgaaatctccatttaaagaattcagaggagacaactgggtgctatgcaaagaacaagtagatattagagagcaccctcaaaagccaagggctaataaagaccaagggaaccattgtgttcatctgcatcttaggaaggctacatgctgtttctaaagagctttcttctgctcatgtgattggcaggaccatgtgggttaacttgtacagaatgcatagtaagtatgcagccttgtcttttaccagaatgcctcctctgacttgatggcaggtgagaacatcatgtcagaaggcaccccaaaatcaaacttagatcccatttgttacaatttgagactggtcttaaagagctccaaactatcttgagtttgctatgaaactaaggatgaccttgaacttaaacttctgaccttccttcctctacctcccaagtgctaggatgataggaatgtatcatcatacccagtttattgggctatgggtgctgaagatggaacactactgtgtaagcactcgaccaactgtgctacatcccaaactcagaccatattccttgaatcaataattaaagttacaatttctggttttctaagctgctgagtaaggtggaagagtccagctggtctccgtgacatacagttctgctaatatctgactacattatgctatgacattggaccataccgcaatctagggaaatggaaattcactcttcctgacctgtatcagggcttagatcttgacattttatcatggtttggtttcctaagttaagtatgtgaacaaggcatgtgaatgaaaattcacatccctcttacctttgtcagtggaaccaccacaaaagaagagatgttaatgtaaaataggtgttgaattttaacacacacacacacacagagagagagagagagagagcataaagcaatttggagagagttgaggcatcctttgtcatcctgagacacacctagttaaagtcagtcacaaagacagtgagttgcacaaacattatttagagttcatgcccttaactgcccaacacaagtatctcttgctcagtgataacgtggtaggtgcccagagaggttgtatatggacagagagggtttgttatatacaagtgctcagtgcgggaacagcaaactagtccttcatcaaagactcaggagatcagcagtgaactccttagtgtgagtagccagcaaggagagccactgatattgagctcagctgcaaggggagtgcagagcaaaactcatcctttctattatatgaagtagcactgtcccagcctacaacttctttccataaatagtacatgctgtgccccacatttgtattgtcaatgtattttttaactgtaatgtgaagacacatttcccagcagaaaaatgaaggaataggaccaaaatgacttaaggaaaggtgccaaaattaattttccaaccattcagcaatcagtcaaaggcaaagcttttcctgaggcagcaatttatcccctggctgtcacatcaaatgccaggtgtctcacaagagctcctagcaagatgagcaggtgatgtgctgtgggtacttattcatcaaacatgcacagaaccttcggtgagaaaagagaatgagccactaggctagcttgtctacacctcttatggttttatttatctacccttcacgatctaatttttcaaccagtctagttgaacctcccaagcaaatggttttacaccaacccatgggcagacagccttgccatcaatgtaccttccatccatagtcatgagccttggctctctgcaaactcactccttcctgatcccaggttttgcatgtgttactaatgataggctgagaacgacagcttttattttttgtgcttcccctgattagaaagaaaactgtgtttctctaatgctaacagcctggtgaatgtgaacaattcagccctcctggctgggtttgtaacagccatagtgatttctattgccagtgaataactgagtagattagagccaaatgattttgcaaaaactccatccctacttcaggagccatacaaatgaccctgaaggttatcaaacacccatccttatttaattggatgtaagtgtactgcattaattcaaatagatgctattttatatacctaaaaataaagaaccgaaaaagaatcatagagactgatgcttattatcctcattgctgcaataagatgggataagctgtaacatctacacactaatattggcccccacggggtggtaggggtggtgaactaagtctctacttattctttgccaaagtctatctgaattctcagtgaatactccttccctggcaaaatgtcattttataccatagaaatatatatccaaaaaagttatttacatataaataaatacttgcacacagaaattacatagtatgctatccctgtcattttacagtgtggtattctacaacaacgtagtgacatgaactgaccaacactatcttagatcccctaaaaacatatttatcctgacataaaagaaatagcacccacagaacatgtcaaacattttattacaacaataaacatgaaatcagaatttatgggctcttggctaacttgcgtgtggagttattactaaaatgagtggagtcatttatactcattcctcaacagagtgctgtccctggggaatgcttgatggagttctgtatgctctcaattctaactgaaaacaacaatgttgtcatgttaacaggaccccatcactagagttccattctcctctcctctgtttccctctgtgttcatagcccatgaacatatcccagtgttgatcaaagggacatgtggatatttcatctacaccattcttgctccagcacaattacagatccttaaagcaactcacagaattaaaaagccaaatgagagaatagtgcttaggaccacagggtgccgactcacaaaatggctgcctgtgcagctttgtagggtaaataagcaggaggaaaagtgagagcccggggggggggggggggtgaagcagaggcaaacgatgatttgcctgttgtggcgaattagttaaaacacatatgtgcactgcacccacccaaaagttctctggagtcacaaataaaacacaaacacaggtcagctaattttgatatgccttgattagctcaatgattgggcatttctaaacctcactgtggctagcacacatttccctctggtattcctggcttaacaccttctaaatctatattttatctttgctgccctgttatcttctaggcagcccttcccacttctatatggccactttccctttccacctacattgtaggaagctttctctcctacagctcttaaatatgatccttctccctccaagtcatggcaattctcttcttccccagcccctgccctctttgttccttacccgagcaatctcaaagtcccgacctttctccctgcccagccaatggctgaacagcaagtctttattatcaatctaagccaggctggagcagagaccctcaggtctcgaaacgtggcttttgggacccaaaataatacaaagcattaaaaccaattcccaacatttgtctttctggaatgttcttcctttctggtcagatgtcctatcagtgccatactccttggatggtgatagggtcagcaggctttctggaagtgatgctggatttcagggtctttatcacaatttggcattccattttcatggtttatttcagggcatgattttcagaatgaggagacagaatgaaaaaaatctcaggttttttccaaaggctgaaggaagcaaattaaaacacatatttgagatttgatggaatgccaggtaagtagttgctttgacctcaaatgagtaaatatatacaaccccaaagattaatttgaggaagatttaggccagattattttttattcccagataaagtaaggtttttgatatttttgttgttgttaatcattatggagaaaagtaatcagcccatataagatattcagagaaaactgaacagaccacaccacacacaaatgcatttcaatacatgttgtttccccctattttctcacctcagcacagactgtttctgaagcagcatgaagtgtcaaagggtttgaagtaaaagaatgtttaacagaaatggcgacatagaactttttcaaaacaataactatgaagaaattatttaagatactattatctctgtgataggatgctggtaccgttcctggtaagtagggttttccttctctcttgtattcctctccaatatagaaaaggtacttttgtttaagacatgtaaaactgttttaaaagttggcctattcaccatctgcccaagtaggaatttggttttacattcttgctaacagttcatagcatcttcacttctgctccaaatgataatattcttaaaatagcacctaaaatccctctaactggggtagcggagcaggaagtaaacattcccaggaattgctgcctcccccaccccaccatccccagccttaaccccaattaaccccagttaggcctggaaacctagaattttccaaggagccattctcaacacatttgactggaaggaagcagggctttgttttatttctgacatgttattttttttagacccaaatgtttgaaattttgagtaaaagtgaattacaataggaaagaaatgagaaggtaaaacgaagcaagcatggggccaaaatcttaagtcactgggtccaactaacataaaatccatccctcaaaaagtttccagattctcatttcattttctgtgtcttctctcctgccgagtgagctgcaaacatctcacagcacttgtccatggactgtgggctgtgtctgaaactccattgcctataacatttccctctcctatcttaggatctttaggtaccacacacaacttccctcaggtttcaaaatgaaggagcattaccttcagctgagatagattacaaggtgaactggacagaacttcctacaaggtgttacctgaaactaaggtgaacggtgagaaaattttatgctatacccaacaagaatgtaggcacttttgatgagtctttatattctgagtctttactacctggaactgggcattgtgtgtagttagagtatggtgatatttttgagtggattaaaaaaatgtggagtgctggatttaataatacaaaataactttttaattaaatttcaaacttttgtggttttagcaaaatgtttcttagcatatttaactactaatgtgaactataaatctcaaagggagagatgttacctacagtcataggaccctctgattcacagagtaggccatggagatgggaaatgctaagctaaatgcttcttagctcagcttcccaccctggcatgactgattccttcagtcttctattagaactacacatctctccacagctatttttcatcaccagtcttctacctttccctttgaatttaatgctacctgatttcttacacgtccatggtctaatgcattttacctgctttcatggatattcacttaccatgtccaagcaagccacaagtactagacagtctatatccaatgcatagggtggtatctggcacatagcaggtactaaagctatactagctggcatcatttactctcagatcatgtgatccatcagatatctgacctgaacagccatgaaatgtaataggagcacaaagctctcccttgttagccagctccttccatggggaaaagactgtctcattaaccctgccttttattagtaggacaagcagcatgctagtctgcaacttggaagtgctcggtcagcatgtgctgagttgatgtaagcctgagaaaagcagagacagagacagagagcagcaggcacaatttttccaggcatctaagcataagtgagcatggataactttgtatcgtttagtgttggaacatgaaatgaaccaacttttggtctcttgatgctgaaaaaaaaaaaaaaaaaaaaaaacctacagtcttgggctctagcaaggaggtaattgtgaaacttcccaggaaacttcttaccatgagcaattattttctggggaatgttgtcattgtacaacattgtacaacaggtaacttatggttttctaaatcctaagatagagtagtttagaggcttgggttgagagaaggcaggctcaagaacaggtgctttaactctccatccttctgcgtcccacgtcatccctttggagggaagtcctggtctccttgcccagtcctaggggactatcctcctctttaccttctcgatgttcagattgcaaggtcaactcaagcagtaatcaatagcacagaccaagcctagaggaaactttatttggcaatatcattactcctaagttctgaaaacgagtgtgctctcccctccttgtatctttaaaacaacaatgacttgtcgaaggaggagttagctagaacacttgaattggaattatggtcttacttctgtgtgtttgtatgttatctacatgctattggtgcacatgtgcctgtacacctgcagataggcatggtgtgtgctgtgcatgtggagctcagagactgttggtaacatgtgtattctctatgtcagtctccaccctattttttgagtcaagatctctccctgagcctggtactcatcaatttagctaggctgactggccagtgagctccaaggatcttatattcacaccttcatcactgagattacaagtgctcatggccatacctgactgtatttatgtttgtgtagctatttatttaacatgagtgctggaaattacaacttaggtcttcatgcttatgtgtaaatcactctattgaatgagaaatttccccaatcctgtaagcttgcttttggtgacacagaaatttaatgtgctgcctagatctttgagaaatcttttagtaatttagacacattgatgaaagtccactgccattaacaacaatttcttagcaatgggtacacctgctattttatttcaaatagcctcaaagataacctcccaccaagtccagtacctcctaaactttgatatgcatgagtattgctcaaggagacttgatagaatgtagctacaaatgccacagccctgagggaaactcctggacgatgctaaaacataaagaccacacgttaaatggcaaagtgttattcccataggcagtgaagaacaaggaaccaggaatctctatgcctttgtgaactagggattagagaaatcccatggcagcctaaagggtctgagttaaagacaggaaaaattatggccataaagtacaattggaggcagttatggaggaagcttgtacataatcaggcacaagatgggcctccaagtgtttgggttgttgttgtggtaattagtctaaacactatttccagggtccagattcatctagttagtctctggccattgatccgatgacctcactaatagctcagtctccatctgtatttgctgcacagattcaatagcaatatagatgtctatatttaattcaattaaaaataaagtttcagaaaatggccctgatttgcatccctaatttctattcaactttcccattttaggacacagtgttgactgtgaggacgaagatgcttgccaacccagtcccattttagtgacagcagattctggatacttatgtctcctatcgctgtacaatatggcctaataaagtcgagccaaagagactagatttcatttcagagcaaagggtttggtcgtaaagttttgctttctggctgaacagagccattgctgcctcaagcataaattgagctggttttaggcatcagggtgattgggaagccaaatgggttatttgtgagccaggtatcaaaggcagagttgctggtttattgtatacgcattgttatctggacaatctcttgccagttagagaatattttcacaggaagttagaagtgactactatgcagcttcctagagcgggtttccagccacatcacaaagccatctgattcagagagtggaagtggcattatacaaattactgagatatttagctaggcttagcaattttcttttgggagcaggatagccacaattctgagtacccactggttggagtaatagaagcaggacgtagctaagcctgggaaaacgctggctttgaatcccagcctcgttgaccctcagccaaacagcataaccttgcttacctgaaaaatgaggtagcactaatgcttgcttctatgaagatagttcaaacgaggtgatacatatagaaccacagggcctggcaaatgcatgtggaatagtcatactgtgtcatttattgagtgtcactttatagatgttctataaatgtcagtggccactgcgggtgatgagtaatagtaatgacagtgatactggtagtgataggattatgaagatgtttctagtgttcaaatgaatgtaagccagtgagatgctgggcctatgattcataactttccattacttagctgctgctaggaatggctggaatagcactgatcattgactctggattaaagagaaacacattagaactctgcagaggtacttccaattctccatagatgttcctaatcaccctgagcacaaatgatgttgaaaagggagttagaaaaagatgaaagtctcccaaaacaggagacagtgtgtgcacagtcctactaagatgatgaagatggcctaacctagccttctctgctatgaacattaactagggaaggccaacctaggcgtccaaaggaaacctggacctaacaagtccttgatggccagaatgaaatagaatgaatctgggcttagttatgatgcttgcccttattctcaataggtgcttcctctgctccatttttgtctctcatttctctatacagaggccttaacctttacatctagctttttttcctggactcatgttgaactgaaacccagcaactcttcacctcacatgactggaatgctaataaatcagcaaattcccaaacactgtgggtatgggtatgtccctgtgtatgtatgttgcacatgtatgtatgtatgtatgtatgtatgtatgtatgcttgtatgtagataggttggtaggtactcataaatgtgtgtacatgcatgtatacacaaggggataaccttggacattgttactcagatgctacctacattttttttgagacatggtctctcattggcttggatctcaccaagcatctagactggctggccaccaagccccaatgtctccacttcccccagagatgtggttgcaaaacatgtgctagcatgtgcctacccccacacccactccttccacatatatactgcctgcaaatatgtctttgtactgtgagtgtgcagtgcccaagaaagctagaagagggcattggacctccaggactggagttacagacagttttgagccatcatgcagatgctgggttttgaacccaggtcctctggaagagcaatcagtgctctgaaatgctgagccatcactctagcttccaggttccttttatacttgattctagggattagaaccaggtactcatcgctttaactatagcctgcgtctgcaaacactattattttattaaatgcatgactggctgcactttgaggagaggctaaatactacgtaaagttaaaaataaatgaaatttcaaaaccaactctggttttgcaacttcagcctctcctgttcaggtaagtcaatattggacttgctttgccttctcttctcagctaaggtttgcagggtagccaactcgagactcctagaaagcaagggagaacatatctattgctacatgccccttggagaaagaagactcaaccctcccaccctagtttacttccatctaaccacaaatgatatgcctcctaagaaacttctgaggagtatatttttctccccccttgtgtcatttctagagggttttagcccatgttacagtttaatatgcctagaaaactgccatactggcctccttcctgcagttggcattccatgagatgatagggagagctcatgatgatccttatggcaagaagggttggttttatccccaagactcactggactcatgagcaagttcaagtggatactgcactccagtgatggggtagggagttggcgatcacacctatctctctgactcttggggaagtggctcattccaacatattcctactttccctgtatgttgaactgaacatacagcagctgcacctgctggataggttcttattaacatggaggaaaggacactcagcaaatctccactggttcagagacctggaggaaggccaacagacacgccttgtttttaccaaattaatacacagattaatacacatgaacccttgaggaggttgggggctgacagaaacgttaagggatttgaagaactggaaccttttaggctgatgagccatgctactggctgagaagatgcactcaatcagaaaattcttcaagtctgtttcttcccacaaagagtttaaggaacctcactcaataccagtcagctacaaaaatggtggcaacataagattgtaaacattataggtagagatgtttcatgctaccttgcagcatagttagctatcaggttttgtttgttatcttctctcagcagtgactcaacactaaccttaatctttagtctcattgcaaggtcaagtctaaacagggcttgccgctacctgctcccaagaaggacagagtttatggaccagtcattaagagtttttatgtattgttaattttccactaaccttaagcttctccttttattttgctgggcaggtaaagattagaaacagaacaaggctctcaaaacctcacaggaaaaaaatcacatcctaaactggtctggccacctttcccaccttgcctatctgcttgaccagtgtacaacatccaaaaggcccacactccacaagttcataggaaggcagtgggctatggcttggataccaacctgatctatagatagatagatagatagatagatagatagatagatagatgcatagaaaaacagatatataagcactgagacccatggatgatccgtttcaatcacagttaggctggatacctaattccattctgaaagaggtaccaagcctcttcctttgcttaggtctttccttgctaatctaatatagggaaaaggaaaatacccatatgtaatggaactggccttcttattggcaaataaatgttatctgaataaggagagaaaagcactaaacccctaaggaaatgaaaacaaaaggaaatgaaaaggagtggacccattgtcctaaagacaaatgcaacaaacatggaagctaagaatacgcacagacttgtgcacagtaccagttgatggtgtgaaatatcaccctggtcttatgttaatgaactcctagatccctgctgttgaggatgttttggaaggttgtcagaacattgagctgtgaagaggtatgtcagtggtagtctgtaccctcagggtttgaattgccttcagatcagcccagaggattccagggaagccatggtaaacacatcattggcttggtggtatttcctactatagtcttattccttagcctccttgctcttatgtgctgttcagagtcttgacatagctgcttaaagcattctgtccagaacttattgtcacatttagttcaggtacactgtgttccctagatttcacccaaaactaggaactcgcctggctctttacgaactgttcttgcttgccctgcacatgtaaaacaaagagaactttgcctctttgcattaccatctagcatgtcaataatcattcttttggaggaacccttgaattcatccatgctttgccattggctatagacatcaaaacttgacaagcttcttctggacaagtgtcaacaagatagttcctggtagaaccctgtgagatggctattttaactgcaaacccatttggatgagtacgagaaatgttgagacatcagtaaaaaggtgttgaggtcaatttaagtatccatacagcatcttgaaaaatgacactccataaaatctttcaactggggaattgtttgtttgtttgtttgtttgtagtttttaccattaactaccacatatatttcatgacaacatgagcaatgcaatccccttggttggtgtttcaagttcacagagatactgttgtcctatcatgaggactgaagtctgtatacaataggagataggaagtggatggaattaattgcttgagttagaaatactactttttatttttttccatatccttatagacaggttggttttacctctttgagaaggaccatgcctctgtgcccactgaatctgctaaataagagggaggtcttagtagtcactctgcatgctgccccccccccatcactgtaaccaaatacccaatagaaacaaactaagagaggtttggcttatggtttctggggttcaacccttatttgcttggttctgtgtgtacagataggactcaatagtggaagaaacatactatggagaagttcactgcatagctgacaaggaagcagatgatacaacaggaattagctatggaacataccctcccaagcaccccccctccccaggcagggtttctatatataactctggctatcctggaactcactctgtagaccaggctggccttgaactcagaaatccacctgtctctgcctcccaagcactgggattaaaggcgtgcgccaccactgcctggctcctcccaagcttatcaagctttgatattcccagcctctagccaaaggtggataagtaaaagggttcctccaaagagaatgattattgtcacactacaataggtagtattgatggcaatgcaaaagaggcaatgttctctttgttttagaaaaatcacaaaaccaacagtgcatttgccattgcttcccctgatagcctctagtctgatctcaagtcaattcgatatctgaaagtagctacaatactgtggacagagaaagctctagaagtattcatgctggctctgggaacagaaaagggaatgatttatacttgaaaagaatggggtaaatgagaatggtttgttcattctttccagctacttctttttctgtcctgagcccaggacacccaaagggaacagtagcaggtgtgacaatgtgaaccagaagaaggttaaaggaggtaggagagtctgtcatgggaccttggtcccaggaaagagaatgtcaagccctgttgctttttgtctctctctttctactaggcaaccccaaatacagccatggatgtagaaagtctacaacaaagtgaaatatccaaaaaatttcattttttcctggctagagcatcaagaaaggactgatggaatcaaataccattgcagagatcaaagagaaggatcttgagaaaacagcctcatagaacaatttatgaactcccaggttcaccctaccttgtgtctaggaagaacctactcttcacagcggatactgactttgagaattaaaccatcattcagcctgaggctgatacaggactaattcaaacagaatatctaagactttaaagagaaaaactggaattcacaatgcaaagaagtctaggaagcatgagcagcctaaatcaacctcaactagacgctaagactttaaaagatccagtcatgtctggatctttgcttgcattcacagatgtgcatgcacacacattaatgaatgaataaatgaacaagcaaacaaataaatgttaataaagaatcaaatggaaaatttagaattgaaaaacattgtcactaaatattaaatagattcaacagaatgaagatagaggaaagaatcaattaatttaaatactaaaaacttaaactgtgtgatttgggcaatagaaaaagtatataaaaaattcaaacagaaaaaaaaggcatttaaaaaattcatctagaaagtttgagtcttatggaagaaagaaaggaagaaggaataaaaggaaaagaaaaaaaaggaaaagaaaagaaaaaagaggaaaagaaaaaaagaaagaaaacaaaagattcctcattcatggcctgggtatcctaggagaacagagtggtggggtggtacaggaaagaacacaactaaaacccagtttcaccaaaagacaaagctaacatttcagctgtcgcagtaaactccagcaggatggacccagaagaacaatgccaacccaagctccttagaaagacaacagaaacctggagaaaagaagcagaccccctcccctaatgggatccagagaaagctacctgaaggtgctaacatggattcagaggagaaagggttttctcatgacaaagaaagcaagaacgggtttttaaaaggttagaagagaagaactgttatcccagaattctatctccacaaaaaatgttgtccagaatgaggctgacctaatcccctctcaggccaaggaggacagtgctggcttccaggaaaggctccaagggaactcactgtcaaagctggcaggacagaaataacaggagagtcgggccaccagcagaattcagaaacacagagcataagcattggcatgaatacaaacggctgcatttgaccatataacatcaccaagtatgtaacatgtagcacagtacagcaccatctttctttctccctttaggagatcataaggggtcagactgataaagcttttatattacatgtgactaggtaaatgttaatagcctaggttagctagagaaacaccacagataaaatacagcactaatattctagaataaaagcagacactaataattgcagggctcatctatataatgaagacataagatgggtaatgtttatgtgcacaaatattgaaagtgggtatacagcctcacgtttataaactgcattaaccaatcaattaatgaaataactttcaagacagtgtccaaataacctcaaataaaagagtagagaagaacatgaagacacagtaatcaatcataatgcaatcaataaaatagtgagaacaaatccaaataaattgatttttctaagtcataataaaacagattaatacaacccatggattaacaaaaattcatagagtagacttttaaaactgacctacctatgggagggtataaaaggaaataacttagaatttaatgacatcgttgcattcaaatgagaccaaaagggaacagctatgcatttgaggggtaagggaatacttcagcagagggggtagacattttcttaacaaaacactgcaaataaaaggtttagaacctatagaaacaaatatctgaagtagtcttcaaaacaaaattaacaagaataaatggagatgaaatttcctcaggaagcagtaagtccatcaatagtagaaatgttcccagattaagtacccctagtccaaagaactccaacgtgctccaaattctgaaaaatttgtaccactgacatgacatcccaaggaaaaaaaaaaagaaaaccttcctccctgaaactctttcatgtgcagaatcctttgagaactgtatgcctttggggcatatgtgtaaaatacatagtgaatgtaagtgaattccgtggtgtggtttgaatcttaccaccaagatagctcagtatgcctatacaaatattcgaaaatctggaaaaaatgtgggcgggctcttctgactccacagtggaaatgaagcaacacacttttaaatgaaccatggcccaaactatagtaggctgagtccgtatctgtattagttttctcatggctgggacaaaaatcctggctaagacaacttttaaaagaagacattgacttgggctcacagtttgaggggatataaattgtataggcactcagagtaatggtttggcagtttcttttacagttaaacagaaatttgtccttataaaacagcaatcctacttctatgtatttattcacacaagcttccatacacatatttattacaacttttattgacccctcccaccaccacactcaagaaactagaagcagctaattgctgtgcctgtttcatgaatgaactgatgaacaaattttggtacagccataaaaatgccatatcatccagtagtcagaaggaatggagtcttgatatctgcaacaacatagggggagctttacaaaaaaaaaaaaaaaaaaaagactctgaaagaaaagaagcttattgctagtagttccataagactcaccagaaaacatggaactatagtgaaagagaatggagcccagaccctcagagggcttagagggaatgtagggcttggaaactattctttattctatagtgaggtgatatatggccctacgcgtatgtgttaaaatatgtggcactggatgtggatgggaacagtcattcttgaaccttcctgggaccacaacttaaggattaagaacagccagagaaatgctggatttagcaagcagatttttatttatttcacagctttaccctctacaccgcaaattgtttgagtcacttgaattcattttttctatgatcacaagaggttggagaggattaaggttggatgtatattttcttctagaaaatactctttttgcttttgttacactacttagccctctggctctggcttccccttctctgacatcttcaatgtgctggaaacctcctctactgcactctgatgccctcaccctccctttagatggtcaagactgggctatttaatcttcctttcacctcaccctctaaaaaagcatattaccaaactccttctgtatttggttaaagcacttgacttaagcagaaaatcatttgatatgagaaggtgtcataatctcagaaaacatacattcctgggtcattttcacactaaggatcacatagaaaagggggaagaacaggagtttcctaccttattttgaagttgtatttatgtgtgtatgtgtgtgggtgcatgcatgccagcctgtacatacacatccaagtgtagtgcccacagagggtatctgataccctgatactggaggtacagacaagttctgagctgcctcatataggtgctagaaactgaatccacgtcctctgtaagagcagcatgttctcttaaatgctatactgtctctctggcttggaaaactatttcagtttttatactgcaatactttgaccaagttgatagaaaatctagggtactacctttgcaaagattacaaagtaggttctgtttttagaagctattgatatcaatgtatatgaaagtttgaagtgtttgaagttgagaaagcagtatataccagtagatagagccatgagctagcatcgtgtggtaaactggctctaccaatccccaaccacctggacaggccaaaataagaatctttagtaacttcttgctctcaaagaatgacagatgccattcattttgttttggtcagagatcgtagcttctttgcccttatgaaaatttccaggtgcattaaaaaaagcatacttattctctggtcaaataaaaattaatttcaataaaaatgtttgccttgcctagagggatggcttgctcagagtttaaaagcactcgatgctcttgcaaagggccatttctagcacccatattgggaagttcacaactacttgtaaggccaactccaggagatctaataccctcctttgtctaactagcctctgcaggcactgtatgcatgtagttaaaaacacagaccatcagatgcacacacaaacatatttaaaaaccaaaaaagaaagaaaatagataattaaagaaaaaaatgtaaaacttacaaccccaaaagggctatgaaaactgagcggattcacataatctaaagtccaagacaaaatacccatcatattgattcaatggcaactcctgggtctgtactcctgcaagcagagtagttgccggaaagtttgaaactcttcctcactgctttgcatggtatggctgtactactaagcagcagagttaagtgaatctgaagttatattctgtgtttcttgcttgaattattacagtgatgtggaaggaggaggaggagaaagaacaggaagaggaggagaggaggaggcagctggaagaacatggaagccaggtgaagcctgtggtgtctaggtgcacataggaacatatgcaatctgttaatagtttctgaaaaggcccagtttaatatcaacaggcttgatcaaggagacagtcttcatttcatatcagtgacaacatcctggcagatgataggggccagagagagccacagtttctcctgggttgtcacattaagtcttgactgttgtggcttttgtggctccacactctctgagcatggactcagtgtgtgttatgtaatctttctgccctgccttcccctttgttccgtcgatgccaagagctaaataaaagaatccatatgcgattacagctataaaaccaaaaggaaaatattagatgaaaatataacattttggggtttctaagtttgttttacctttaatgctaggcagacagtttacacaaatcattttgctgcaaagtaaagagtaatgagttaaatgtgttccctgtcaccatcaatcatgtaggtttgcctttgactgaccgagcacataagacacatgaaataactttctaatcgtgttagagggagggggtagaggaagatggagagcgagctgaatcttcttgattttattcagaagttccagtgacattttctggcaatcttcttacatgctgcacggccttctctttgctaataatgtttgccttgagaatttgtaaaggtctgagaactctttaattcaatgttctagaaattaccaaggccataggggaatggaatccctgttaatagctcatggcttccttctctctttacttgaaatagtttgcatggaagctattcaactttaagttgggtatgagagatcgtgggcagagatggtgatgctggagggggcaacatcttgtggcgaggcctctgatctagagagactaaagtaggaaggaaaagaaaaaaggatacatgatggtgttggcccaaatgggatactgagatttagtaaatgtactgcaatttcagggtgtttattttgatttgtgaatttaaacaacacagtgactatattttctggcagtcaagatggtttctaaccaaatctaagcagcttctttgcaagccttgccaagattagaaagctttgcatctcaagcttctacgctgagaggaagctctttaattgggccaatgaaccacatacagtagcagaggaagacatttcagaacccaaatcataccaaattgtaagtccctgttagtctgggccccacacccagctatctaaaacacagactggctaggctaagctgaaatccattcattcattcattcattcattcattcatccatccatacatccatacattcatacatcaatgcattcaagatgtatttacaaaggtccctgcaagtagctctggcttcccagtacctccatttaatgaaggaaaagagaaataaacaagaaaaaataccatcttggaagagttgacaaatggacaaagccaagagaatgaaggagacctgtgtgtatggattgtacgggccagagtgatggaaattttttaaattaaattctactatgttaccacatggaaatcttattaccctagggagagaagaatatctacatctttcctagagaacagagagacatgagatatctgctctctaagaagccagcagagccccagaaaatgttctagacttagtttcttcttgattgtcctacaatttcccagagaagcaattgaattatcaattgccccttaatagatagtgtcctgttggggatgctggcacatcctgtaatcttagcactcagaaagtagaagcagaagatcatgagttttaggctatactaacctaaattatatagtaagaccctatctcaaaaacagacagacagacagatagacagacaacaacaaaagagagagagagagagagacagagacagagacagagacagagacagagacagagagagggagaaggagggaaggagggaaagagggaagaaaggaaggaaggaaggaaggaaggaaggaaggaaggaaggaaggaaggaaggaaggaaaaagaaaggaaaaagaaaaccacacaggcatggcagatggcctatatgtacaaggtcttaggttaagagccaaagtacagagttgaagagatggcccactgactgactgctcttcctgagttcaattcccagaaaccacatagtggtgactcacaaccatctttaatgagatcagattccctcttctggtgtgtttagagagagaaataggtactcatatacataaaataacccttaaaaaaaaagatccaaagtaccaaaaagaaaaaaagaggtgatatacaaactttatagataagaggagtttaatattgtggaatgtaaaatttccaaagatgattcagaaaccatgccaattctctgacttagaaaataagtaaggatttttatggtaccaataatgttctatttcttaatttgtaccatggatacatgggagtgttgtgatgatgattaatgtttaacaaattaaacatttattataaatgcccttttctgtttgtgtattataaataaaagtttgtttataaccctttcataaaaaaacaatctgatgtttttaaagatagccttgctgaaagttgttattttgagcaaaggcagaagggtttggtagaaatcaaacatctacttataagaagaacattctagatagagggaacccagcaagtataaatcctaacacaataaagggaatgtgagggacacaaggtacaggacagtgcttggtacactggggtcaacgagatcacaggaacctgactgcttagtacctggtagccaaactttggttttgagccaattggatgatgtcgtagatttatgcaaaaggttgacatgatctcattcatgtttgggaacattgtttgtgaaaacaagctaaatctagacttgagaatcaagaaggctggtagccacagaaaacatggtggttctttggatctatcagtaggaatgaaattggtggcaagtactcagactcttcacctacttccaggtccaatcagggtgccagggtgaattgaatatggtatttgaggaaggttgggatggggagccaaagataaccctaaaggatagtattgggaaggatggcattaccagttgtggatggtgacttgggacagggcaggctcacaggcaagaacagggactagcttctggaaatgccaaatctgagaggagatatagcattcaaatgggaatgctgcatgacagttgcaccaatattgctgagttgtggttggaggcataaatctgtgagcatatctgtctatttaaatgatattaaaatattagatattcccaaagaagcaagagtaactccattggtaactgtgatgacatcccattcttatgaagccacttttactttgactggcatcacccatgggtagcagagccaacaacatttatttatcatgatcgatcgtctctgcaggtttcagttccaagacaaagaagtctttaccattgtctccttgatgccttatcagttgcaactctggtctgactagagatcctgacagtccccacactcccacaagaggatgagcatgctgacctagaaatgggctgtcaaatttatgcccaacaagaaataagagtaggttggtgtgatagatagttttgttaacttgactgggtcataatgttcccagatatttgattattgttctaaacaaagctttgaaggtatttctggatgcaattaatatttttgaggtatcagaataagggagattatgttccttctgtgggtgggtcatatccagaccatcagaagcggtaatgaaacacaaactaggagtcattagaaatctgttctctctgccttaactaggactgaaatctatactcagtcgcctttttctcagggattcaaacttatcgacaccatccctgtggctctccagcagctcagtgcaggcattgtaagaaagcttccatgccaagtgaatcaacctgttctaatctaatcccttgattacagacagagagatgatagaggcatgcagtgattaatgatgggtacacatctgaagaagtctctagtgggaaatttcatcatgcaaacatcaaagtatgtatgtattcaaaccataagaagaatagacatcactacatgatatgggactcctaccatataggtagtctgccagtgattgaaataccattatatgacacatgattacatgtacatatgtacacattcacacatcacatacagagttggtttggtttttccagatagccctactccttaatccagtcctcctgagagcccaggtcattcttgatcttgtcacagtctaacctaagtgaacttctcacctgtctgatgcaatgactctgacccttacagatctagccagagagaaaggtaaacaagacttattggcaagagcatgtaaatatgtgtccatacatttcccatcagaatagaagcttcctgaatcttactagtgattccaagccataagctgtgtgttgcgggaaatacagttgggatatatgtgcctctggaatctctagtgaatcaatggtttccataaaatgaagccaagaaactaaagctacatagtaaggtggctttacttgctaaggaatcatctcatcctttatttcattttggtggccttggggacaaatttgggagtgatatctagggtttgtcaattctaagctacctgactgttccttttatactgcatactgtctgccactataaagtgacgctagtgacagtgccatgtatatgtagggcactagaagagtaaaaataatatagacacaatattaatttcaaggctttaaaagtagatagaaatcagtatatttggacaattattcaaaggtctttatattttcagctcttaaaacagattatttttaaacacaaacttgtacaaacacaaagcagcgcatacatataacccaaactaaagatactaaaatgattcactttagtcgggcatggctgtgataaaatatcatgatcaagacaactaataaaagggagcatttatttggtttacattgtcagagggaaagtccattacggtggagaggcatggcaaccatggcaaccagagctggaagctgagagatcacatcttaaactgtgaccatggaacagagttggcaaatcagaaggagccgagtctacgaactctcaaagcccattccccagtgccatacttcctctagcatggcggcatctcaaatagtgtcaccaactggggaccaagtgttcaactatccaagcacatagaggacatattctcatttaagccaccacactaacattacatattttctccattctcaccattggcttcctgacaaagaatttgcaaattacatgcaatgctacatggtgtactctctcactcgtgtgtgtgtgtgtgtgtgtgtgtgtgtgtgtgtgtgtgtgtgtaaaatgaaaaaaaaaaatcagcatagtttgtttcttccagtaagaataatagctcaattcataaaatggaaggtcaaggcccatcatgaaactcttcaggcagaagaggaagttaaaactgaacagactaaaaacaacaaccccctcccccaaatcagtgctctcaatgtgtggcctacgtattgagggctaaggtgatggcagacaggctaaacaagtctattgtcctggtctttccagaagacattaaggagactctccctgaaatccgagaggccagtgaaaggagatcagagagtagggagtaaacaggatgtcccaggccaggagataagtcacaggcaccagaacatctgctggctctgagtaatggacatcaagggtgacaataaatttgtgctggaaaaaaaaaatgtgcttagcttgccttgcaaacagccacagagctatagaacccctgggtaccaacttaggcctctttcagaaaagtattggatgtgtagttagtatggatttataaatgccagcgcatcctaacagtaggggaaacacactgatgcataaatggactggattaaggattaacagccatgaggggggaaacaaaaagccaaaaatgtctacagtaataaccaaagccatagaatccatcgctcctaaaaaggtaaattccaaactattcaggtcaattcagaggtgacatatctaaatgaggacgaggttttagaaggtaatgggttatggggcccctaggttcaggtccttgagagtgactggtacagggaaaagcaattattcacatgtatttttttctcatcttcaatctaggccctgtttgtgtatcctatattccagtcgtatccctttcttctgctaaaccttactatctttagttttggtcttggacttttggtcccatacataataacaggctcctatgataactgcggcgcttctgcctgtgacacttctacatggttagagtcttgtttatcttactcctttagcagaagcaaagtataatatttcctgtagaactaggaaacaaacacaacctgcccagagcaagggagaaggcgaatccacatctccctttggcttctagaaactctaagtggtcccaaaggataaagtgctgccaaaaccgggtcgtgtggaagtgttgaggagttctctaccacaggatgtgggggtattggggaaggaagtgatttctgtaaacaagaatccatttacatattctcttctccacctacactcatcccaaacaaaaacatgcaaacgctttgcaataatatagaaaacacacgaaggagtatgattttccccaggtcctcgggtggttctaggactgagggagaggcatacacacatgacaacagagaatggtgaatgcatcaaataagactggccctactccaaatgttaaaatataggaaaggaaggcatgttattgtaggctatgcctttggcaaagtctaacgaaagaccacctccatgtcaaaaggtcatatccaaaaagctgcctccaaacatggaagagctggccctggacagaaataatgcagtcatgtaaccctgggaggcaaatgtgtttccacttataccagggcccagttcagcctctcccacaggctcttcctaaatagtaacttggcaatgggattagcggagctggaaggaacgtccttggctttagaggtgaggcctgtcagggtcctgaggaaagtcaggcagaagttgtccctgctggtaataacactgtagaatcagtgtcatatccattttattaattttcttgacaggcagatctagttaccatgcaggcaccacaaaatcaaaacatacgcatgtcaagtggccccatctgtggtggggctctgccaaggcccatgtcacatcaacacaaggaaggcagaatccagtccctctgaccatgtgctgggtcctgtgagcaaacctctgctggaagaaaaccaccagggctccacagaaagagccagcgcggttctcctggtgacagttcgttatcctaggtctggcctccttggattgaacagacaagtcctgggagacacatggctacatctggctttggtgtcccatcgctaaacacagccacacagacctccctgtgactcccatttcgcctgcattcagtttcatctatgcaggacacaaagagactggattaaagaagacatctagaggcacgcagtaactttatttgtaactgcgtttgaacttgaagttctgttgagctgaggactatgggcacggagtaagcatgagagaatgtattttcaatcaagttgtcgttcactatgaacgctgctacaaagatgacaagcagggtccaacaggagttattctctaagtcatactatgagaactacagtgccaattactattggttaagcaatgccaatggcattgatacaaaagtaaagatctaacagtcacattctagctctaagtaacacaattcaccaatgtagtatgccaccttgactgcctaaacccacactccagaaaatttgcttggtcaggtacctagatgcagaggcactcaaggccctgggtcctagagaactggataggttcattctcttccccctactagttggtccagcagccatctggagactgggagtggctgcccagagagctctgacatggagatgaacacatccagactgcacgtctcttggggtaaagactcagttcatcttttctttctccattcaaatagccacggcatgtcagccttactggcctccttgattgtgcagaagtaaataaatgaattatgttgttggggtttgggcttcggcacaaacacatggtctgcatttatccacacagtgagaggtccaccagccacttgatataaaagaggaaaatgataattcttttctttaggcactctggtgccatatggaatgtatataaatcatatttttgttttaacagcggaggctttgttgatagataaacatgtggtttatctaaaaaaaaagagagagagagagaggattgtgctttgaacaatcatttaatggccacggatgtgccaaataaaaataaaaacataattttgaaaggagctggcctctttcccaaatctgtaacaaggaatttcttctcaaccagagaagttaaagcccgtcgttctgttttgagtttaagctgtgctgtactcaaccccacgacaaatggaatcctaggctaatgtgctctaataagacaagacgttacctttatgaatgacctcatagagaagagattggcaagcattgtggagaggccttgagccagacagctctgggctatgaaacccaacttgagctctgcaaggcatattgcgtcatcaccctctttccagttccagctggggatgttgagcagatgggcctgtgggaataacaagaggtatgagaccctgttctgctccatgtctgagtgtctgaaatctcttcttggaattgctgcatagtccaaaaacaccgggtcatccaaacttttcctttcttccctcttcctgggtctaaggactgttctattcttctggttcatcagacttgggcttcttggcaacattgcttctacactcaccaggcccacatcctcctctcaagtttgctgtttagccagattcaccccagaggggatttttctcttgtgagacacaccagcccccagcattaagaagtcaagttagcttgtttttaaagtggctctcaagtatctcagattgccagatgcctgtgtgtctgtgtgctcttgcatttttttcctgccttctcaataatctagattagggatgtcccaaacttgagtgggtttctgcataccctgcaatgtgtacaaaaactacaggttgctagcccccaccatcctaagtttctaactgagtagatctggggtagagttggagaacctgtacctctacatgtgagaggaaatgctgcttccctggaggccactgtgcagcaaagataaagacatcctacaatctctctcagatggactctcttatggcaaaattaggtcagagcccaactcccaggccctgaggtgtgctcacacaattatttgccagtggcatgcagtggagagttgtacatggcagagtgagggaaaaaactgaaattcgggaagttctctagtgtttggggatttacaaataacaataataagagaagagagttagaagatctagatgtcagggtcaacacttacattcaaaaatattgactatataggtttgaaacaagaagatggatctaagagagtgtatgagagagagagagagagagagagagagagagagagagagagagagagagagagagaaggagagagcagggcgcagcagttaagtgtatagttaactcaaacctctattagaggccatgggatacaagacacagaaagccaaagcttgcttgttatagtctccagagcaaagggaaacgactctttattctataagaataggccatgttcattccacaggatttgatccagttttaacagtcaaacttgaagagcaaagtgaccaattgaataatggccagagagcaatgaggaggacaagaggagataagtgttctggaaaagatctcttgagaaacagtaaaacaatccagaaatgctcaagatacagagggacatccttggggacataggctggtcatcacatctggatgcctcaagtcctgctatgtcatgattagcttcacatctaggactttcctgatatatattaaaaggaagcaaaggggtttggcttgtctgacaaaggaactttctatggatgaaatatgtctaataaatagagaatactactttatggctaagacttagcatttttccaaaatgctataataaatcatgctttacagaagaagttgacccagagtctttctaagtacctgtataatccaggagtctatagctctgaaattatttctccccacatagcagcaaactggagcagcaaaagagtctttccttcacttttggaacaacagaagccagttgcaataaaaggatgaatgactacattgcagaaacaaagagcagagcccagacctctttgctctgcttggagaaaccccagtcttatgaaatgcctgcttgcaaaatccacctctgtgacagtctccaaaccaagccagcagtggtcactgatggaagaatgactgcttgttccctaacccgagtaaaatcggcctgtgtgtgggccagagagagtgtgatttgtgtggagctgagtaccagagggtcttctgcatatcacacactgaatgtcaacagatagccccaccctctctctcattactttccctattcttccctggcttacgacgtcagctttttcattttacttccttggcatagtataaaagacattcatctatgtggagaatactcttatgagaagaatgatcaattacatccaagtaataaacaagagatttgggtggtctggtctctacaaagacaccacatagcctccatgccattttcaaagaaactatgacaaccttgaacacagtctgtcctatccccatgccttccaaaatatgtagttctgacatgtaagccgtgggtcccttatgtcccttgggtcccttgggccccatgtggaaagtcatactcattataagcttcttatgtctcctctcattgccattgtattttctccagtcatgcggtggcagggagcagggatgaagtgccaatgaccaagagggaaggctatgtgcgggaagccaagagtggatattgacccaggaactctaatttttttgtttttggaaacttcatcctcttttatttgagggaaattggctctggtaaaaaaaaaaaaaccctcagcatttctacccaggaatccagaggcaaattctttctagcttggcaaagagaaaaattaggtccaacattaaccacaccctcactccatttatgctggcggatcatcctccatttcatggagaagagctatgaaaatgtgctgcttcaggaaggcagaagaaatgaattctggtcacatttctctctcttgctatatattcagccttggagaaatactgtgaaaaatgacaaagtctaaggatggaacagcaacagtactctgtattctgcatctcccgtcaatgtccactaagagcttcatccctggggtgatactctcttaggagcaagtggagcctttgggaggtagaatttaataaaaactctttgggtcattgagagcattgccttgtaagaggctaacagggcaccaatcagccctatctgtttggtctgatggataggaatcaatccagtgctttctatcaatctctcccagaatggtgagttgcctcatcacaagcataactaaacaaggccaacccatcaaggcccacagcctccaaaagttttatggcatacatttggaagagtgacagaaagttgcccatgaagatttgtgctaccaatctgacagaatctggaatcatccaggagacaggcttccggccatggctgtgaaggattatctttattctattaattaaggttggaacccccacccactgtgggtggtgccattccctggctggaatcctggtctgtataagtggataatgggatctgatctgtgtaatatgacatgaccagctacttcacactctcggtagtttgacttccccactatgatagatggagccttgagctgtgagctgaaacgaaacccaccttcatgaagggacttttgtcagagtgtttcaccacagatacaggaaagttacaaaggaactggttaacacggctgtgtcccaaatgccatcataggcaacaaggatgctcaaagaactagcatctgtactggggcttagtttccaaatcagagacaagagcctctttgattagagtgctttgggggaaatgagagctgcatgaacaggtgagtttttagaatgagcacctttaccagcgtcacatcaccatcccgtgtctggagagctctgaaccatgtacctcttccctccgcactcagagatgcccagggtttgaaagttctctctgtgaaatttagccactgtaaagagatccattttggagaatactatccttcccccaggaacccaagtttagttctgtgggctactgtcccattcacatagaaggtagcagttggctatactgtcctagcctgctggctgctgagtgaccttgatttgtgcttaccagagttgataggcctagaatagagctttgactcctgctagtctgaagttacactgggatgctaaaatgcacagatggcccaatgaggactaaatgagataatggatgtcaaagctcttttaaaaccataaaacaggactcaaatgtctgcaattgttatgatgacaaactcaaggccagcagtttccctgcatccctctgggctctagaatatcaccctcattacatcacagggatttgacagtgtttttatttcaagccttgtgtctaactgtgggagcaattacaccctccagaatatactcctggtggcatagttttcacacacacacacacacacacacacacacacacacacacacacacaccaggtctttcccaagcacgtgtataaatgggtggcattctatgtgtttctcagatgggcacagagaaaaggccacaagaagaaaaagttgaaaaagaagaagagtgtgtgggaaaggtgggtgggaggcccttaggaaaattcaaagtaatgaagcgggggggaagaactatctactcaaaaatctaagaatgatctgaaaaataaaggcaagaggaattctccctttaaaagggagatgcagaaagagagaaaactgccctgtctcgaagttactctattcccatatcctcactaatctaacagtgctctgaaaatgaccttacctgaccagagacctaagtagagtggggtggttctaaatgagatgccttttaaggaaatactcctgggtctgttgatgtctgcatcacagtatctaaatggatggattggagattctgtccaagatatttgggcggctgtagtcatgtgaataccgaccaggtaccatctggctctgaggctagtcatgttgcttccagtttgacaagaactacacagctgaaatactccttaatttcttgaagatgctacatcagcacacgttggaaagagaataaaaggaactgacatctctttctaaacatacaacattaattttcctattcagtctaaattcagccaaaaatctaaacaatcgcttaaagcactcccacactaaatgagatttcaagtcacaaatgaaagaaggagtgttccttgcagcaggagctgtcaccagtcacagcctcactaataaaatccacctccacctacagagacttcagtcaagaacttctccaggttgatgcctgtgaattactgagaactcctttatcctatccttgagttttcagggacaaacaggagattcaccttcagtgcccaccaccaaacccactggctggagagtaacagaatttccaatagagccacctgccgagggctgggcaatggtcggcactgggcagcagttccaagcagtgggccagttgctgacagcaggacccactcagcaatggcctctgatgggcctccacacagcaaaatgggccagcacttgccagcaattaagaaataatggaatggtgctggtggcatttggcagagtggggttttctctgggtcacctgatggcttgttttgcacagaatatggcctataagatggggcatgctgtcacacataaacctgcagggagttatttctgttcagtcaggacacctggccccaggtactgagaaacctccagtctctaagctccattaagaagacaactggtattgtatcaagtagaacaagacgccattttccttcctccaaagctgtctagagagctcaaccacaagccaggtgaaggagtgctgcctttggataagagaccttcacctctgatttagtgagaggaaactacaggacagcaatactaactctcatgttcatgttctttctaaccagctctcactagaagctgtaacactggggagattttttaagtataatctttggataaactactacctccctaagtataactggaaagattcccattgtgaatttgaggatgatgtcacattctgctttctctacccaacttatactatgttccttcatgtgtgcctggtcacacatagagaagtccttcgattctctggtaaagtctctacaccttccttgatcggtctctaaggacacaaaatcagatttttatcttcacagttagttatcctaccctttgagtagcaggaggagtgttaattatagagtaggtattcaatagctattgactgaatgactgcaggacatagaaacgcaagttgttggaatttaggtctggacaggatctaagaacatatcaatatttctgagccacagggttcaatgaaagaatgaattagcacaagagggcaacaaaggaacttcctcccaataacccaccacgaaaacaaagcaaagcaaagcaaaacaaaacaaaacaaaacaaaacaaaagcaaaacaaaagaaagcaaaacaaaacaaaaagcaagctgctttctctgaagagctatcctagggagatgggacattttaactatggcttttctgcctcagggcatgtgtatgtatgcacttatgtgagtatgtgtatgtgaggctgtgtggagagggagaaggtgtcgggacccaagctctggggatgccttcaggtctggaagagtctcagcacctaccttgttgtgatactgcagcatctgagtgatgatcctgatctttgggtggtagtttttgatggagatcactctgaaagagagagagagagagaaccagacctgaagcaggctctgtaacctggagtgtgatggaagattcagttaactaggtgactgcaactaaggtagcaaccagggccatccaggggactttgggtaccagcccagggagaaaagtgttctcctcactgtacctattagtagcataaaaaagaaatggcaaggcagtcactggcatatactccagagacttcaaataccagagttaggcaaaagtagtaatggaccctgtaaccataccacgtgatgatggaaatagatgatcaggactctaaggccagacttgacaagaaagagcaagttcaaagctagcctgggctccatgaaactctgccttaaaaacaaacacacaaacacaagggactcctgtgttgcctgggaaatggagttggagcttgaatggactggagatgggtgctgttgatgcttagagacaggtaatgcaagcctagaccttaagcctctggggatctacagtctcccagcacccagcttctggttaacaacttgagacaatgttgacaactcaaacaggccacctgacaaatggctctgattatcacaaatcctttggacattctcataatatgactttttaagcagttctcttggaatacgatcaaggactctgccttccacagcataatgctgacttgaccactggttcaagttaaccattagcaccctacagagatggtgatctggtgggaaatcccctcttgttgccctcagacctttactgagcctggatgaccccaccagccaaccttccctggcaccacttctcctgtcaatcacaccagcacagggaagatgtaaggagcccagaaatggaaacacctggtttccagcacagctattgtgctaatgaactgggtgaccctccggaaataccctggctctctgttcctgtcttctcatctggacatggggggcaacggtacctgcattgtttacttcacaggcttggtatgagggacaaatgtgaagccagatgttaaaatgctttgaaatcattaaaagccctctctccacgtgtaagttatggcttttgtcattaccaaccctgtcagaggtgacattgtacatttccttctgtgacaaggaaggctaaagaatgaaattccagtgaacggcccacctcctaagcctcatcaggaacgcaagcacaattatctcccccgcccccgcaaacttcccactgagctcagctcttcactttgccaccctttctgcaaaactggagtggggaacaaacaaggccaccagacagcagcctcatctaaggaaactgcagccaaagcagtcgggagacggtccccaagaaagcccctccctgcactgtgcactggaaggacttcctctcttatttttgagagagtgtgtcatattggcctctgtgtataactcaaggcttttgagcctatcagcctcttggagcagtccacagcgccaggcagctttctgcattagctcatttcaaatgcctctttgacattttaatttcaaaagcagcagattggtctcattaagctaaggaggaatatacaaataaaagaaaagctgagcccacgtttaaccctgaggttcccactcccttttgggtcttcctcctgattctccatagtggacagcttagttatgatcctgacccagtgagttctataccctgacatcccacaattccccctggtacccatgtgtgctcacatcaccccttcatgctcagggtttgaataaaatattccaattatgagcaatgcccatttcaaagtaactattcacttctatttctcaccataacagaagaaataaagtatatatgccaggaacttcactgtgaggtcaacaccatgagtttcatcttcctggtttgttagcaatatggaaagagatagagccttgtctcttgagggactacatttttatcactttaaataaaaagggggcggggaatatgtgtcaaagggtagaaatgccgcttggtccatttggaaaatgacaagggagacattctaaactgaagtggatttatgggatcactttctagggaggaccaggaaggagatgtactcctgtgtgaagtcccatgcaaaccaagtcattatacatggattttcttaaaacatgggaccaagcctactgcagaaggaatgggaatggaaagagagatgatgccggatggctccttccagacctaagacactgatgggaagacttgagcggagaggaattcctctgcctcatcgatgggacagtgcatgtaactggtggacactcggtaaagccaagaggaagttctcaggagcactgtaaagccccaagggcaacttctcaactctcaccttgaggtaaatccatgggtcccagagaagcaaactgcaagtagcctttggagcatgcctggtccaaaggatagctgttcactcttaagggagagttgctggggatatggtggaagtgaacgaactctttcccctggtccatgctctctccagagattctctttatcatcctcccctacctcaaaggactcttccataatttataccacagaaaaggcaaattctaaaaggatttttagctaatgagagaaaaatgtttggatttcttgtgtgtgtgtgtgtgtgtgtgtgtgtgattttatagatacaggatatgatgacaaatctatgggaagaataatagctaaagaaaacattttatctgaagtgagagtaacttaaggcattagagttggagttaaaattaagctctgagaggcccagcccatttgcagaacaggtacaaactagtggcggtctaggttgttttctccccagaccatggtctattaaaagaaaggagcaggaggaggaggaagaagaggaagatgaggagggggagacttcaatccaaataggattaagaaataatctatataattcagcatctcagaaattcatatgaatgttaaaaccactgcataacacacatctggggaatctgagacaagctaacgaaccaatagctttcagggcagtaatgatcaacttgatgcaaacacacgagggaagcactaatgaggattcctcagctatcagcactttgggtcagacagtcttctagataaggactgtgccatgcattatgggacacttggcagtatgactggtctctatacacagggttccagcaatcccctctgctagctgagtctagtgcaaagatctccacaggatgcaaaacacctgcttgaggtaagaccatcccaagtaaagatatcttaggtctaattcctttcaggtaacatattatttttttttaaaaatctataaaaaaattaaggtttatgggtatgtatctctatgtgagggtataactccacatggaggcagaagttggcactgaatgttgttcattaaatgtggaccccttggtctctcagtgtcctgcaacttacctaattaggttaggcaagttggccagtgagtcccaagaatctgcttgtctctgcttccttagactcaagggtgctaaagaacttcaccttaaaaaattggttctggggttcaaaatcaaccccctccacttatatagcaagtcctttacaaactgagctgtgctcccagccctgggaacatatcattttaactcagacctgcagctctctttccttttttagttctttctctaggaatctgaaacccaagaggcactatcagcatcagcatggcaccttctcagtctgaacttcctattggtggtaccctgtatatctacactctctttggtaccctgtatgtcaatgctctcttcagctctatcatccctgtacaggagccattgctctgtggtccatgaaggaaaggcagtccacagagacagtcctctggagacccaaagaaaaggttgcatgcaggctattgggagaccagtccaagaccttccctgttgatcccttgagttacctcatgatgttggaggcatcttctgcatccgggtcagcgcaatacttattggcaaggatcaggcatgcatctgctgactctatctgagagaccaaaaggaaaaaaatcataataaacacaaacatatagttggactcaactgcagtctctctttgctaccagtattttagagaacctggtattttttcaaggaaatatatatatatatatatatatgtatgtatatatgtatatatatatatgtacatatatataaattatagttttgtcaaaagtgtaggttgtaggtccggttcttgttaaaggataaatattccagcttgaatctgagtaattatgttcttcatttggcctagctgcttacagacatctttgccaaattccttcaaatttacttaatcaggccgttcaatctaatccctacttcctctttcaactgtcttgtgccctcatcctcatttttccagccaggaagtggaggttggtgggttaaaccccttccccgagatagtcatgtggacaaaacagttgcacattcagcaacacggactgatcatcaaggggccgaatcttcagtgattagggacgtttgcagctcttggaaaggaggtaagttcagttcccagcacgcacatggcagctcacggcacctataactccagttccagggcatcagactcgctcttctgacctgtagacttcaggcaacaggcagtacacatgcacacatacaggcaaagcactcatgcacataaaattaaaataagaaaaattaaaaaaaaattctttcatcaaaccttatgcacatgttcattccatgtgtcccagtgagaaatcagagccttcaatagacaacagctctatgctgttttctgttcgttgctactcaggtattcaaaaggcaaataatttacataaatgaaatgataagttgcagatggatccaaaaggcaacctagtgacttatcttaatgtgagccaaaagggggtttgttctgtagacagaccatgagtttgatgtgctaataattgcttgcatttaaattaggcctgtgaacaaaagccattttctttgtacttatgacttgggtcatgtctggataatattaagatgaactagccttcataagcatgagaattctcatgctaacctgggtctgcactttcttctgctcatagtgttacacttcctaggctgttcctgcatttgttaggagggccctggttccctcaatggtatgccacacgttgtttaatagtgtaaagaattttacacaagtcctttcagattgtctatgtttgctgctatagcaattacagaactctttggtggccacagtcagcatttagccttccttgggttcacataatattaatgaacttcaagtgttgtgcatacttatgacaactggacttgatggataaaatagcagatattggtttgctgtgtccctttctttctacagccttgcacgtactttaagatggttgctttgaggggtccaggaagaatacgatgaccttatcaccaactgatagtagtctggttttggaaaagggatactcaaatggtttacagctttctgtaattttcttttagacacaataatagatttgggggtcatactgagctcaatctggtgaaggctaatcattcatcatgctctcttgtgcatgcctttttaagccatctcaactttaaacttttctacatttatgtattattagagaaaatggagtattaaaatcacccattcttatagcgttggagttattctgtatatttcagcccaagtgtatgctttatgaaatgtggcgtaccagagtttggtgcatatatgtttaatattatactatttcctttgctaattgttgctttgattagcatgaagtgtcctttgtctctcctgatgggtgttactttgaagcctatttgggggtattatagtattggcatctgctggcttcctgctcccattggcttaggatggtttttctatttttttcaccttaaagtggtggccatctttgaaagttacatgagatttgtgcagatgacaaaaagatggtttgtttcttaagatattcacctaatttgtgtccctcaactattgagttgttggcattcctatttcaagatattgttgaaacgtgtgtggttttgctattgttttgttattctttttgctgtttgttttcttagtcctattttgtcttaagtaactgtagctttttttctttttttctatagtttcttggaaatgcttattgctctctcatttacttatgtgtgtgtgtgtgtgtctatacctctgtgtatatatgtgtgtctgtatgtgtgtatgtgtgtgtctacgcatctgtctatgcctctgtctgtctctctgtctctcgagacagagagagagagagagagagagagagagagtgtgtgtgtgtgtgtgtgtgtgtgtgtttgtgtgcattaaagcaagaggacagtttgtatgagttggctctctcttcctaccaagtagatcctggcgatctaactcaggccaccatgctttgcagcaaatgcctttacccactgaactgctgggatgagatggcccttattgggatggtcctgcattgggaacggctgattttggagaaaacagcagagttaggttttatattaagactaacctgagtgtgtgatagttatcgatgatcttgagtgagcccccagcagagtgacctcctggggccaatgaacgagtggactggagttagcaacatctgaatcatctcattaatggttaggagatggcttgtagtctgcctacctgggaaccatggcctcacccctagagaagtgaaaacacttgtttctccttaccttgactctggcaagatcatgtggattgaggacagagccctgataaaactccacctgagtgaaatgccgtttgaacagagcctcaagctcaaggttaggggagatgctgcagagacagaagagagacagctgttaaagcagcagagcgagatctgtggctccctcggtgttcatttccacacaaagatgtgaacaaaggccctgaccttcagagaagcctccttccctgacctaaatgaaagactcattcaagagaacagacccactcagtccactgaaaaggtctctagccttgcaaagagtagggcctatctgtcctcttctttgctatcactgggaaatccagagttgtagcatcagtgttcattggtcattatatacctacaccatgacatcttatcccttccatttcctctgtggacaaggatttcccatcactgcctccctttgcttcaggccttcaagtttggattgactcattgagtggggagttcaatttggagatggcacattgtggaacacctcagcctccagaattgagtaagctaatgccctaacaagagtctgctcatggtaaatgtatttacatggaaggaatctatccttaagtcaactgtatagcctagtcagattttctttcacaattttagctggcatttaatgagcatttcctgcatacctaactgggttctgcacacttcacatggagtgattcatttcattgttactaccatagtccaaggaggtagaattgtctcctctgttcatagtcatgggagccgaggcacagggaagtgaagtaacttgcccaggaagtccatggttaaatgaggattaactaaagaagcaatgggcactatgtctgtggagtacatgggaatccatctgcacagagccaaatggaaactctggaacaacagtatcaatattcgtagaacattgtgtgatacttaatactgtcaaccagatagggtcctgaatcaccttggagacaaacctctgagcatttaaatgaaggattatctagattgggttagctgagggggtaggaagatcttccatgaacatagcagcaccatcctataggctggggtcccagactagatacaaaaggagaaagccaactaagcactgacatccatctctctctgcttccagaattcagatgcagtgtgaacggctgcctcacactctcaccaccgtgttctcctaccgtgtcactatggatccttagactgcaagcagaaacagacctttctttctttcttttttttttagttattttgtcaggtggtttgccacagcagtgtgggacgtaactatgtcagccttcttctcctcttctcctgcttgtccctctcctacggtggtaaagtatccatacgactatattaattatcctaccccagctcaacagacacagccgattgcaaaggtccacactgaggaaggtacaagggtggtaacttggatgactagggaattccactgttgaatcttttagaaagaaactcagatatactcctagactgcctcactggagtttgctttcagctctgaacaagggtgctgcttcatgatccaagggttctaaagtaacctccccattctttcagaaaaactacctcttacctaaggagccagcaccaatcatggcttatttaaccctgtcctaattcccagccacctctaggcactcagagagaagcatgagtttaggtggcagggtctggtggcagcagggggctcttacttgtgaagaaagacaatctccacgttgacatcatcccggtccttgtgcagaaagtccttcaggaagttagagacactctccagagtaatgtgtccacagactacaatgtgcctgtacaggagaaagcagttagagccaaccagactcagcaacatgaccccgtaccctgatctctgatcagcagaggaagcaatacatctccccactcagccccagtacccagcacccatccccagagggtcatgaggcaaagcgatatcactaacagttgctcagaggctcctggacagaaaaaaaaaggcatatggctgctcacctgatgctgcacaaaatcctattaaaagcccagccacttggccaagtggttttatgcatttaacaataagtgacattacgcttgtgcttaaatgctacattatcaagtcccttgcagattcctatctccccctttctgcccacaaagcgccctcctgggagatttaccgcagcagtcttggtttatgacatacagcttatcaggtaatgagataacaaatcttgctgaaacgatgattttgtgtgtaagaaagaggacttttatcagggtggctaatgtacggcttgacacgttataggctcggctggccataagcagtaaaaaggagattttgcatttttccactataacttctccaacaatggaggcatgtaacactttacagtaagtgagcattactcagggctaaatggagatgggatgcccatggaatggacaatcaagctggctgctgggaccgtgtccccagagggctgctgcctctgagtattgaggctttcaagagctaaactaattcacctgaagacccttccaataggcaggagccagggatgtaacggatgtgaaaattttggctttgttcaagcgtagtttgaactctgtttctagaaatatccattcatcccaaggaagtgagacccttttccagagcatgtaagacctgcagcttctctagcatttcttcctaaaccaatgtgacctgaacatcagtgtatccttggttcactacatatgcttcatggtactcaatcacaagatcaggatctgaaaattggccctaagaccaaaaggcttagtcatgaagccataagcattggcttctatcaaagtcactgtgctaaatagctgaactggtacccctctctaccttgcaggctgacaattacagaggatagatctctagtgtgttttaagactacgtcaggtggtgaacaagcagtgaggcaatttcccaggaaaaattcagagtgcccaggtcctttgccctttataatctctctgatcgcatttcaatatggcagaacgctcattggctggaggcagcttattataggaggcagtggtgatggtttatgtgatgtcccattagacgtcattacaagagcctgcccttttgtggtaatttggtgcttgactaaggatgtgagaataatgcagtatactcattggggaaaggataatggtgcagaacaaagagtaaatcaataatatgtgcggtacagttaataatattgccattatgaactgttattgttacggtggtgcatttagcaatcaggcaagccacggtcatgaaggtgaaggaagggtggcagtggagtccttcagaagagacatcctaacatgatcatatcaccctctcaacagcacctgctaggttggggggtcacttagccactcatccaaacttaatgcccgaacctccatatcatgaacccttctgactataaggctgtgaagtatactatgtaactgaattcacaaaataaacaaactatttggattttccccattttcatcatatcttaaaatgtttcttgtagcatgagtgcatgtatgggcaaaatgtggtagctatgcaggttctgaatgagatttatgattctaaagtgacaagcatgtccagagaatgaccaagaaggaggattttccccctgacttcaactccacacaagtgataatagtgttaactgctgaattctaatgtcctgcacaaagacactaggaaggagaatgctccgacaggaatctactttacaggtatctctgcagctggggctgtctgtgtcttagctgagatagcaagctaggtaaggaagaactctagttccctgttttgatggcaaagagaggatgtcccacacaagctacttattccagtccatacaggagaagctgagaacttcatcctacctagctaagcctctgtctcggatattgcaaacttcagcgttctatgctagaatatgcctgcttattattcaaggccagactcaaatgaatggtggctcgagacagctgaacattcacccttcctgtcctgtacataaggaatggcgtatgcatctttccccctcccccattgctgctctgaaatcattcatcctgagagagatatgtgtgaagtggaaggggaggagatgagccctgccccaacacatcacccttgaatcaaaggttcagccagctgatttatttagctttagaaaaagtcatggttctattatttgaaagtgtgccgggtacatataaaatatattccaatgcaatcaatattatcccttaagcctttaattagctttcacttctcttaagaagtgagtagacaaatgctggcaggagagaggaagggggtaaaaagattgacttttttttttttcaatttggtgctagctgtctgataccatactagacaattgaaaatatatatcttttagctacagcatgatttctggggtggagagcagtccttatcaaaaaaggaagaaaaaaatcttccttcaacataattggtatttttgctcagaaggaaggggggggggaacgctgggggtaggggattgattgaaagcagattgcctttttgcccagggagagttattaggtacattatcatggcaaccttgaagaagccatattgttccaatctgtcctgtatctgatttgaagatttacggccttccccctttgtgccaataatcatttccctccattttgttttccatacaatggaagttatcagggagcccacatattgaaaatgtttgaatgtcgtcagaattgatggatggggagatgccgtatctctagccctgtatcagcactggaagatcagacctggcggcccacgtctgaggaagctccagactccctatgggagcgtggggaaaggttggcaaatggagatcatcttgcaggcagtagtttggggaggaatattgcttcagaaagaagaaacatgatacatattatcccacctatgcaatatgactgaaaatagtttatgattgagagcagagcgtgggctccttggaagcagtggatatttacagggcatgatttgaggaaggtcagagattcttgtccaaatgatctctgctggcttccacgatacctacagacctgcctggtgagattcatactctgatgtcagacactaattaattacatagtccttgacaggtctcaccaatttttcatcttaggagcaacaactcagagctttatagacactgtgaagagcgattcattcctgaggttatctccaagatcttcttggaaagctaatagatggatgggccagcaaaggagctaccatcagcctcctaaacgggtagggactgtgtgatatctttgtatcagtacacagcatgtggcttgtataattccatcgaatcctcaaacaactgcaaggtcttaccataagcatatctttagatcacccctctgaaattgtttctgtgagatgcatctcttatgttcacaggaagtaaaagaaactgacttgggatatagcccaagtgttgagacttcagtgctcaaggagagggagctgacagaagaaggttggttccctcagggtgggcaggattagccaaagcatggaggaggaggcactgcagttcttagaggtttagagaggtttgttgtgggaatgggatggacaaagacaaaattcccctgtaagacatcatagtttctcagtatctctagtgtaagctacactgctcaattgtcccagaaggttcaagaaaacaaacaacaaccaaaaataagagacatagaaattaccaaagccactgtgcacagactctaaaccaaactttaactttactcatacactgtgagaaaataagggactacaaaaggaatgtcagtatctggaccagactttgctttcctatggagctgagaactcccaccagaccaggaatctgaaggataacaaagagatcactatttacagcagaagttatttaaatgggtcacactgaaaggaaccaaaccattttcatgtgtggctctggctctttgagcccaatgctaatcttcatgcctggactctatgtggccttgatccctagaactgtgaagacagacaacagatctaaatcagtagccatttctactttaatctgattgacacgtgtaggtgggacaaagcttgatggatgaacagatatttctgaggcaaaggtaacataaatttaagctaatattaatggcttagatgaaagatccatctcagatgaacaaggaagtgtgttaaatattaacacaatggtagcaaatgacttggtggaaggaagttatttatccagtactggcactgagtgagggccctaaagagtgggttaattagggataggtagcatagatagactgccacaactaaggcatctcatagttgagtgtgattgcatcttaatagaccaatgtatagctacactagactctctaaggggtaactgggaactgccacttacttatgccataggtcatcattcatcaccaaatagttatgagtgctcctctgatcactggccacctccacctctagaatgtggtcatctatgttctcctcagtcactctacttgtgttgttctggtgggccaggaagcccaacattccagggttgagtggcaagctgtttcaggatggccttagggcaagaggtataagaggaggatggggcttttcaaggctctgatgatgggccatcagggagttattgagagtcagtttagtttgatgaaaacaaaaatctacacactttccacacacgcacacacacaccaggcagtaattctgagatccaaccacctttgaaacattccacacttcaccatgcaaaggttttggtggtaggtccccacgcagatgtctgagtatatcttaacttcagagggtctatggcacacactttgtctaatgcctctattttttttttgatgaggacacatgctcagccatttggtgcatcttaggaagagcagaacagcgccctctatttgatgccttctaaaaagaagcatcatcaaatgaggtggaaatgaccttgactaggtaacaagagactgtggagcctcaggcctctgtgatttggagccagtgaagaggctgacaggacctcactcaccagaccctcatgaatccctatggggtgcttgctccctgcctatacgctagttcttgtcatcattttatctcatctagacgtctgcaatcccttcctgattgatttccctgtttacccaccccccaaccccctcagtctcccaaaagccaaagagcaaggactgaggcaaatctgaccacaatcaggtcttccaaggtcggggaggtcttagatctctccttagccaggcctcacaccagaagatagtataaaatgcatgtctctgggctgtttatttttaaagatactatatccatttttactggaacaagtataaagaacttaagaaacccatagccatcctgtcacaataaatcatacggagtaaattgaaaatcctatacagctttttctgaatacattgcactcactttgtcaaagaggtagatgaaatgtggcatgtattgatctagatgtctctgtgaaactataatatttatatcaaatacatatgctagactctcttctgtctttctgctgagccttctaatcatgcctctctcatcccacatcttcccagcacctcctaccattagcagcccccggagtgagtcgattggattttaaggagcgcttggcaagaagaatgggtagcattttgtcacacagaagttgggtggttagaggccctgcaggcctcatggtagtcagtaccaagctcatgtttgccctgctgggttaaatttgagtttttcttcctcatgaaacctgggcttcacttgtcacatcacccagctgtgactttctgactgtgttgtcttaaggcaactggccctgattcgagttgtgccttcagaacagtccttctccttctggcttgtgacctcactgcagaataaaaagttcatctattccaaccttccttctttcttctttattaaaaaaaaatctattcctaggagtctgtcttgactatggggaaagactgacaccaacaatcaaagaaaactgactagagcctgttgtttgtgtcttcccatcctagccaagaatctagctctagttcagcatgcacatacagacacatgccacttgttttcaagacttatttgttgcaaaagtatgcttggcttggacactaaggcagaggcaacatggtcaacattgaacagtaaactgtaagaatggctgtccaactcagcctccagaaatctttccccaagtccataaaggagcaaaaaatgaaaacaaaaccatggagtatttatcatgcccacagtcacaacctgactataaaatagttatctatttcctgtaagaaaaaggaaggataaaaagaaagatgaaaggagggaagggaagggaagggaagggaagggaagggaagggaagggaagggaagggaagggaagggaagggaagggaagggaagggaagggaaggaaaggaaaggaaaggaaaggaaaggaaaggaaaggaaaggaaaggaaaggaaaggaaaggaaaggaaaggaaaggaaaggaaaggaaaggaaaggatgagaaggcaaagggatttccaagcaggtttaaggctaagatcatctactcttggccacatctagtgctttgctaatgagaaaggaaggaaatgtgatgtgcctcccggtgaggaagagaatggagcaatcgtcttacgcagctgtcaacaggaatattttggaaaaggcaggctgctttactgcttcactaaatggggcagacagtagagcaaacagatccaaacagcaaaggcaccttcatgaagcagagctccaaggtcatggaacagagcattgaacgacccatcagaggagaccggggagccctttaacagaacttggcccgaaaaactgatgcactttgtcatttatagctgagaactcagccaccattccaaaccataatgagatctccataatcaggcaggacacagggtcagagtcagtctacaggtaaggaatgactacacatctcttgtagcttgtaacctccatggactttcaatccaagggttgacaaagacagccttagcatgcgtgggttccacctatcaagcatataccattcattctgtcaaacatatctcacttttaattacacatggttttgtttcctctaatcaagtttccacatccaagagagtctaatcattgctcgagataatggtaacaactgaaccacgctggtggccaaattctgtaatgaatgaccatgaatttctgcttcctggatggcaaagcctcatttctggctgttttctgtcctttctgggaccttgctcttcagatttctcctggattttataagttactttagtgggtcttaaaaaattgcttagtcagcaaaaatccatctctgttgcttacaaccatagatctctaagggtagattggttgacctttgcttcagtttctcattagttttttttttaattggatattttctttatttatatttttattagatattttcttcatttacatttcaaatgctatccccaaagccccctatatcctccccctgtcctgctccccaacccacccattccagtgttcaggttttatcacatcactgccaccttgctaactcttttctcctttatttcctttcagagaggggaatttgtatctggacatgcacaggtggtcacatgtgcacatggaagccagaggctggcatcaggcatcttcctcaattactctctacattattttctgaaatgagatctctcactcagcctggagctcacaggtttggttatgctggataactagtgaattccaggggtccatatgtctctgactccccagctctgggattatgcatatgtgctcctgtgtctcgattttaaaatatactttctagggatccagaactcaggaccttacatttgaacagcaagtcctctacaaattggccttcatctcaagccttagacagacttattaataactaattgtaccatggtgatgcaaccacaaattacatggattcttccttgggtctcctaattgactctggcctttacatctcattcatctcattacttgggactcggtgatccttagccattctcaatagagcaggacacctttgatgcgaactttttcatcctaggcagtttcctttcctgaacagcatttctctctttagatcaaagaagctttccctgtctctatctgctgttgggacaaacacagagaacactggccttacctggacaaactcagagaacactgacccaaacaggccagcctcaccacttggaaatgaaggtggactaggaaaaaataattccaaacatgtaaaatgtttatagttttctctttgggaatgatattgatttgtaaggtgagtgcaacctttctccctaacacacctggcaagtcatgcatcctaccctgccactgggactggctgtctcactgtgacagccagatgcatcctcccttctcacccactagacccaatgggtgctgcctaagccagcaaaagttgctggccattctctctgagcatactcaaaatacatacagatgctctccaaaataggcaggctccacatagaagctttctacttgactgatgccaaaggctacctgtatagccattctgttcaatttcaatttgacaataaacaagttatgtggtttatccaacactggatttgtgttagatggccttgcccaactatagactaatgtttttatgtagactttacgttaggcaggtttaaactcatatgctcagtaggtaaagcacactgagtgcattttatgtacaggttattttccaattacaatgggcttatcaggatgtaacaaccatctgatgttgaagagcatctctactggcattagccttcatagaatgccagtatctgcaactctcaggagatttggaaggagccatagactcaaaagcctgctgaggcatgatatgatatgtcacagaaggatacctgtctggcctagggacttcccaatgttactaccaggtcccaagccctcctgaatgtcaccacagccccctttcctgggttgcttattagctctgtaagatttttaggcacactggctttctgctgttacctctaccctaaacagccccagtgagctcattaggaacacactgagttatcgtgtgctcttaggaacactctctctaatgtgcttcctgccttcatgattatttcacaccttcctgattttattgtaccaaattccagccaaaagaacatctcactgggatgatgttactacataatcaagctcccgtttagctgccactggctccttggatagctctgattggacaaggtctcacatactctccaagagagcaacaatcacaatctcttactcctcttcaccacggagtccagcacaattcccggctcatgggagggtttgaataattgttgagccagtgtgttggaatgggtgttttcctaaatctgctttagatgcaagctggcaagaccctttggcatctgtgagaagcatcatgcatctctgatctgcctccacatctccttattggaattgcacagaggagggagagccaatgacctttactgacaactggtacccacggtcagagcaaatctccacggttgtggggaaaggagcaggctgctgccatgtaataccagtactgtatggaggttcaactctgacagcaacagaatcagatttccacatccttcatgctgcattgatgtctatgatattttaatacaaagagacgctggacttggccagtgagaaagtttgctgttttattttcagagcatggtgacagcagtggtggaaagaaccccaagtctgcaaggaactgctcgtcgcaactctggaaagacttctatcagaatgaatggcatgtcaggaagacagaaaatagggtgcaacttagtctcggatgcttgcatttgttcctgggattctaaatctacccagcaaggactcactccatcaaacatgaggctgagcagaaagaatctttcgggattataattagaaaattcacaatcagaattcctttgtaaatggaggtaggatatttgaaagcaaaagtcgatgcttgaatgcgcccccaccccgcaaggtacccagttcatctcccacctacatttctattcttgtttagagaacaataggtggaacattctgctaagtgtgtggaagggaagaaagacagcagggaaggggggcagaggggaggccttcatcccatccgcattacctagagtttgattgactatgcagccaagtctcttttcagatgttcaagtttgaaaaggactggagacgtgcctgagaaggacccaaagcagatgccaaggaggaagtatctgcatccacacccaccaaggcccctgtcattggaaaggactacttgggacactacatcatgtggggcatctaatgccaaatgcgctgtgatctgcctctcagtgcccaatttcagaagtcatcaggggtcgttttcccaaagtatgagggcaacatttttttttctttttttcctctttccacaaaaagtttaatgctaatcaaagcagaatgcctaatcagttcaagatggcctgtcagcttgaattatctatttgtcttcctatttactgtatctgtctgtctacaattctttgtatctttgtgaaaatcagttattagggcccatgtttccttctgactacaatcgctaccagatgaacctccccggtgatatgttgatgatttgctaatttatggtttttaaaatcgaggaatcctgagatattgcaggggagtcacgtgggctacgagaggagaagtgctcaatgcttttcctgacaagggatcaaagattgtgtaaaatacaagacttcagtcccatttcaacctgagtgatgtctgaggcagagaaatcgtaaatgacatcttatgggaaacatccctcccgtgagcagtccggcccttgcaggcctgggagaagtgagagtgaacgtcacccgagatccacataaacaggaaaggaaagcaggcccatggtatcaagccaagatagcaccacatgacttaacccacatcccactctcgcacactggaggccaggctgagagcaaccacagcattgcagggagactccctgggatccgaggcaggtttaaataagctctcgagctgaacttcccaaccacttaggtggccagatagctcaacagagagcgagagctgttgtacggctggagggtttaataggtgtgctggaatgtatctgtccctgatgcctggcacagagcaagcagtcaataaacacatgtggaatgaataaacatgaaggtacagcacatggtgattctcttttggcaaggatagacccccaagagggggcaaataaaaagaatctttttaaggaaatagccatattatggcctttaaaaatggcctggaatcactgtgggtaaaacctgaaagtagggagaagatagaggaacagcccatgtagagccaaggtagtaagtaggcataaagaaacacatggggtctgagtaaggaggagggagggggagagggagagggagggggaggggggaagagggagagggagaggaagagggaaagggaaagggagaggaagagggaaagggagagggagagggagagggagagggagaggcagagggagagggagagggagagggagagggagagggagagggagagggagagggagagggagagggagagggagagggagagggagagggagagggagagggagagggagagggagcatgaacatgaatgagaagaacagcctatattgaataagtagctaaactaggccccactcataagaaatcagaaggagatgcatagagccccatgattagctagcagagaggaatgccctggcaagctggagattatgaaggagatatagttattctctgaattcttgaagcattgggtccagatgagggtagaaaatatggtcccaggtatacatggagttctttaaataagtttacttctatctcttggaaatcaagagctcaaaatggaccaacctacaaatcctgaaactggtctactagataaaacagtatggtgtttgtagtaagagaccaacactgaagctcaagagcaagagcaattgctctggagcaagatatgggtctggctgtagaaactgctccccactctagaattgggaagtcaccatggagattttccttccatgctaattacatctggtttcctgttctcctttgtccactccttgtcttttttttttttttaattcctttctttccatgtgtcctctcagcttctggctaccaaaaatctgtggagccctctacacccacactcttctctctgtcccaaacacctgggccagaactacctcagtttggggccattgaagccacatcatgggaaacataaggcctggatggctccccagctgtgctgtctctatccagggggttacagctgatggattcctctctgtggccaattattttccatggcccttggccatctgaccttggaccatgatcttgtcagttctcataaactaaccaggagtagaatgaattacactcagagaagaaacctctggggaaaccgtaagaggctgtggaaggaaaagacagcaaaccaagaaccccaaggccatgggagtctccgtctcccccatgcctccaccacctctgagcagttttcattgtacacgaaggaaggaggcagagtcaaaggccttgggaggccagctgggctctaggagagctactatgctgaataagatttagggtctcagcacaaggggctaattgcccacaatatttccaaattatccattgataagtttcttggtctctaactgaactctttgttaacacatcggtctcaggggttggagatttagctcagtggtagagtgcttgcctagcaagctcaaggccctgggttcggtcctcagctctggaaaaaaataaataaataacactttggtctctattcttagttgtccagatatgtgacacagcagccggtatatgtatgggtacccgctcctactgctgggatagaggacacaatgaaaagggtgaagaaggccttgacttctgtggacagggaggaagatttggaaatgccacaggaaatggttttgttgtgctaaacacactgattaaaagttacgaggaagcaccaagaggacctccatattctccaacacccgcatgtggctggtgtgtctttcaagccttacattgctctgttacactggttttccatcctgaatgatcttcggacttcacatttttgtgtctctgcagttggtgtatcatacgttacatttggttgtctgacaaattaatatattgttatgtgtagttactgctgagtaaaatatgcacataccaaaaaaaatctctcaactatgtatatgtttaagttgttttctaggtatttgctgaattcagtcctggcggggagtgtgtatacatgtgtggatgaggacagtacatgcattttttttgcatgcaccaaaactccaagtactgcctgctattttaagagtctcaactccagctctcaacaaagttaagccccttcccttttgcaaatgcatttaattttatctggaaactttttgacgttcggaatagaacaactgtagtttctcattatgtttgctgccagaatccatgcttcgttgctcaagtaaagaccttatattgctaattactaccacatgcccatatcccaagcgaaaggaaacttattgattctgacagcccattctctcaacactgaattccaaatgaaaactcaaattttggccaaacataacatttcatcaatcttgttctactgactggagaaccaacatcaaacaaagggtgctaatggctctttattaccactcctttcccaagcttatattttctgatgaaagatctaagtgaccaagggcttctttaaactacttggtaattagcttttgaaccaggaaacaatgtataaagtaatgagcacagtcctggtgttgatgacaggacgtacactacatcccgcagggtctggggactttagagatccaaaagagaacattaaaagcaaaatgcactttcacaaaggagagtggagcagagagagagggagggaggaagaggagagagggagagagaaggagggggagagggagagagggagagagaagaagagaggcagagttgagagaaggagagagagagacagagacagagagacagagacagagagacagagagacagagagaagatttcaaaatctaaaagtggtgataacagatttcagagccagaacaaatctggaggagggcccatgatctgaagtcctcagcaggtggggctttgggtggacatgccagactttaaacctgaccagatcagaccagggcagaccagcaagtgcttgtcttagatcctcattttgggccacccatcaacaaaatctgtcagccaacagcccacccatattgggccacaaacactactctgtaaaaaaaaaaaaaaaaaaaaaaaaaaaaaaaaaaaaaatcccacctggaaattagagtcaagaaatactttcaacttagatttcaaagcaattgattttattgacttcattgggggacagggataaggagatgctggctgagaccaatgggctgagacagctataatgagggcctgggactctcgggatgcccatatcttaaaggcacactgaattaggaagctgttttcctcttggcttgagataaatgacggaggaaaatctttgggcttatttggccttttggaaccaatggatggcccagacatcagaacagcttggttctaacctaatccagggttgttaagataataggaaggggaaaggcctacagggggagatggaaagacatgccgccttactgagaaggtgccaactggcctcttttcccactgtcctttgtgtctatgaaaggaaactgctgtcctgtgggtagttcaaggaaatgagccctttctccacctcctcattttctaaacagaggactggacacctgagctcaggatgtgttggactcaataatcagagtgaggctccctgggcttcatccagcagggccaactgtcatgacagagaggcagccatgggagaaggccctacaagccaggctctagttttcttaaacaccaaactaaggtaataatttgacagtcagttagaataagtaagaaaataaaacagttccatgataggggacaggggactggcatgaaagggcccattttctgcattttaatagagatgcagatgtcggtccctggtatgtctatcagtgcacatcctcctaggggtatacagcgtgcttgaccattttattctatgcacatcataccctgaattaagaacaaagcggattggcccccaagagctttcagagcaagttcttagtgacctttgaagacagttgcaaccatcccatccttctgccttagctcctccactgagatggccctactagaggatcagaagaccaaggttccagcatgaacatcagaataagacttctggtccctgctggactcacgctctgatactggtgctgatgatattggtactgatgatactgatgctgaaaaagttacctgagcagaaacttgaatagttcccaagaggaaaaccttcacatttgagaaataaaacaaaaatccatatctctaattgcctgtggcaccctgacaccctaactgcaatacttcctgcccaggaggcatttccactgtgtaatgaaaccctttatcagcaaggtctcctggcagccactggcattttcagtagggaggatgggccaggccttggcctgtgcctgacacaaaggacagtgggaaaagagttctagcccattagtgtgcatgccagacctaccaggaagtcatgagacctcagttgcagagaccagaatttgatcatatcaccagctcgtgaaatgagcttggtgaatatgataaggtatgagagcagaagatatggttccaggtgcacatggacacctttgaatatatttactgttatctcttggacactgtaaatggtcacaagacctcaagatggtccaatcacctcccatgctctgaaaccagtcttctgcagaatgcacaccctccctcattaaaaaaagcaggaaggggggatagcgagaagggcttgattcaatgccactgctccagggactttccaagtcactcaagcacatgtcctcaggtgcagctgacttactttctgcctccatgtttgttaaaagtcccgccgaatttattccgattcaggatgagagcagcaatttcgggcacgtagcgggcaaacattgcctacatgcatgagacaaagaaacaagagccaaacagaaatggcatgcagagaggcccctacgccgcggaggccacaaaaacctcttggcatacttactttcttccactaaccgcgctataggagcccccgtatttcttgcggtttcctattaactctatgatttcagggacgtagctggcaaacatggcctgaggagaagaggggagacagagagagactaaaaagacaggccaaagaaagggtgaccttttcagaagggggatactaagatctgaaaacacaaaaggattagacctgcaaaggtgcggattcatgtgttggattatacaacaataacagaacaaaggggaaagctcctgaaaccacacagaatgaaacatacgtgagttgacctagacagtagaaaacaataaaccacagtcaagaaaaatataaaggagacaagcgtaaatgagctgacatcttgtagaatgatgccaagtattcacacacacacacacacacacacacacattcatgacaggcactcatggatacacacatgcatggacacacacgtatgtgcacatacatacacatatgtgtacacaggtacacatgcatgtacacgcatgcacacttacacacacatgtatacatttctgtcaaaaagtccttccacataacactcaaaggagaattttttatgagtagctaaagatactaaacactaaaaagaagatttaaaaataaacattttcatttaaaaatgactaaaaagcataagaggtcaactttggaaatcacacaagaggaaaggatggatagcaaggagacacggagctgccatgttttacccaacaaagtctgttctgtggctggataatggggtctcctgaactacgggaccctgcagggatgctgctaatgtccacccacacacacatttatatacatttttcaaaatgtatatgtcctatgcatacaaaacagagagaaatgtatgcatcacttcatataaatgtgtgtgcagtgcacatgcgccacagctgtgtgtggactagaatctcagtcacttacctcatacacagaaaaaaaaaaaatcagacttcgctataagctactttgaaagagaaaatgaagcaactgttccctggaattacattgaatgcagtgatttcttgctacataggaaccagtgaaacttgttccaaggagagaaatggagcgggctttagacacagttatgtcctgactataatgacatttcctaagtgaagggaccctgctctttaggggcaggtgccagccacagtgtttgttggaagtttggggaggaacattaaggggaggggagctcttgaaaccgccatctatctacagagtctggacagcatctaccagaatcaacagcagctacaatatctgatagtgaattccattactaaaggacactctcatttattaatggcatgcctcccttaaaacgattaggtttgctcctagtgacatggctgtccccagtgaggacaatatgtctggttctaagggataagcataacactaaagaaatatgcaacaaagacactatggtatttggatttagctctcctggttgcattaaggcagttacttgcttccagtgcaaaacacattaaaaatactatgtctaaggaagtgggcattggaaaatattaataatcattaaaatagatacaataagaaagagggcttttttttaccagtcccccgaggatgaagaagaccatgaagaggcgtccaagtgtggtttttgcataaacgtccccataacccactgtagacattgtgaccatgagtaagtagacacattcccagtacgtaagtgcctggttgttttggaaattttcccatgggtcccctgaattctccacctacagcaagggaggggggagggagagaaaagaaagccatcagatgttcatatgtacagtatatgcaaaccaggatgcccagagctcctgaaagttgttttttacatacgcttcatattcgcagtacagaatagatgattctcattgctagtcactaaggcatgattcaccagaaaccccagggggtatcaggacagggatgaggaggagcagcgctggtgtgctttcctacgcatcgctgatgcttgatacactttacagcatctctttaaggcaggtgctagatgcttccttctgccagtcccttggggattcctgctgagactctagactttcctttcattcgtgtaactaagaacaccagacccaacatctttgggacacatctacagcctgaatccaaagcatcatctctgcttctgggactgcttgtctttcttcaccagagcccaccagcaattctgagctccgaggtttggaaatttcctccgaaacaagagaagtgacctcttggaaactgcagacacatgcacacacacacacacacacacacacacacacacacacaccatcagagaaatggctgcagacgtcttcaaaatggcccttgagccaatagtttctgcttgtgctgcagagttcctgaggtctgcgcagatgctcagttctgtgagcttggctgaagcccagcagggagcaaagagtgggggctacagcaggatttggggaacctgagcccagaactggcaattggcttcagaaggaactgaatgataaaaggtgaaggttgactagttacacagggactggagacgtggctcaatggttaggaaccattgttcttgcagaaggactggaattcaatttccagcattcacttctagagagcctaaagccctctgcttccctccaggggtacatccacacatgtgcacatatccctacagtaaaacacaggcatacacataattaaaatatgtataggactcttgcaaaatccacaattatcttgtttagcagatggaaacaaagtcacttatgctaagttttatagtctggtgggggcttcttctgattgtaacagtttatgtgcagatgaaatgtacatttcatagtaactattctctctgaaagcaggctagagaactctgccttggggaggtaggaaaggtttgacttggtaatagcattcaaagagtcattagtttttaaaaacaaaaaaacaaaaacaaaaccatttgggggttttgaaacgacttgagaagtcatctagcaagacagtcaaaagcagcttttttgtgcgagagaagtagggacagatcccaggatttgcatttgttgtttacaaagagctgttgaagttcaaactttcagtataggtgccagacttttcctgggcgtttgctgtggaagcactgccatcttgtggccttctgaggttattgcatacagagtgaaaaactaggcaagtctccctgaagcaatacaggtgaagctgaaagatgtcggttggtcctaggaacattactcactatttggaaccagtttgaggggtggaagttaagggtagggaattctgaaaattgagtagcttgtcccactttcctgtatgtacagctaaacttgtctctttccaagaaaacaaatgttaagtaataaaacggcctagcaagggcctgctccatgccagctacttaccaagtggatgaatccagctgcagtcagccacgtgctgataaatatggagagcagattcaccagcttgatggagttactgtacaaaggagacaagaagagtcccaaagttacagagagaagacccgtatggaactgcccgatggtgtcacagtctcccttctggggcagaagcaggctgctgtcatcataaggaaatttgactcaggggagaaacattggtcaggaatgaggctctcaacagagtctgtaggaaaatcacagccagaccctacattaacccctcaaacgttgctaaaacttaacttgtctaaaacaaaacccttcaaatatatattaaaaagaaaccagagagaagagtaaataaaatttgtgtatccttcacctaaattgacatttccccatgacttcatcatctctgcaagtatgtcttattttcttcagtgtgataattctttctggttgtatttgttttgtttgagccattgtgttgtggacatcaccgcccaacctctaatcaccgcggcattctgctccgaagagcagacaccatgcagtagaatctggacacatctgtatatcagaaaacgaactgaattcagcaatgcgatctagcatacaatcccaatttaaatgccagttgtcctgaagttatatttaatggtgtttccatcacgttcatcttgcagaaaagaactctgtctcccacctcctgttctcccattcccggccctatgcagcctgtggtgctttgaataggtatggcccccatacattcatgtgtttgaatgcttggcccagaggaagcactattaggaggtgtggccttgttgaagtgggtgtggttttgttggagaaagtgtgccgctgtaggggtgagctttgagatctcatatgctccagctatgcccagtgtggtacacagtcacttctactgcctgtggatcaagacgtacaactctcagcccattcaccagcaccacatctgcccgcaggctgccatgcttcccaccatgatgataatggactgaacgtctgaactttaaggcagccccaattaaatgttttcctctataagggttactgccgtcagaatatctcttcacagcaacagaaaccctaagacacaacccccgcagaagctaatccttctctttgggtaatccatctatggtaacactgccctctttctgcctatttctttctcttgggtaatatattatctactttctaatggcttagaaggttaacaatggtgacatctgagactttcacagtatgtacgcagtgcacccacacaccatcatgctgatgtttgatgtatactgactaatttctcataggatccttcaagatcatctgggggaactgggaaactgacaagtttagttcagtaggccccacagttggagatggaaatgtggccatttcagccactttcagatctattactgcacagccacagtgtcatgtcagtggcattgatggctgctagcttttggatcctgagcataccgctaaaagggcaggatggaggctgttgttgctcagcctggggaattcgtaagggaggcctcctaacaaaggctgcgatcatgtttcctgggtggagcatgaggaatggagctttctctgcttgtatttatataactgaagagaggaatccaagttcccggtttgcctggcattgattctgacagttcaggacaagaatgagtaaacacttccaaagttgtgggtgaaactagccttttgaggtgtgtgggatgacatcctcggggttggaaaccatatgccagcaaaacagcagactgtccatcctgggcatcttggtcctcgccaggatcacccaccatttgtggtccctgaggactgctggggctttttgatgtactaagtatttgcttgcgtcctccccctcttcactctttctgctaatgcaggtggtaggtgagaacaccactgtcactcactattgaggaaaccgagcattagggggtgtagatagcttgcctgggaatcacagctacaagtggcaggcctcatctaagtagcttgggaacacactataggaagcctcagggatcctcttttcccttaccctgtagtttgcccatcatcacttcctaacgaccaatctccccacagctactgacatgggagaccaaggtgtccaccaaggacttcctttactaaataatccagtggaattcagccaacatcaacatcagccaacagagaagcctgccagagttttcaggaactttgtggaagagagttctaatccatctcagatacaatccttgagaagacctccagagaacaaacccaaaagagatgaagagaggagcagaatcttaaggagggaagctgacagcctgagtgcagatatgccaaaagtctgtcactccctctgggacccagtcactctgccacttgcctagacacaattgaaatggctcacatctagaatgttctcagagaacatacgaattggccatatccgcccactttgtgacctgatacggttagctccagggctctggatgctgtggtatgaagctagcactcccaagcacaaggctgcttgtgctaactcctgaccttcaagccttttccagacatctcaatgagtcactctgtgcttcacctcatatcaagcgaagttctctgacagagaatggaattgccaactgaaaaaacagaagtttgaggcttaccctgtctcatcagctatgttaccactaaaccttgctccaggcaaatttctcaatggaaaatcaaagcagagcagcccattcccctgtctctccctttcgagccccctaagacgtgatctgatattgaagagaagcaagtagtagggagagcaggtagcctatggcagagagaggagaggcatgtgctgctctctatttccaggggagaattcaacacctaattgagtcacttacagactcccagatcctcagggcctgcgaaagcactgcaccatcaaaaaccatgcagagtcttttcaagatattaaatctactgacgtctcttggtgctttggggaaatggcctaaatatggtgattattaatctctaaatgattgtcactgggacattaatggtgcttaagggagctcttgctgagtgcagaacatttaatcaccactgctgagacagaccaggtttgttgtggaaatctgattaattgtatgacatcagcaacatcacagattgttcgcacgaggaagtggacttccaagctgaaccctatgaccaagttaatatctgaaagctatgtagaaaacctgcaagattaaccccaatgatgggtgttctctgtccgctgggatgtggactttgacatctggaagatgactgcttcaaaggagggaggggttgccagcagaagacattgagtatttgtggcaaaaagagtcattggagatggctatctgcagccttcctggccaagcccaaaggcttgaatcaaacatgaaattatcagtagttagagtggcactgaccatgcagagtctagctccttgctttgaaggagagattgtgatccgatcatgaaaacctgccccctctttttgtaagtgtcatttctgtgtttttatggaaacttgtgaattcccatacatgaattctccgtggctgttctggtttggtatatgtcttagttacttttctgttgctatcataagataccaggactaaagcaattgatagaaaaaaagcatttattggggcaagtccatagccattatgtctgggagcatggcagcagatatgcaggtatggccctagagcaaaagctgggaggatccatccttatcactaggcaaggggaagggactggtgtggcctttgacacttcaaagtaacacacctccttcaacaaggccccacctctcaatccctcccaaacagttctaccaaactagaaacaagtattcaaatacatgagcctctagaatccattcttattcaaaccaccacaggaggacatgtttcccaagggctcataggttaagaggacttgttcctcacctggtgatactattttgggagagtctgaaaactttaggaaatggggcttagatggaggaagtaggttagaaatattagaagccatgtattcctggtggctacatcttgtctctgatgtcttctcccattttctacttattttccctctctctaggtagctatgaggtgaccaactttgctttctcaggacactccactttgccaccaggcaggagcaacaaggctagccaaccatgggtcagaaacctctgaaactctgagctcaaataattttccttgcttatgttgttttctcaggaattttggcacagtctgactaacactgaactccagtcattgatatgggtggacagagtgattcatcaataggcaagcgatagtctgactgatcagtgacctttcccaggacccctaggtgctgggagagagtctgatttcgaaaattatatcagtaaagccaaagctgccaagggttcatctctgcccttacagaaaatagaacatgtcctggtgaaccttgaaaatgccagccactttgcacaagaaagcacaaattctgccctcttgctgactgctaccttgcttctggttgagggcacagccaggagccaacagccatttttatcttttccttgcaacatttgctaggtagctaagaagtgtcccaatttaaagcattgactggaccaggtcacactgagattaatgaactttgtgatacaaaatgaatcaaaatctgttgggagccgcccccacattcgccgtcacaagatggcgctgacatcctgtgttctaagtggtaaacaaataatctgcgcatgtgccaagggtattttaccactgcatgtactctgcctttcccgtgacgtcaactcggccatgggctgcagccaatcagggagtgatgcgtcctaggcaaagaataattctccttaaaaggggatggggtttccgccattctctctcttgctctgcgctctggcgctctgacgctctggcgctctggctcctaaagatgtaagcggggggctttcgtttttggggcttggggcttgcgctcctggctcctgaagatgtaagcaataaagttttgccgcagaagattctggtttgttgtgttcttcctggccggtcgtgagaacgcgtttaagagttggtgccgaaatccgggacgagaaaatccgggacgagaacccgggacgagaaaatccgggacgagaaaatccgggacgagaaaagccgggaagaagaaacccgggacgagaaaatacaagaaaactcgggacgggagttaaccatcaccggcgcaaggaagatccctcattacggaaccagaactgcgggtcatggtaacgaaggttcccgtaaaacagactgttgagaaggattcaactgcgtgaattcagaactcttcagctgggaaacggcggtaataaagtgttcccgcatcacagactgttgagaaggattcaactgcgtgaattcagaacttttcagctggggaacaggagtaccagtgagtacagctttacaaggtaagtctggtcttgaactttctaaggaaagtcaagacagtctatcagaagtaaagtggggaatagctttacaaggtatgcctggccttgaactttctaacgaaattcaagacagtctatcagaagtaaagtggaaaatagctttacaaggtatgtttggccttgaactttctctagtgttaggagcccttttgttccttttcacatgttatcaagtggttaaggcagggctgaaaattctagatgaaattcaggacaatctatcagaagtaaagcggggagagagagtaggagcaaagagaaaatatggtacacaaaataagtatacaggcctttccaagggtcttgaacccgaggaaaagtttaggtcaggtaagaatacctggggagagattggaaggaaggagaaggaaaaagaaaagaaaaaagatcaatcagcggaggtttctaggagaaggagcctatactcatcactaggtgagttcaaggagccagtttttaatagttctgaatcagatgaaaaggctattagggcctggaaggcgctctcccgagcaggtgaagccactggacaattaacaaagatcgtccagggacctcaggagtccttctcagattttgtggccagtatgacagaggcaggctcttgcagcctacaaggtcttattgtccaccctggagttgtagatcaggattgtaaaggggaacttcaggttctctgttcttgtcctcaagttgtcttttctatatcacaaagggacagaatagctcaactaataattttgccaagcctacatggctgtttttccttcctctggtattcctagagctgccagagggattggttctactgaaagtgattctgattacttaataatgcctttagattgttgtcaaattttatctactcctcatgtaggggtaaaccctcgtggcatcaggccattacaggtctggcaaatggatgtcacgcatatttcctcctttgggagaaatcaatatttacatgtttctattgacacctgctctggtgtaatgtttgccacacctttaacaggagaaaaagcctcacatgtgattcaacattgtcttgaggcatggagtgcttgggggaaacccaaactccttaagactgataatggaccagcttatacatctcaaaaattccagcagttctgccgtcagatggacgtgacccacctgactggacttccatacaaccctcaaggacagggtattgttgagcgtgcgcatcgcaccctcaaatcctatcttataaaacagaagaggggaattgaggagactctaccccgagtaccaagagtgtctgtgtctatggcactctttacactcaattttttaaatattgatgttcatggccatactgcggctgaacgtcattgttcagagccagataggcccaatgagatggttaaatggaaaaatgtccttgataataaatggtatggcccggatcctattttgataagatccaggggagctatctgtgttttcccacagaatgaagacaacccattttggataccagaaagactcacccgaaaaatccagactgaccaagggaatactgatgtccctcgtcttgatgatgtccagggcgtcaataataaagagagagcagcgttgggggataatgtcgacatttccactcctaatgacggtgatgtataatgctcaagtattcccctgcttttttaccactaactaggaactgggtttggccttgattcagacagccttggctctgtctggacaggtccagacgactgacaccattaacactttgtcagcctcagtgactacagtcatagttaaacaggcctcagctaatgtcaagatacagggtggtctcatgctggttaatcaactcatagatcttgtccagaaacaactagatgtattatggcaaatagctcagctgggatgtgaacaaaagtttccgggattgtgtgttacttccattcagtatgagaaatttactagggcagctaatttgtcaaaaagtctttttcagtatatgttacagaattggacggctgaatttgaacagatccttcgggaattgagacttcaggtcaactccacgcgcttggacctgtccctgaccaaaggattacccaattggatctcctcagcattttccttctttaaagaatgggtgggattgatattatttggagatacactttgctgtggattagtgttgcttctttggttggtctgtaagcttaaggcccaaactaggagagacaaggtggttattgcccaggcacttgcagctctagaacatggtgcttcccctgatatatctatgcttaagcaataggttgctggccactcagctcttatacaccacgaggctagactcattgcacgggatagagtgagtgtgcttcagcagcccgagagagttgcacggctaagcactgcagtagaagggctctgcggcatatatgagcctattctagggagacatgtcatctttcaagaaggttgagtgtccaagtgtccttctctccagacaaaatgacacgggagccggtcagggttgctctgggtaaaagcctgtgagcctaagagctaatcctgtacatggctcctttacctgcacactggggatttgacctctatctccactctcattaatatgggtggcctattgctcttattaaaaggaaagggggagatgttgggagccgcccccacattcgccgtcacaagatggcgctgacatcctgtgttctaagtggtaaacaaataatctgcgcatgtgccaagggtattttaccactgcatgtactctgcctttcccgtgacgtcaactcggccatgggctgcagccaatcagggagtgatgcgtcctaggcaaagaataattctccttaaaaggggatggggtttccgccattctctctcttgctctgcgctctggcgctctgacgctctggcgctctggctcctaaagatgtaagcggggggctttcgtttttggggcttggggcttgtgctcctggctcctgaagatgtaagcaataaagttttgccgcagaagattctggtttgttgtgttcttcctggccggtcgtgagtacggaccaggtcacactgagattaatgaactttgtgatacaaaatgaatcaaaatcaagttgtgtcatgcctgcccctaagttatctctatagtctgttctttagttatctctgtattggtctcttccttgtccacctgacctgctctgaggcttggcctcaaaagcccttcgctactactgttcttttctggccttaagacctattaaatcttagatacctcaaaccaattctatacaactagaggaaacatggactttcagaatgctatgtctatatttcctcccccaattaaaagccttcaacatctccatcttgcagccatcacagtcaggcttctaccttgtaccccctgtaatctctggagcaaatatcctgcttcacaaacagccttggggccatttctaaggctatatatgtaataaaggtaatttcaaaaatgttccctgcatgtgttgtttgggtaactggttagcagctgtgcacataggctacataggaaagaacattttcacagtagagagcaatggctttctgagcacagcacagcacagggcaggcacggtgtcttactttaccctttacacaccacactcttacatatggtacaaatgttcgcaggaagcacgtgttacttaaacaattagaggaaaccatgaggccattttcatcttagaaaacgaatgtacgggcaatccatggtttaataaacattattgactatgttgaatgagatgtgggattaaagcccataagcagatttcatctggatttcattgtggaacaaatgacccagcactggaagttgactcaccagcttgtaggatggctgagggacttccagaagctcacatagatgacccagaatctctggtcttccttaaataggccaagtcaggagacggagaatctcagccccctgctaacctacaagtcggggacttgccctgattctggctacacaatcccgtgcctgtcctcctgctcactctgtcactctggttccttctgttgtcctcttaattacctccccccacccaccaacacactgactgctgtgttccatttctttcagttctaagatgaactaagcaatggaagaatacaaaataaaaccgtggttttcaaaccattattttttatcatatttgtagagtctccctcctcagactggcaggggattattacaagagaaagccaggcaggattttcctaacaacaatgacacagttccccacctcacaaagtcaccatgaaagcatccaagtgtacagggctcacaagagaatctgcccaaggctaaaccctagaaacctgcggcttcatttcttccagagagctgagaaacaatctatcttggagtgtctgaagaagaagcagggtgtagcctggtaccccaaggagaaagtgtccccacactgctagagttcctgcagctgaaggaagtgtttcttacctagagatttggttcctacctccctaccctaaactcactcttcttatgtcaaccacatgttcaggagcacggaatggctcaaaggtcccacaggtgtcacattctctctcactgtgtgctttctacaaatattttgacagaactcagagcatcttccctacccttcatgtgaccatcctacagtcccactgaatgtcagacacttgatttttctcaagggttctttcttctcctagggaaagaccttccctgctgcacagctcctgccaggttcagcacaacaactctgaatctcagacctgggctcactcctgttctaacacctgtactctggcaggaggtctggttttgatttcccatcccatgagacctccagctttctagctacaatatttgttgggacgctcaccctccatattcacttgtgcattcatagatgctcaccttagattcacagggttcacatggtcacctggttctaactgaaaataataggaaccagggacatgcacagtctgaggaaagacattgtctgagagtagaagtttctgtgtggaaagtgacagtcctgagaaaatgctgtttgggggctaggattggagttactcaattgctgctactgtgcaagagagctgctgcccccagaagcacaatccctcttcctccagccagaaatttctactgtcgtcctcctttgcttaaacaattaagcagcatcatacgtacatagctatgaagaacctgttctccaagagagccatacccaacttctaaatctaaaagaaaggccatctttgctgaggggcaggaaataggtgagtgtcctaacacaaggctggtaaaagatactcagatggcatatcgtggtcactcagaggggatctgcatgggaagcggagggcccgaacactattcttcctgcagtatggctaggatcttcctagagtcccagtgtcatagaacaagtctcattgatttatgaggtcaatgacaaacagaagaaagagacctgagggtatgtgagagcatgtgtatggttccattatagcacctctatcctaatccctgctagaacagaaatctataggacaggccccaagtttggtactatatacccaccaactctccctgagagtggggatgggggggcctgatcagccttgtaatgcaagctcggtagacgttcatactagatatgcttttcttgttgtttgtttgatacaaggtctccctctgtgggcctgactagtcaggaaattattatgtagagacaggtagcctcaaactcacagggatctgtatgcctctccctctctagttctggggttaaaggacctagttagatacactagctttgttaatcacttctatttcaaaagtaatataatcctactgcacagatctattaaagggtaaaacttaaggctactactcaaagaacatctaagaattactgtacatttaaaaaattattatgaataatattataaatcaaaaatagaggaacaataaatttttacctctgaagataaaatataaagggataaggcataacttaagagagcttcgtggctctttgtacattttgcactgtcaatagaaagtgaattttatctcttattgatacaaatgaatccttggaaaggaggataatatagaattaaaataaggatcaataacaaaataaaagcacacttgccagatatactggatgcaagaagctaggttttcacgcgtaggaaaccaacagaatccaagccctcgagcagcaggtacattaattatacccggcacgacacagaggtgtcctgctttctgtcactcatcagacacattaaggccaacggaagaggaaatggaacattagaaggggtcttcttaaaatgtaatttcctagtagagaagtttatgagctgcagtcgctccccattagagcactcctgacccttttattagtgtgctcaccagcacaggccaggtttcaggccagctgtgggcgccaacaggtcatcaggtaggggaccccctagggaatttctggccctgtcctagctatgttttccagatcataatgcagttaacagaagcagtcgtggtgcatttgacaggaggcttttagggtttcccccacaaggcaaatttacagagcacacctcagagctctatggctataaagtgagacagctcattggacttgggaatgagatgattttctgtttgccatatgagctttgtgaatgcctgtcaaagaacattgttgctcctcttgcctttatagccaagttcaatttcttatttagtggtaactgaaggggtgttgaggacctggcaacaaggacttcccagtcagtgagcgagtccatccctcatccaccatggatgggcctctcccaggatgcctatgttgcagactgctttggtgcctcgatgccatctatgtgaccttgttggactgtctcctcttccccacatgtataaccatgtctctgcctctctcctatttctccctgaccctgcagaggagaacgctgcaagccttaccttggtaggtgagctctccagctcttcctgtgagtaatgtaactctatcgttttagcacaatggaaacatacacttggtatttacaaccccatccaaaggaaccagacaagaatgagtagcttaccttgttttaaggatattcagaaactgcaaaatctctgaaaactgtatcagtctgagagctcttaaaaatctcaagcctggaaagaaaaatgaaacagacatgttacttctaaggtttgggtgtcctgctcacagccagtggctgcctgagttaggccactcgtgtctgctcagacagtgtgtaggccttgcagaagataagtgctccagtaccttggacctgcctcttcatttggattcttcacttgtttaatcttagatagtgaatgggctttccagttaaatatgagctgtttgaaaccacataaggggacaagctggaggagggagccctcattagggaaggatcgtctcctctgatgtaaagcccttttcctgagctacccagtagtgtggcagaatttaggtctctgaattatactgggaacttggatcactcagggtaacccttgtgcttaagagcagattaagaataaatcggatcaccttatgactttgagatttttttttttaatctttattttcagccctgataaaataaagactatagcccagagagttacctgtgttctacaatattttaaattttctcccagttaaaagcaagataaaagagaaaggaaaaaaaaaagcacaggtcaataagatatcacacttcacaactttgggattcaacattttaatagttgcattttcactaatgccaattatgtttttcatccacagcctctcttgcatggaagagttacagcttctgagtggagagagacagcaatcaatgaatcgttttagatgctttgttttgtttctcagaaacagggtgtcaggtagccaggcagactacaaacaaacaaaacacataaataaacaaaaatcagtctatagtaaactcctagttctccatcctccaccccccaagtggcagagatgctctgccacagccagcttcttcctttgtcactccttttctttctttaagggtcactctctttctgtctaagtcatgtgacaaaaatgatcccaataggccgtggatcttaagatcttcaccactgccctggagccctgctcgccaaatgacatccgcaggcttggggagcccattcccagggcatttcctctcctgggcgttcaaaagcacctcaagggctaggcgtggcccagcatagtggactgagctggcagctatgtgcacggggtgagaagttagtctgttcgccttaaggagaccgtgaaggaagtttaatgtgcgcggtgagatgaagcaagccacgagtgtcactggcgagctcacactgctcctccacaatgaagcctgggtgctgggtgccttgaacaaaactggcccagtgtagaattgtcttgctaacaagtcaaaactaagctacagttcagagatggaagtgctggacttacaaagaaagagggagagagtgatattggctcaaaggcagcattgctcatcagaaaagaatccatccttgtgaagaaaaggtgattttcagaaggcatattcctactttgctaaagaatatatatatatatattgttaactgcaacaggcaggcatgagaatcaaggtaggtgaaaggaaagaggtttggaagctgagaacacaaccttatcagactgctggaaggctgtccaacacggccagaatccaaatctgaacagacattgcctcaaaacagtgaaaacaatgttgaggtttgatctggtgctatgtactgtaatgctgtgtgcggcccccaagacctggttgccccaaagatggcagagtccttttctgcttgtagacccaagagaggctatgtgatcttgccccaagttatttctgattgccgaataaagcctatagctgggcagaattaggcaaggcttagtattctcagtcttggagttatggtagaccacaaggcaggagagaagaaggtggaaagaggagaaaaatggttaggagtcaggacactatggccccgagggatggccaattggagttaagagcagcccaaatgaagcatagtaaataataacttgaggttattgatgggaaatagattaatagcataggggatagatatatacccaacattaatgctgataaaggcttattataaatataaagatgatttgtatcttttatccaggaactgaatgatcaaaggtaggggtagaaattctatattgggattaaattgtttctacagcaacaacaaagaatcagggcctgaggtggggggggtggggggggcagacacaatgcaggtaaatgcaggtaatggcgtggagatcacaggaggagtaaaaggaagtacagacaactccggggtcaaaagcaacagccagaacacagtagaaaagaactctctagaaatgaaaagaaaaatggtatgaaattaaaagagcaaaatatatctgtctgtttgtttgggtttttttttccacgttccaagtataatactaagttaaacactgaatataagcatcagactaggggaggatattaaacaggaagtgttagatgctctcatttaagtattacgagttcccctgaagctcacatctgaaaggctcagtctctggctgtggcatcagcgggaaatgtgctttacagggaatgttctgaaaaaagatgttggaaccccagcctcctcttctcttcctcacttcccagcctcctccagatgaagagctccattctagcaaacactctccacagtggcactgagtccgaaggaacagccagtgaccatgactgaagcctccgaaattgcaaccccaaatccaactttcctacgtcttggttgtttatctcagatgaaaagctaacacactgataacacttgagcaaaactctgaattttttaacaaacattttttgacaactactcaagtaactctacaagactaaaatcagcaactaaaacatttttgaatagcccatctttgatttctcaagttgctcgaaccattcagtcagtcagtcaatcaatcaatcaatcaagacattaaatcagatcatacatagaaggttggagaatacagtttcacatttcaggccacccagtgatcttacaacaccatgtcataaagtgagaggtactgaacttgaagtagtcatatgggatagacccactagcaacatggcagctgttcctgctttagctacacatgctcctctttgtgtgcttgtgtgcacagttggatacatacacacacacacacacacacacacacacacacacacacacacacacacacatatatatatatatatatatatatatatatatatcttcaaaccaatgatagagtaccactgtcctaaacttcttcttcttaaatactggtgtttgcagattgccacatactaattaatgacttccaagaagctaggaatataaggaatggagggggcatagagtctatctaggtcatgattagctttaactgtcagcttgacacaaacctagagtcatctgagaagagagagatcagctgaagaaatgcccagatcagactggactgtgggcattttgtgaggcattctgctaattgttaattgatgtagaaaggaccaatccaatatgggccgtaccatccctaggcaggtatgtttgggctatataagaaagcaagctgggcaaaccagcgaggagtaagccagtaagcagcattcctccatggttactgcttaaagctcctttgagttcctgccttggcttccctggataatggactataaaatgtagaaactttcctttataaatggcttttgatcacagtgtttatgacaacaacagaaagcaaacaaggacaacctataatcttgttagggaagcctgcttagttagccctgagtgtcttcctaatgggaactacccagaagactgtgaaaaaccaagtgtctatggaaaagaggggggaacacttggcttctcaaagaagtgtttctggagtggagagtacccagaccccaaacttgtggtcacttctctgaaccagatcaccatcagaccattccaggtccaaactgggctgacagaagctgtgccattttttctactgttgtggcaaaacatcatagaaaccatcaatgctataaagaaaactcatattttgtctccgtttctgaggtctggccacctggctttaggcctgtaatgagccagttgaacatcatggggctgggggtggggttggtagaaaaagcctattcagatctctctctctctctctctctctctctctctctctctctctctctgtgtgtgtgtgtgtgtgtgtgatgcagtgtgagtatgtagatggctacagaggtcagagatcaatgaacatgttagtttctgtacaaggactcaattctgctgtgaatgagatgtaaagcatgtatagtttcattgctgggaaattccgttcatataaatagaccacggggattagttggctacagctgcttgggtctgtgaggggcctgatgttctgtgctgggaacaagctctcggctgaggctgggctgttggtcaggagatcgcactgaggtaccagcccatggattggcagttcctgcaccatcctgctgcatctgcaggctgaagacgaaagccagtacagagtttgccacccagctcaggatattctaaatgaatagtcaggggtacagtttgggcataggacatttgaaagttcagattctaagatgcaaccgtgtttgggaacctctggtttagagtatcttttcgttttaaaccttcaatttgtcaatccatattgacacattcatttatgctgcctaaagaagcatgctttatttggacatgcccctccaactcccctacatcggagtaatggctgagtcacttaaaagccaataaagccaacattttccccactcagcacactacctgtatatatgaactcaatttttgaggaacatgctatttagctgccacttaaaaagaaatcagcgttgtaatgtgttattacgtacagcacagagcattcagcatttggcagagattcagtgggggggggatggtcagcagcatgaagagcacttattaattcatgtttatggttaaatataaaaaaagtgattggataggcaagtcatagcaaagaaaacaagaacaaaatcaagactagattacgtacctatgaaaccaaaacttatgctagtgggaatggctctaaacatcagaaactctggaactccagactaacaaaggaaaccattataggtgaataactgagaaacgaattgaaaaatatagtgatctcttcctactcgaagatcttatacccatttaattcacttttaaaaaaaatgtaaaactacactttttgcaatagatgcaagaaagcaagggacagaacccctcacgggtctcaaaagaaattgcttctgccaagtaatgtagacagaattgactagaagaaaaataattcctgcagaaataggatataggatgcagtaagagaaaacataaaagcaactgattgtctgtatgtgaaatgagtttttaaaaaaataaataataaataacagtaatctaaagttaaaaacccctacaacaaagtgaaaatgaaataaggaaatgagaaaccaagagaacagagacagagataacaacattggtgtcttgcttccgtcaagggaggacatcctgggatatatgtatacacacacattcacactcattactcagtaaactactctttaataaccattgaacaattaccaaaactgaccacattatttggtcacaaagaaatcttattaggttgaaattacagtagccatctaagttagatttatcacaaataataaaaaataacaaaagaataagaaaaataaataagcatatctgagaattgtggcaagtgcctttaagcccagcacttgagagtcagagacaggaagtctctgtgagcaagaagccagcctggtctatagagagagttccaggccagcctgggctacacagtgattcctggacttaaaacaaacaaacaaaaaaaaaaaagaaggaaggaaggaaggaaggaaggaaggaaggaaggaagtgatggagggagacaagtagaaaggaagggaaggagaggggagggaaggaaagagggagacaaagagaggaagggaaagagggagaaaggggacagaaaggtaaaaagcagagaaatattcttatataaaaatattctttacatagaagttaacattcgataaagaactaatcacaagttgagtgtaagattaatttctaggatatttggtcaacagctgggaagaacttcagtcacgtttcatcataattaaaaatgattcaagatgagttaaaatccaatgtaaattctaacacagaaaaataatgaagcttgcacacttactaggccatctatctaaaatgagaggcaaaaagaagcagacaacttctgaaatatgaagttcacgactatgaagtaagatcaaatttctgcaagttttaaaacaaagattcccagctaaaaatgatacaacaataaaagcggcgcaacgaagatcacttccaaattaggaatacagttcagtggtagaactcatacgtagcatctgcaaggttcttgacaaaatctttagtatttcaaacagttaaatttttgtaattttattattttgtaatctatttttatattacagttgttatccccctcccagtatgccctctgactgatcctcactgcaaactccccccaaatccctgtctccaagaggatgtcccccacccctttcacccccaccccaccagacctcctcactccctggggcctcaggtctctctagggttaggattaggtacattttctctcactgaggccagaccaggcagtcctctgctgtaaatgtgttaggggcctcatatcagctggtgtatgctgcctgggtggtggctcagtgtctgagagatctcgggggccacttccagtagaaaaacagaggatcaagtggagggatgagattgctatcccacagtcaaaaactctgacctagaattgttcctgtctaaaagaactgcagggacaaaaatggagaagagcctgagggaaaggaggtccagtgacaggtccaagttggaattcatctcaaagagaagctccaaagcctgagattattactgatgctatggtatgcttacagacaggagcctagcatagctgccatccaagaggcccaacaagcagctaaaagatgcagataattacacccaaccaatggacagaagccagggaccctgtggttgatttagggaaaagctggaagaagctgaggcagagggcaaccccatagaaaggccagcagtctcaactaacctggacctgtgagatctatcaaacaggttattttttaaaaaataatttctttgactgtaaaaagtgctctatgctcaaaatatcaaaacagaaaatcatggaacagaaaatataactaggaaagagtcatttgaatcaattatgtttggttgaagtggaagaaattgtatcccatgcaaaactcaaatcaaaacagaccaaagacttagatagagagccaagataagacccacccatgttccagcgtgaatggatggaatttaacacgaaacatatgcacaatgggatacagtgtagggataggagaagaaaagcctgtttggatgagcggagaggacatgttacatgagacaagcagatgaggagaagtaaatattgtctggtctcactcactctttcactgaacctgaaaaagtcaatctcactgaactggagaccagacagtgggttcccagggggcaggagcagctcagagagacacagctggtacgacacagctcttggctataaaattccagttgggaaagagggatcagttcgagacataccgtacaatgtgctgacgataatcaatacatgtgctgtgaagatgcttttgagaggttgaagaaaaaaggtgatatcacacaaaatgcagtaaataccatattcgttgcataccactagctgcatctctgagttttgttttgggagacgactgcaacaagtcttataatttgaggatggaattacaaattgatagaaaacctttttagaagtaattcaacattatgaatcaaactaatctcatttccggtaataaagcccaagatgttacaaaaaattctgtaggagcaaagatgttcattgcaaaattattcattaaggaaaagagaaagcagcttagcactacagtaggtctccttaagtatatacagcacatcttctttacagataatgcgcatgcacaaacatgtaacaaggaacacacttgtagtgttaagtcacaggaggacatagaaattagaatggcaggtatcaagagctaggaaggacaaaaacaggaattgtttaattcctacctgaactctaataccagtccttatagccacaggtaagtgtagctcttagcccttatcaaaaagctctctttgcatcagacagaatcactacagaaaaccacttggggtcaagctacagagaccaccaatcatggggttcctgtgcccaatggatacaatacaagtcctacactcaagatatggggacaatcataggaaagggtggaaaggttgtaggtctctagcctcttaatcaattattttttgaagtttttttttttttaggtagcaacttgaaaacttttttttcaaaaagacaaaacataaagtacgcatttcccagtaaaactataccttataaatatataaaatttatatatatttatatttaatgaacttattacctttataagattttttttcctatataagatttgaggtattttccatttttaaaatattttaaataacattgatgttaagattttagttcataattactctgtggtggcattgtgaagtcagtagcaaatcaggactataggtccagttttcttggctcttagtcctgtactaagatttagtcaggtggagccactgactccaggcaaggaggcccctcagtcaaggttttcctctcaaagggttaaatttggtggcccaggcatgaccccaggttagagtctcctaagaactggggctataaaatctcaggagtaactgagttcagatcaagagatttaagtgccctttcttagatgaggaatgagaagagataaacagataaatgggtaattgattagtcattccttgttcagatccctggtatcccagaaattctgtaggtctgaggtcctgagagaacacgaggcagaaatcacatgagcaaacacatctggcctgaagcagagagcctgtccaggctttgcaatttactattcccctttcccttccactccttaatcgttaaatccaaggctggaaggttctaagaagcctctgtagtttccaattcctacagcaccatgcaaatcccagagagcaattatttttgtggtatctgacaaggtcactgtcatctggccttgcagaccagaggaaggcaaatcaaaactgtgagcaccagagagaaacgagctgttccctgcacaggggggctcttccatggtagtctcccatagcttaaccattacagctccaccgtgtatcctcagcctgggtgctgctggggccacctgacttttcatcccaacctatagttaaactcttggctttccttcctaggtggaggtgtaggatctgtgtttctcactcccaaacactcctagaccttcattcctccagctagaaaatgtgttatacaaacactccttgcctgtgtgtgcaacatgcttagcaatcttttcccagggagatagtctaggctgctttgttctttacattttttcagccctgactcctgtctgacagatactaaatatcaggtcacggtcacaatgagaatgacaccttcccattgacccattcagtggctcattcatttgccaatatacttgtgctagtttctttcctcttgaacatcccattgctcaaagccctcttgctagtgacattcacactggttctcaccaatgctgcttctgcagaagcccatagcaactctttgcaataacgggagagggaatacagcaagccaatggacacagtcacatgaatatcttgactctagacagttcacctgaaagacgtccttttttgtcattgctaatgaaaaagtttgactagactcacccatcacttgcttgctaattggaattttgctaggtctaattagattacgcagggttatttgagctgtgcctatccacatcagaattctaagctgggttccaaggggacaatatttcattttaaagaagcgcctggcactgctgatgttctggaaatagagctaaaactgggattttttttgtctgaaaatgtaaatttaagccatttatttgaaactgttatgcattatagatggacagacaaaaccaaatccctattattggaaggtagttgagaaagaaaaatctgctgaaaggtttggctcctaccatgtacagataatgaacatcacacaaggcaggcaggcctgcactgccagagtcccactaaaggacagagggaactacagcacctactgcttgtctgggaaagcatcatctatgcctcttcaggaaacactgaaatttacattaaaaattactgctgcttagtaaaagaaggtagcaccagtcacctgccaaattttcccgtgggctctctttataagcacaataacattcaggagaggtcgaggctggttaaatccatctaagaaggaaggcagagatttcagtctcgcctggcacattttggtatgccaacaaaacaggaaaaggaggtggcactatccgccaacacagacacacatacacacacatacagagacacacagatacacacatacatcccacatgaacatgcatatacacacacacatacagagacacatagatacacacaaacatcccacatgaacatacacacacacacagaaacacacacatacatcccacatgaacatgcacatacacacacacatacagagacacataggtacacacaaacatcccacatgaacatgaacacacacacacagagacacacagagagacacacatacatcccacatgaacatgcacacacacacacacacacacacaggtgtatgtgtatgtgtatacacatatacataccattcacatgcattacacacagacacagacacatacacatacatatacacaaatacacacattacacaccacaacacttccttaaatgctgtgccgtggaagggcaatgcctctgggaatatggtacacttggaaagaatgactatagctaggaagaaccttaccccatgaagcacaaaccctgctgcaagccaccagtgactgccagaagttctctggttcttctttctcaggagccgctggcccagacctcactctgtagcctttgtggaacaaatcccccagagacttcctgcgacgcctgctaggagtgtgcacctctgtggtgctgctgctgggtgggtgatggtataccagaattttactggggatcatggcagaggtagagaggaggcctgagctgtagatgccctttagatctgttcacgctcaagctgatgttcttgaaagatatggaaggagtttatgcccctctgacctgtcctatggacaagttcttttgccccacacagtgtgtttcaatagcatctatgacttctcctaccaccaacccgtttgcaagtggactcagatgcgccagccatatcgggaaggctagagagggtgggagaatgctcccacacgttatgtcctacaagcttatctatccatcagcttcatcctgggaattaccatgtaagctcctttggacatggcttaggggatgggaaaaggaaaaggctataatccctcaaatcagttgcttcagaacagggtgtgagaggggctgccacttagggctcaccaagtcacttcttttatgtgagtgaccttacttgacactggcggagggctcatagggaggacttctttataacatgtgctacacagagagaaaaacaggaagactctaactcttctgccacaccttcctcttaccaacataactcaattatgaaaatcctcttcgaaggcactctgcttgccagaggacagtgagcagagtcgccccatcagtgcacctaacccattccccaacaccccccgtcctcagcaccggctctcttattaacctagtcttggtttcagtctctctcccttaaactacatgctcaagctctaaattcaactaggcagcatctacaggttctggctttaaggagagagttgggtttgcctgaatccacgaaggctgcacgtccaggatgtaattagcacccttttaagatgagacaccggtgagggtattccttcctcccttctgccattccagcactctgtgagaagcccttcccctgttgccctgatttcagactccagcccctagaaatgtggggaaataagtctgtgctctttgagccagctagtccatggtgccatagcaacccaaggagactgcatctatatctccagaccaaagtgtacacagaaacacagcagccacggagggaaaagcactaagattcaaacagggggatacttagaatctgtagcttaccacaattggtccccatcactgtttccagacctctgggagagttaaaataaccacatagaattttcatcctaggttagctctttacctaaccactgagtgtaaagcatttgtgacacacagggtattatgttggatattgagcgattgtgcaatctataaagaaacacagaagtccaggagagatcaaattacaggagagaagagaacagaaaggcttcctacactgtggtttacttaatgatttgcttaaagtcttccttttgcggttctgagtatgtacatatgtgcatgctacataaatgtgtgtgcatgtggaacatgttgtgctgtgcctgctagaagatgcttaacactatttctggatcatgattaagtaacagagaggcagttgaatagagatggcaaagccaaggatgcctatagtcccagcatgcaggggcggggccagggccagaagggggggggggaagaggggggaggggaggggcagaggcggggctagggcagggcagaggcaggggcagatctatgtcagttcaaggcccatcttggtcttcatagaaatttccaggccagcgaaagatacacaataagagtctgtccaaaatacatacatacatacatacatacatacatacatacatacatacatacataaataggcagggaccagggattggaagagagggaggagcataacaaataccttgaagatggaagaaatggccttgctctcttggcttaaaaaatcttcaatgtgtttaaaatgacataaaaatgacaggaagctaactttgtaacacaaggaagtcagaaatgatggacagaaatgtaagtcctatgggaactcagggaataatacaaaaatatgaagaacattatatatatatatatatatatatatatatatatatatatatatatacaagttttgacagccagatgaaaggattatgctcctgtaaaatcctgtaaaagtacaactttctcaaactgatacaataagaagtgaagacataaacagcagggctttttcttttaaaattttaaattccaattggaagcaaactcataaaaaccaggttttgactgaattggcttctattgatgagatctctcaatgtttttggagagaatgatactggtcttaatggtttctttcagagaacagacgaaaataaaatgttacaatttatttcatgtagacagaagaaccagaatgccaaaccctggtgagggcattatttattcatgatatatattgatctgcatgtttaataaagttcaaaacttgttaaaatataaaccatgagataatatttatcataaactgatatatcaaataacttacagagctacaaaataaaagtagatagatacaactagtaattcattgccatggctgtaaaattaggcaataacaccccctccacataactatatacattaaatgctttttattctggagataccagtgatcaaacctaagactttgcatagacaagcactctaacactgaaataaagcaacatcctccatgcagattaaatacaaggagaactgcactgttccctacccaggaacttactcccagcagtttcctctgtctacacaccaaggctctagggtcaagccagatgaccccacatgctgttcacaaaagctctgtcataactggacaatatgatgctctgctatcaacagcacaagttcttatcagcccatgaggcaagtctctggcttcttcctatgacgagtctttcagtttgataatgccactgacatctggagccgctcatgccatgtggatcattggggaggcatgtcatcttgggcacatggtccataaaagcttttcaaacctaatctccagtctgagactcaaaacacacaaccaaaaaataacaaagaaactccttgataaatctgagtgtcttgaaacttaaaagggaggacccagagggagaagccagctgtctcggttctagggaggctggggcaggaggatcatgaatttggattaagcctgggcaacctgtcaaaaagaattataaataatcaaataagcaaatgtatgaatgcttaatcaaaacttcgctgtcctaggaaaatgtacaaggagtgatggctcctctctcgagcatggatctatagaagaaaataacaatgatagcgaagaatcaaaacccaaatcttgacctatatacggactttgcactcctcctcccagcgtgtcccaagtactatcctgagtcttcttccccagggagtcccaagaggccttgttgctgaaagcatttggttgctaacatgcaatggtgaccttcacccatagaaacccccagcctttcacttttgcaccagatttgcttccttaagagatgagtgatcatgacaaaagaacagaaggatattaattcatccattgaaaaatgttgatgaagaaatagattcggatatggttgggcacctcaatgaagtcatactagatagtatgcccagaccatgtaaaagtgatggtacattcattcaaccatagattgtcttttattaaaaatctttcaaaggaaaaaaagaggaaaggcttaaaatctgggctaagagatgtaaattccagctttggtttgaccctggtagtacaggctgatactcatagctacttaaaagtctgaggcagggggattacaagttcaaggtttgccaggaatacatagtaaattagagaccttggtaacttagtgagaccctgtgtcaaaataaaagaaaaataattaacagagctagggatataaccaaggagtagggtgcttgcctattacacacaaagccctgaggtcaatatctgtaaatcttatactgaaaacaaacaacaacattagtaaaaaaaaaaaaaaaaaaaaaaaagttctccagcacagctagtatttgggaataaactatggcacatttcttcaactcaaagtagctcagtagagctgttttaggaaacaaacaaacaccatccatcacaatcatccttggcacataacacaagtggtccagatatgcttgttgctgttggtaatatgagggagatatggggccagacaagctggggatacaaatgtgaattgctatcaaatagttagtcttcaagcagcttcccatcttgtagagaacattaccatccatctttgtatttagctaggctagcgctatagtttagatgtcagatatccctcaaagatccatgtattagcagcttggttctcaggatagcattactggaggcaatggaacctttaagaggtaggcatctgattaggggtctttaggtccctggggacaaatggggatcataggacactgtctaggttcttcttcttcctaatagttcctagccatggagttaagggttttgctacattctcatgacacagtgtcctgcctcttcacagaccttaaagcaatgaatcatagactgagtccccaaactgtgaactggaaataagcctagtgatctcaggtatcttgttacaaagatgctcacctttagttttactttaagggaatatccaccttagccctctttccttgaatgttcactgatactcttcaaaagagatggtattatgcaggaggtacatctagggtcagacaattatactgaattccagctctgctcctcggtgggactgaaggctggttctatgacatttgcaaaccttttactgctaaagacagcatcatccttctaaggacaagactgtgatgattagtggatctcatatgtgttttcaaatgtctcatcatatagagcatgctacataatcactcctgttctccaaagtcccttgcaggtgctcaatggattagtccccactgaagcaaacatctttctgagagttgttgaccacagtgggagaggaatgtggataaaggaagaaagctataagggaaggagggaggtcaattctgaagctagaagtgaactgatagcctattatctgctgttggcaagtaagttctatgcttaaccaattaaagagtcaaccaatgcctgtggtttgaagcagagaacatgaatgttaaggctgcatctattataaccaaacatgtattccttatgctatgacttactaccagagttccagttcggtcaaactcaatgccattgggtcaactccttttctctcttgctaaaaccaaggaccgagcacctgtgttgtgtgatcagcactcaggatacaaggaagagtgtgcttctcttgaatccttgactgaactattcaggagactcttgccccatctccagtcacatggcttacccatctccctggtccttctctccttcccctttgctctatccttcctccctgttgaacaataacctccttgattaaccaagcatctagcaaatcatatccagcacatccccccgcccccccgccccttcatcagatgcccataaacatcaccaacttgctggtccttgctgttgctaccgtttccaaggcaatggcctgagaggcactgtggggactggcataatgtgtgtaatattggggataaaactgtctggactcattcaatctcctctgccctgagagatcaagaaaagaagtggaataatcccctctaatctgattcctgtagggagccccaactgggaagctgacacatggccctacacttccctccggactaacatttggacctataagtgacagatggccatctgaggccactgaagtacccataggttagatttttttgagatctggacttgagcatactgcaggcccaaatatatctacatggttaaacaccagcaacaaggaatacataaagacaaacccaaaacattctaactgtagggggggttggacattattgggtgcctcagaatcaggagaggaatgagaagaagattctttcagaacaaaattgaaggaggcattctgtttttcagggtgacgctgtacttgaacagtcttgagagtaggagcctccttaaagcttacatccaggcctttcccttgctttgcgctggtctcaccctgcctggacaatgagtctatagtggaagttcatctctgaaatggcctcacacctcctgtcacctacggcaaggaagaagaatactgggttgtaataatcatgatcaggaaaagcctacaaagccgaccaaacgatcaacctcattctagaattaaatccaagcagagcgtcggtgccagaggctttgagtaaagactgaggagctgggtgaattatggcttcaattacagtttacaaagaacagaggtgatccttccaagtgggaactcttgatttagctttctctattaaaaaaagagagagagaggaagaagaagaaagcagaacagcagaacactgaaccttaggtcagaagaaacattttgcaaaagcccccggtttactataggattaagctaagtttcattctgatgctcaaaattaactttaggcgaacctgggaaatggacatggcgtgacctctggtgggggcggagagcaatttgacaggaggtgctgtcctggctgactttgctagtgtattccaaggttctgcattaacgccatcagcttagaaaatccaaactagacatgtgtgtgtgcatcacacgagtggtgtgtgtgtttgtgcgtgtatgtgtgtgtgtgtgtgtgtgtgtgtgtgagagagagagagagagagagagagagagagagagagagagagagagagaaaacagatggtgagtaaccctgactttatacattatataacctcaaccatggctacttagtcttgccttaggaatgcaaaaactgaccacaaaaaatatgaaaataaagatcttggctatgagccaaaaaaatttattccctcacacaggttggtggatccaattcagtcaacaagtcatagtttgtcaccttttgatgaaggcaatgcttggaagggagaaaggagtgactaaggatcaacaggttctcccagcttccctaagaaagatgttgggacattttttaggtgcttctcagccattctgtattcctcagctgagaattctttgtttagctctgtacctcattttttttaatagggttgtttggttttctggagtccaacttcttctttatatatattaaacattagccccccccccccccccatcagatttagggttggtaaagatcttttcccaatctgttggttgccttttggtcttgttggcagaataagacctttgccttacagaagaagctttgcaattttatgaggtcccatttgttgattcttgatcttacagaacaagccattggtatccaacatccttaatcatcagggaaatgcaaatcaaaacaaccctgagattctacctcacaccagccagaatggctaagatcaaaaattcaggtgacagcagatgctggtgaggatgtagagaaagaggaacacattcctccattgctggtgggactgcaagctggtacaaccactctggaaatcagtttggcagttcctcagaaagttggacatagttctaccacaaaatccagcaatacctctcctgggcatatacccagaagatgctccaacttgtaataagaacacatgctccactatgttcatagtagccttatttatagtagccaaaagctggaaagaaacccagatgtccctcaacagaggaatgaatacagaaaatgtggtacatttacacaatggagtactactcagctattaaaaacaacgagtttatgaaattcttagacaaatggatggatctggaggatattatcttgagtgaggtaatccaatcacaaaagaacacacatgatatgcactcactgcatataagtgggtattagcccagaagcttagaatccttcttagaagggggaacaaaatacccatggaaggagttacagagacaaagtttagagcagaggatgaaggaacaaccatacagagactgccccacttggggacttcatcccataaacaaccaccaaacccagacactatggcagataccaacagcagcctgctaacaggagcctgatataactgtctcctgagggcctttgccagtgcctggcaaatacagaagtggatgctcacaatcatcctttggacagagcacaaggtcccccaatgaaggagctagagaaagtatccaaggatctgaaggggtctgaagccccaaaggaggaacatcaatatgaactaaccaatttccccagaactccttggaactaaactaccaatcaaagaaaacacatggtgggacttgttgctcttgctgtatatgtggcagaggatggcctagtcggtcatcaatgggaggagaagccctaggtcctgtgaaggttctatgtcccagtatatgggaaggccaggactgggaatgggagtgggtgggttggggagcaagggaagggggaagggggtaggggattttcggaggggaaactaggaaagggaataacacttgaaatgtaaataaagaaaatatctaattaaaagaaagtggggaaaaaaaaggaaagatgttgggaatgatcacctattggtaactctttctttttcctgaaacactcacaatagcacctaagattcacttatttaattttcctagaacaactcaggtgcatataaataacttccactcatgcaaatgctgaatactttgagatcagcagcaggaagcagagtcaggaactttgcatttgcttagagtcagtcagcctgctggactagagtgctttacttctgatttccacacaggagcgctttcgggttatctttgtaatgtaaaatgttaaaagagagttggtttcttgcaaagaatgggtagctgcctctcaaaatgtggggtttgaaattctagttggtcttgttaaaaactccagccaagattaagctagagggactggagaaatagctcagtggttatgaacacttgtcagtcttgtagaggatcaagcaaccatatggtggctcacatctatccacaactccagctttaaagaatcttatacattctcctgcctacccaagggaatccaggcaaacgtggggtgtacatacacatacactggcaaaacgtatgcataaattttttctttaaatcctaaactaagctagaactcccttttcttaattctaaagtctttgcatcatgtacttattttagcaattgttttccatatagtaagtataaaatttttatcggtactcttgtcactaatatccactttttggtgacgttcactaattggctattaaaactctgtttactggtatacactaggaaagctggggcagcaggacacagattggatctctaaataaatacatgaagttttttaggaatgagaaaagagatatgctcaccttttgttattaaatattttctaaactcatttaagcagttaaaatattatgttaggcagcttctttcactgctgggatgctgtgttcacacccactacctcagaaaatatccatgtccaatcacaaactgcatcctgtatcctagctgccccctaggtacaaggaggtcaggaatgtcaattaaccattaaccattaaccaacaaatctgtctgcctcaaccattcaatgaggatagggactaacatttccgtcctctcatggaaccagtgggagaggcccaagagcatcagccttaaggtcaagtggcaacaggtgacatcttagatgtcctcacatcttattgtcccactgatgaagatggatcactcttcggcactgactcttgatccttgtgtacaacctacacatgacaggaagagtctcacagataagaaaaactccagcttcttgggctcagactatgaaaatgcctgcagggtcatgatttatgtgaagatgagtaaggtacatttactgctttatcagtctcagtacgtggagccgcccctcccaccacagtggaactgcaagcgtaaatgtccgctgcactcactttgtagtttatactgtgtgtgttaccaacagcctgcactgtgggcctgcaaatcaaatcaaaccaccattattctggactgattatccaattaaaggatgaaataggccattcttttcttcttcctccatcacatgcctgcctaatagtcattgtactgactgcaaggaggacccacggaggaagtaaacacgcgtgcatttcacacccagtgagctaagcgggaggatacaatggagctggaaaaaatgaattgctcagccttaagctgcagcatctatattacacagtaagttttttcctgagagctgctcagtgagaaatactgtaaggcatgatgctgtctctctagaagtataaatagtaacccccccccaaagcaaataataataatcagtcactcattgcaacacactctgtattctaagagctctccaaaacctgcagatactgcaaaaccatagggcaattggcagttcaaatgtctttgcatggaattctttgatcagcactgccaagggaaataaaaggacaatcaaaagtaaactgggggtctctggtgactatggcaactggaggaaataagtagtctctcaggggtgcttcagctcaaggccttgccttcaaggagccctgtgcaccctttgggattaagagacaggagggacctgagagttttggtaatagatgacctaaaaatgtcccttctagatctgtggtagtttggatctggagtatagcttaaaagttcctgtggctgggagaagttgtctggtgaactccagtagtcagcccatcttctattccccagcagtgagtttaccacactcagctttggccctggagcctgggatccatccacactaggtcccaaggtttgtgtagcaaccgttttacagaatgactccccagcaccaaggcttatatgctaaaggcttggctgccaacatgaggcattactggaaagtggtgaagcctttggaagctgagacacctggaaggctgtttgatcttgagatcttgcctttgaaggggcttttgagaccataaccccttcctgtttcccttcttttccagtccccagaaggtgagcagttttgctttgttgaatgctcctacacagatgttctacatcctcacacgttcaaaagcaacagaaccagcaggccatgcaacaagacctcagaacctatgaaccaaataaaccttttggccttgaagtcccttatgttaggtgttttgtcaaagtaatgaaaagctagcacaagatcaagtttctccacactgtagctctctgcttcagaaggtcattcgacccacaaagaaatattaggactaaacatagccaaggtattaaaaaaaagttaaaaaaaatacccccataaacctgcagtttctatggctcctttgcaactgggaacaaacaagagccttctctgagcactgaatcagtcatggaaacttgctcttggctgctgcagattctgccctcccagctgggcctatgtacttgaaggctgaagcacatggctcattagaattcctaattcctgaatgatcccacttaccccagcaccacagcatcaggaacaagatgttacatctcagcgcattcaccttgtggatggatcgttttatagaaatgctaattgtacttgctaattaagagagaggatttcttaattattattatcccaggcagtaaaatcatcaaattggcaaatcttgccattttctcttgcatgtatcatgaacagaaatctggttcaaaatcaatctgctgagttgcttccttggggtcttaggggtcacaaaagagctgactataataactcctcatatggaggtcagtacaagtctgatccagaaagggactcccggtcttaaaagaggtcaatctccatcaccatcaacagacagtttgtggaactgagcggttactgtgactaagggcgaagacaggtctggaactgtttatttctgtatattgcaagagataaggggttcaaggacatctcttacaccttgtcagtttattacctgggataacaaaagccatgaaatatgtactccattggagtcttgattacattgaaatcttggctctaccatttacatacagagaccttctggattctctcccttcccttctgtgtgcgtgagagtatgagcatatatagttgttgttttagaaagtgggatgttgcagtttgcctgcccccactaagtagaacctgaaaaaaacagctctaattatgtttttttggggggagtcgatctcatgggccccaggaagggaatgaggaagtgaaaggagagacgtttaaagcagcaataaagaatttgcttgcacacaagtgtcatcaggagtaactgaagcaccaggctcccagggaactgtagcaggcagcaagtttctgcacatgactgtacatgtccatgtgtgtggctttcctattgcaggggccaggggccaatgtgctgctcagtcactgattacctctatcttgttcttgcttaaggagtttagagatcatgacctataggaggcccacaggcagcattcagtgactacacaatgagctaatgcctgccatgcaaagcccagtacatgaatgaagagtaatcaccaaacccttactgtggttgaacccttcttcagtctactttttacagttccttttatcccccacaacatcttatgaaaggtgattgtattagttagggttttactgctgtgaacagacaccacgacaaagacaactcttacaaaggacagcatttaattggggctggcttacagtttcaaaggttcagtccattatcatcaaggtaggaaatatggtagcatccaggcagccatgatgctggaggaagtgagagttctacgtcttcatccaaaggaaaccaggaacagattggctcccacgtggctggaaggagggtctcattactcacccccacagtgacacacttcctccaacaaggccacacctactccaacaaggccacaactcctaatagtgccattcactgggacaagcatattcaaaccaccacagtggtttagatcatcttataggagggacagagaaagaggaaacagatttcttacagctacctagacatcaggggatgaaaaggggattcaaggctacatggtccagctccagaggctattggctgacctctgccctgttctaagcatgttcatttactgctcaggctacttctttcatcctgctccagaaacatggtccttcatgaccctgaactttaagacaagcacttttgtcctcagggaggttctccaccataaggagttaagtggaatcagtagaagatgctgtagaaaatatacctagcttgaatgctggacacctaaaaagactttgctaagaccaaataagaatgggcatcacagaagctgaaggggaggttataggaccaaagtaaagaagataatatggttagcaaatgaggggcaggagctgcaggaaaggcaaatacatccatattctcttcattcacagccaaaagtccacccacaccatagtggagcaaacactacagttaaaggaaaacatggctctgctgtattatttttctgaagtgctttcttacaaccacactagcaatgtcttaaggacaaagaactagcaattcctatttctctattttttttctatgctcaaggaaacaaatttaacatttttacttctaaaaaccaggtatactacaatatactataagatttatatatatataatgcgtggcttgtttaatttttcagcttgagatagggtctcatatgtcaaagttggccttctaagccttgtctacctccctccaatccctaagtgctaggactatgaataagaatgggccatagttgtttgacttctttctctttccacatatacaatcatctccaagtgatacaatcatttttttttattgtttgttgtgtccacttccatttctttccttatttttttaaaataaaagtacaaaatagtattttgaaaatacttattgaagatgcccaggcttatctaactgtataaaataaaagacatggaaccaaataagagctcccttaacttgagctaagtggatctggacccacttttatgaatcaagcaaaacacttgaccccttgtccttcccttgagggaagctaaagtccacagctcagtggacaaactaggaactcccaagcacaaggctgcagtgcctccaagctccactgcctttaatgggaacagtatcctggggcctgttccaagatggctggggccctggtcactgcatcacagtcacatctctttctctgcttcaagctgcagttcttatcaacacttctggcacttagaagacaggggcagacaaggagagagcagaacagatcgaaagtcagatctagaaaaccaggtggccttgtcatggcaggggttggggtgccgacaggaatgggtacaggtttccaaaaggaagaatcagtggagaatgactaaaacgaccgaaaggagatcagacagaacaggctaatgtagaaggaggtcttcgtcggatcattgtcgttaagctttattgaggtacaggtaacagggtggtggtagtggggaagtaaataggaagaggaaagaggtgactctggtcactggatcagggtcacaaaactcttccttgatcctaacaatgattcccttaagtaacaaagaatagaagcttgccttgattacagatgaggatgaaaggttgctgtccaagatcacccccagagtggtggctctataacctggccctcaaggaggttctgagcctcagacatgggacttctctctcttgattgcagggcagaacactctcttctcttgtccttctgccttttcagggaggtaagatctcctaccatcctgtctccagcagtcctagctagctcctagtttctttcctctccagtactctaactggggtcaatgtcaaaatgatgcaaggagcttggtttgagccacttgtagtatctaacagttgttttgtttcctaaggaagttaagtttttgatcaggttaaagcctgtgttaaggccaaacttatctagctgcccagtttttgtactaagagaaggatttgtatacttcttttggggtgatacagacagggaaagagagaggcttgagtactctgagtacagcagccccaccagcgaagatgaccacattattagagttccttaaaaccccaccctattcttcagaaacttcagtaatgaccctggaccaacaataaaccccattaaacaacatgtttaagccaaggatattttacattaagaacagcacaacattataaactgtgtattatgtgagactcccccctattcattttcaaaggacctggctgggtacataaattatactgtggcctggaatatatgacacagccgtaaattacaaggtcataattttaccagcaatttcaaacattaccataaaccatccaaggtctgaaggtattctcatacactttttccccctttcctaagtccccagaataaaataccaagacagttattaaaagatagttcatttctggcttctgttttaggaaaacaacagttctgaattccatcacttcttttctctgcagcatattgtggtcatttctcttcctttctaaataactgggcatctagtcttggatagatgtttccttggccttcttctgagaaggatgggctttgagttggccttcaagttggaaagcttcccagagctgcatcattcctgcccagggcttgcctaaggaaatgtagagatgaccttggaccagatggtccttttctgtctgacatggaaacattctcctgtgccttctgcttcccctcaacctatgttgcacctattttcttgttttctcatcatattttacgtcttttggttcactggaaggcattagcatttggttccatctgcctgttcttctctagcaagagaagtcctagaatctatgtgtccacccagccaaatactgcctttctttgctcatcctttccttaggaccctggctgtctctgttgtccttgctctctagtcctgccctgccattctctgaaactgttacatccctcacttgaaagctcttctgtagatacatagtaggtggaactctcctacctgtccactcatccaatactgcactttagatcatcttggaccattcaatagacacatccctactacatcctcaatactgcattaagtcttagataatgactgaaattgtctccatttttctccagtgattttcacagacaggcctgcccagactcatacactcctgttcatagaagtaacactgcagttctatcaactaccttctctataggcactcaaaaaagtgtggattacatactcactgaatctcctatatagcccaagagaggtgcttctcccatgtataatttttctcttatcttgccatgtccccctttgcccctccatttctttacccatgctttaaggctcaattaaactctacctctcccagaagtccccacatccacaggtacattaatacatcctcaacttaaaatatgtaattcctgtggccaaaaaagcagataataactcattccactagaagcgctagaagatatgcttagttcttactggcagagcagggctatcttctagctcttgtggcatattaagaaggtcaccagtttatcaggccttcagtgatagacttggtaatgctatttactagttgtatactttcctgttctaatcacctcttaaaacatccttgtccatatttgccaaatcaaaggaacaatgacacccacttcaaaacgccaatcaaactataatggttttcctaaaagattttctagatggagcgtctgtgtggatgctttgtgctttataaatgttcctaagtagactcaagcagtcctaatgacccctgatttctattggttatcaaggccacttcagcttggcaccaagccttctttcaaattaacaattcgaagagatccaagcaggagactcaacaaccgataatttaggactgcattcactttcaccgggaactacacatgaagggagctgacccccaggctctcacttatgagtctagttatcagtattgtctactctccacatgatgctttcatccactgaatataaccaggtatagctcttggcagaaacactacagctctattacctacctccctacacataagcacaaatgtctagattaagcttctcattggaagctctaggtaacctgagaacctttccccattatcgggccccttatctggtcatgtcctccctcgtccctccattgaaagacaccagtgctgctaacttgagggaaacagtgtctgcctgctctatgacccatgtctgcatcatggtctttaaaggaagagtctgggctataaagataaatgccacctggtttactggtgactattcattcagagcatagtgagcaaggcaggtaagatttcttcatttggagtctcatagatggttggtttgatattgactatctcattgtgccaatcactccatggtctaagaaaaagccaagtacacgattccaacttccagttactattctaccaacctggactctattatgtgcatgcatagatatctttatgtattgcacaagcaacatatggcttatagccaaagcaaacatatgtctgcatttaaatgcacaacttctcctgtctggttttcagtgttctattgaatactttatcagttctctgttatattcactcaccagatgttaaattcccattgtagacgtggtgctttgatttcccatatccataactagatcagggtattcctggctgaactgtgtcttacaatctcacagtacacacaaccatagagctgtgatcaatactgatcttttggatgaatcatttattaatcccaaattacatctctaaatcctgcccttttcccctttgccttcttcttgagctcttgagagacaccagtgctgctcacgttgttattactttgtgccgtgataaaaagcacccaaaattgtcactctgggtggctccatgccaggcatccttttatgtaggaaaaactgcaatccaatgagctagaaactataaaattgatgcagctaagggaattattccccatacagataatgccgtggaccaaactgttctaataagcaaataaaatctctcagacaattaagttcctgtttaaggccatttgccttggaatcccctaaaggattcaggaggattgcaaaattgttggtggcagaggaagtcattgctagccagagctcaagctgcatagattattgaattaagtaaggcaggcccaaagcagacaagcaggaaaaacatgaggcaaagctttccaatgctccaatcttacttgcttctgttgtatttaatagtttcctaggctatttttgttttcaggaaatgaaatagacaagacaaaaaaaattcactgttttcagactataatcctgagagaggaattgttttcattgctggttttgatcaaggtagagaatgggaagaatggggccaaatgagggggaaaagattttttccctaagtcttcctgatcttcaaggggaggtatctgaaagcccactagaactcttgagtgagcatccaatatgctagaaccagcagcaagttgttaggcatgagactgagttagaggtcatgggaaaatcactccatctccaccgattttccagtctgtaaataaggactgccagaaagatgctggcaacatatggcaggcactgggtagaaatggctaatttgttaaagtgtttcatgcacattcattagactgaggggttcttatttgctacaatgtcgtgactcatacttctgaggcctgagctgtcaaagataaggacctcttcctcgggctggtgactaatcagaagtctgttggtacatccagtgcctagggaccaaaagtattcaataaagccttgagtggatgaatgagtttattaacactccatacagtctctaacctaaccatgtatataatcctctacagaagggcaggtgaactatgacatgggagcacatccaggcaggccatcaccagcttgtgcacagaatgagagctaagaatgtacttcttcatgtttttaaataaattttaaaaatcagatggatgatttctaaaccttggagttatacaaacttccaacttaaatgttcatgaatatatttttaattgtcattgtacgtattcattgaatatggtataacatcacctatggacatttttatataattatatacttcacactgctcattcaagtccatattggatggagctgattgcaggccacagtgaaaggttgaaaagtggtaatggtaattggatggtcttcagagttgaagatatttactacctgggaagtcacaggaaacatttgctgatttctgtcctacagaataggaaatggactctctgattatcctaccactcccttgctcactcaatggctttcattcagtaccttctagatgtcccagtacaccacccagctgtgtgattaaaacagagagaaccctgcccaaggcaaggcagaccacgccagtgcatcccacaaatcagtactgatgacagacaaaatgaaccttggggctttaatccaaggtcgctcaagatctttgccatgaatggtggccaggctgaacacctggcatttggggaaagataccactgacttctccaatcagcctgttagagctagccatcaggaagacgtcccctccgctcacacttctgagttgctatttcaacagagatggctattttaaaatacattcacaaacatatgaacagcattctctgccctttttctccctcccatgcagatgtgactgatcacacacacacacacacacacacacattctggaatataaggagccccaaaacctgcgtacaggaatcttttcccacccatgtctttctggaagcacatgttttcctttgctatctagaccttaggaaagttgtcttaatgaagtacatttgcaaacacaaggcatttgattttcttcttcctgcatgttcttggttttacagccatccttaccatgctccccagacaaccatacctatgtcaggattcctgctgggattcctggaataaggaagccaactactgtactctagtacatttccctggaaagctacgcatatcccatataacagagatgaatctagaaggttcttcttgggttatggctctgaccctttttgttgccacttcttttttcatcttaaatatattcttttccctcacttcataccaagcaggtggtcaaagaaaccaatcaaaatgcaggggtcaggcaccgggagtaggtaacagtcaggtctaggagatggctcagtggggaaagagtttgactcacaagcagggagagccacgttaaatctccagaacactcttttaaaaagctgttggctgggggaggaggagtcaggggatagatagacacccagctcactcctcatttcataagagaccatttcaaagaaaagtggactgaaccccaggtcccagggtctctagcatctaaatgtgtgcatatgcatgtgcatatgtgtgtgtgtgtgtgtgtgtgtgtgtgtgtgtgtgtgtatgtgtgtgtgtttctatgtatgtgagaaagagagagacaatgagcaaagcagcagaaagaggttttctttctcctataaacaagttgataggaacggtgacaactcaggttaagaatattcacaactttttttttttttgccttgtattatgcagccgttagcttatctatgaaaagtaccattatcttccacaaaggagacctttgggacctagccaaatggtagtcaataataattgcacactaacacagctcccagcaagaatacctgaaataacagcacctaaaagactacagctccatcctagtacatcctagctcaccacagtatttctttcaggctccaaaccatttctgtcaagagacagaaggaagacttaaatctgaacaaacctggacaagagtgatctattttagtaaaatcaagtgcaatctttaatctggaatcagtctaaaatacttgcccttgtgtgtcagtttagacagagatgggggtgggtggttggggtgccagtctgtgctcagcaggagcataagggccaactttcagaaccccagctatgtacatgctatctgtcttttactctattctttttttggagggattcttgtaggctggggactctcctgagttgccctctaaaagttaaagtttcatctgaggtttgtcagtcaggattcaaaggacacaggcttctcaggacgacactcctgctttccctcactagatggcagaatggcttaacagatgcagaggtgtggaccatgcaacagagctgaagtgagggactgggaacagcctgggctgcgggaagagggggctccccctgggcaggtcaatgcaccagaggactaatgcctcctgtatcttcaataagacttctaggaggctggtggagccaagcttttgctcttcctgccagatgagaagtgcctgtccttgaataaggagaactgcaattagataaaacaaacacaaagctattttgttaaaccaggaacaagaggtcctcagataatgagtcctttgctcgtaacatttggggggtaggaaaggtgtttgaccctgtcttcaaattcatcaaaaatgtttactcatcctaatacaaatgcttgttggtttaattatatgtgaggtgatatgatgtgtggtgattggcactgccagcaggtaccacattacaggtttggtaatagattctggacagcagatacagtaagaaggaagacaagtcctatacataggacaccaggatgtcacctgtcttgaacagataaatgatgcttcagcctacccagttcccaaaggaaagtaccaaggataactgacaaggaggaagaaaaagaagcaggggttagatggggactgaagaaatggctcaagggttaagagctgttgctgtgcttacagatgatcagaattcagttcccagcaactacatcttgcagctcatatctgcttgtaactccagctccagggcatctacagttatctgcatgcatgggtactcactcacaagcataagcataaacacacacacacacacacacacacacacacacacacacacacacaccagcctttaaaacagagaaggacatggagaaagaatggtagttaatggacattgaaaaagatcagccaacaaccactttaagaagagaagcatcctctctcccttgctagagagactggtttcatagcaccatgagccatctccttgttatctccctttccctataagtatttgggtttgaagtctgagtttgcgtactcctcttctacagcaggaaaatcgcgttcacaccttaaactgaagctgagtacagcaactaacacattataattctacctgctttaaagtttgtcgagtgactgaacatctgaattgatgctcatgataatggcacagctatgcaggattttaaaagaaggatttacactagcgtgagttaggtgaaacacccaagaaacaaggcttgagcccttccttctgagatcccctgttgtactcatgtcttagcctttattatgcttgtttggtttctgtgtcatagctcattgaaatggatttttcaagatttctgtttctcgtcacttatgggggctaggactgattggtacatttcaagtaataattcaaaatttaggccctgagactgcaaagacctcagttcacattcttgctgtgccaatgtcttagtgagtaagacaggtggcctcctccaggtccccccacttatcattagagcttgtagaacagtaaaggagacagacacatagggatcttatgctgatgctgccacgtaatgcacagtggtataatagcagaggccaaaacacatttttgttttatcactattacagttccaatgatctcagaggaaagttcatgttgcatttatcaaaactgatttgtagctattataagcaaaacactgtgccaggcatttagaggaacacaaaggaatgtataatgcatctgctatcaataggctttctgtaaagagcaaagaagtaaatggtattttatgctttgtgaccccccaggtctccatattactgacaatatgtaaatgaacgagtgtggctgtgttccaataaaatcttatttccaaaactaaacagtggagggccgggaaggttgctcacttcaaaaagtgcttgccacaccaacatgagggaatgagtttaattcccagtacccacataaaaaagctggacacagtgtctcacacttgcaaatcctagcaccaaggaggctgagacacgggaatctctgggaattgctagccagtcaaatgagcccagtcagtgagcctgggtcctattgactcaataaaccaggtggatggttcctaaatagtaaaactagagatcaacttcacattcattctcttttcttctctcctctctcccttcctatccctctctcataatcacagacacacacacacacacacacacacacacacacacacacacacacacacaggcagtgggtcagttgtggtcctggacatgcatacatcacttgtagatgtgcagccccatcaaagacaacctacaatgaaaagactgacagttttgaatgaggccagagctagtctggttaagttcaggtacgcagtgagtaatgggggactatggaagtcatagagaaggagtatatgggcaagcagagtgggagcttagtaactggtaactgctaaccagatagctggaatctgggaaaagagatcctcagaaaggcaattaataaaagcgaaaggggactgtagacagtgtaagacaaagactggagctttgacaaaaaagaagggctcgtcagagcctggctatgtgcatggctgcaatcccagctgccctaggagcagaagctggaggagctcactcaaagactgagcttagtgacgtcatagacagcctggacaacttagtgccatcctatctcaaaacaaagagtaaaaagggcatcgaggatctatcctcatggccaaacaggcatgagcaggaccctaggttcagtgcctcgtatgaaaagagaagaaagagggggagagggagagtaaagaggggggatggggagtatggggtggagggtgaggaggggcaagagaagaagaggaggaggaggaagggtacatccaatctggccaggggaatatttttttttgtatactaggaaatatcaagttaattttaccttatataagacaggctgatacattgctacttgatcagagagagagagagagagagagagagagacagggagagagagggggagagagagacagggagagagagacagggagagagagggggagggagagagaggggagagagaggagagggagagagagggaaacaggaagagagagagggagacaggaagagagagagggagacaggaagagagagaaagagagagacagggagagagagagagggagagacagagagagagggagaaagagagagggagagagaggggggagaaagagagagggagagagagagagagggagagagagagaaagagaagttgaactctgtgattctgatatgtaatcaaagagtcacttatctcagtattaaacttcatcaataacaaatacatcttagggaaagggagataggtgtctatcacccaccatgcagttctatctccaggcctaaggtatctccagggaagataaagtagaaagaataaagctagttaaaatgagttatcctaggaataaggccatacaagacctattcccgagactggcagtctaaggggctctatccttgacagaggagacaggtcagaccccagagaacggaaaagaagtgagtctggaacctcccttagcagtcttctctctgttatctccaacatgccacgagctggccctaacccaatctcaggaggttgggaaggaagagcatcaaccaaacgtggaaagaaacaagagccagggatcccctcttgctgcaacctaggacttggaggagctttaaagggaactgcacagaaggaaaccgaagactttctaaaagggcttaactgatccatttgaagttataacgtgggatacaatatactagatatatctcaatatgtgaatgctttggcttcagtccccaaagtacagaatttctgtaaaacctgacatctggaagcctaaaacagcaaggtttctggaagtaagagaatcttgatagttggcatagcagacacttctagaattcaagttcgacatcctagtaagatggacccacagacctcaaagcacagtttctggaccttcgtcgctgggaccctataggaaaaccctctacctctgcccttacacacacactgccttacacacgcactgtatgtgtgccttacacacacactgcctaaacctggggttgaaccagacctctgggtggttctgagaggcactgaagtttcagaagcagtcctctagaatatccatccatgttcatctgtgctctataaaaattctccttacttgtctctagagggtctaacaagagattttagaaggtgtgtgtgtgtgtgtgtgtgtgtgtgtgtgtgtgtgtatgtgtgtgtgtgtgtgtgtatgtgtgtgtgtgtgtgtgtgcatgcgcacgtgcgtgtgcatgtttgtgtgtataaaattttttcctaaggtttggtatgtgcctctcatttaaaaagcatcaagtgagagattcctcaatgctggctgcctactggacttcttcagggaatctgaaaccattctggtggctctgattggtatataggcaagttgaaatacatgcagtctagcctcagcagtaggaggtgcctatgttctccaggatattctaaaatcctgctaaggtcattggagcctgcataagaaacagattgtaaaagcatccttcattctctctttaggaaagcaaggtgtggaggtttagattgacagttttcacttcctaagtctccaggtctgcaggcatgttggtgatagcttcagttctaactccctagggaaaaaaaccatttgtctttagagccctgtaacccactcagcactcagatactagctttccttcacattgctggaactgtaacataacgagcacatttgaatatagcattggtgtctcacaaggcaacatgcacaccttcccgcggttaagtcacgggaacacacgggagcagttgaataagagctattctgtccctgagcttctaactagcattcagttctcagttcccatttcactacccaggccagactatcaggcttagatctcaaggaagaattgagagttttattattgctatgtttttagatgctgcaaaggtaaatatgtccagtcccagagatttagtttgcccaaggagattgttctaataacaccccggtcaagcggaaccatctgaagagattctggcatctgtgaaaacctcctgctgaattcattccttgaagacattcatttcaggaagttatttccaatttggcatataacagccatgcaagtcgatgaggatttagaatccctgctccctacggaggacatcttatttaaagcacatccctgacaaagcaatatcaaggggacacaactggaaatctcttcaagaggtgtaatttctccaggagcagatttagcaagtacagcagctaccagaacagcaatctgcttcctgaaattcatctaaactttcaccagtctgctttgctgggactgccttcattcaaagtccaaccatggagacagagcttagcaaaggacttatttatctcgccacactttagcaactttaatcatactttagtctcaatgctattactaatgttcacagtatcaatgaattctctctctctctctctttctctctctctctctctctccctctctctctctctctttccctctcaaaaaattcaaacaaagggtgtggccctatgttttggtcccttcaagcatctacatcaaaatacctttactggataatttataacaacatagatgtattgctcacaaatctggagggtgaagtgtccttgggtcaaggtaccaacatatgcagtaatactattctgggtgccccattgtcatgacctaatcaccatctagatgctactccttctaacgatgcaggtttagggtgaagcttctacatgtgaatttggcgaacactaatatttagatcaaaagagcacacatctctaatgccattgcaaatcagaccaacagtaatgacattaactatttttttttattaagaatctggaaatgtatttaaaatggaccttcttactctacaaggccaactgcaaagagaaggatctctgaaaagccagcttagtcatagaactagaattaatttaggctttaaatagtgactgagttttctatttttcttcctcattttttctcaactgggaccatgtggaacactctgttagaaggtccctctggctttgtcaggtcactggaacaagggaaggctgcatctcacagtcagtttggttggatggtactccttttgtgtgtaactataacagttgggtgcgattagcatttgagcagcagcatagaattacaggaggaacctggactttggaggtgggttgcctgagtttagaggctggctttgccacttaactttgtgattctcagcaattagtaacttaacatctacaagtcttggtttcctcaaatggacctgaaatgacatgcatctcagacttgcttggtagaccacttactcctattaattataggcacaataacaaacatacatacgcatatgcacaatatgaacacatccagccttattttggtcatagaagcaacttttcttttagattgtacattcctctttcttcctctttctttttctttcttccctaaagactggcgtacttataccaagaagagaagccatacttgttccttttccctgtttattattcctgttggttgttttattttgtcttttggttttgtttgaacttttgtttgtttgcttttgtcttgttttattttttgagtcagagtctcactatgtagctctggctgccctggaactcactatatagaccaggatggccccaaactcacagaggtctgcctgccactgtctcccaagtgctgggaataaaggcatgtgccattatactaggtctcctactgctgggattgcagatgtgagcctcatggaccgactcccccattttatttttaaataaagctacaagctaaagggagggggttagaaagcttgggcttagaaactgaagaaactaaaactagaatttaggccaccttggtaggtggtgcaggtgatcttgagggctctggggactgcccttccagtgctgggacctcttgatggagataaaggaggggtcttatggtcatagatggcagatcgaaaagtgagttcaaggttagcctacctctactaatgaagggctctcaggaacttgaagctagagtattctctaacccactacttactctcaatacggaaattccagagccatcctgtagagggaaccagagagctttcttttttctttgctgcacctaaagggccattttaccccagagcagggagcctgacaagcagaggctctgagtcagacccaatgtttcatatatgtaaaatattaatgtgtatattgtatacatactatatgcatgttatatgtaagatattataatatataataaaatatgtaatatttacacttaggatgtcaaggctttaaatgtacttgactaaatttgagcattgtggggtggtgattccttctcaacagccatttttagctaatgccttctcaaccatctattcatggaaggtttttttgtccttgctgttttgtcttatttttgtgtttgtttgtttgtttggttggttggtttttcaagacagggtttatttatatggctctggccatcttggaactcactctgtagaccaggctggctcagatgtctgagagatctgcttgcctctgcctcctgagttctgggactaaagacttgtgcctctaacatctggatagaaaggtttttgagttttttgggaaattattgttttttatattttaatattacttttaattgtgtgtgtgtgtgtctgtctgtctgtgtgtctgtctgtctgtgtgtctgtgtgcttggacacttgccttcccaaccatgtgcaaacaccagaggacaacttgtgtaagtcattttgctctctccaccaatgagtcctggcttgctgacaagcatctccacccactgagccctcttggtgatcccaggagaactatctaattctttaaaagatagacttactgctaagtttcaaacctgtgcaaatggccgagatgcttatcaacatgtcaaagcagacccttgcctccgggttctcccagcatccctcagtcctaacctgttacagggaatggctggggtatcccacccaagaccctggactcttccctatataatccaggcattttggtttggttacctgtcacttttgtacctttggcctcctggctgctgtatcaagttccccctttcctgtctcccttcctctcctctccccacacagaacagagtcatgtctactctgggctctcccagacgtgtctgtctctgactatgctctcccacatagctataataaactttctcctctgccatgctaggagcaatcatgccctttcctttcctttcctttttatttcattttttcattcaatttcttaaaaatcaattcaaacttttgttaagctcctttgtatgtagaagtgtcctccatggagaggtggaaagccatggtgctaacacatcatgaatacacactagcattgtgagcagatagaactttctagaatgatgaaatgctttatgtatacaatttagaacataggaaccaccatttaaagggactattaagttattgacatgtaggtaacactgatgaagaactgagtcttaattttatctaatttcaaatctacaatgacacctgtcctacctgcattttttatgatttttaaaaatttttaacttttgttaccttaacaagatctagaatcatttgggaagagaaactctcagcggagaaaaaacatggaaacatggctccataagattgacctataggcaagcatgtcaggttttacacacacacacatatgggaggcccatccttgggttgtatgagaaagcaggctgaacaagcaaggaggaatacgctggcaggcagcactcctccacgcttggcctctgctttagtttttacctggactcaaccttgctgaatctggtgggaaaagaagctatgagtcaaggactaggagggttatagacatggaagcagcaaggcatggctctttgcctagagtgttacagagcctcaggaaaagagccagatcctccctccctccctccctctccctctttctttccttctctccctccctcccttgctctcttttcctccctcttcctccttctccaccccagtgtgtgtgtgtgtgtgtgtatgtgtgtgtgtgtgtaaatgtgtgagtatgtatgcatttgtgtataaccatgtgtggacggcagagaacaacctctggtatcattctgcagttgctattgccatgttttttaatatagagtctttcgttggcttaaaaccagccaaactggcaagcctggctgcccactgaggcccagggatctaccttgcctccccattgctggaattataaccacactctaccatacccagacttatatgtgggtgatagggactgaagtcaggtctccatgcttatgaggaaagcattttcactaagggagcaatcttcccagctcttgaagatacttttattttaccctagccagacccaagttggacttccaggctaaaaaattatgagatgaggcacagaggctgtgttgaggcacaacattgtggtgataggtttctatgtcagtagaaaacaactacaagcatctattatggtggtgaggctgacatgagcctaagaaaaagactttctatcttccattggttcagactattctgtgaagtgcagtcctctcccctcagggagtgagcttccttttccatggcaagctctgccctccactaccaacctcatctggggctcagtgttccacagaattttctgtatccctgatacataacacacacacacacacacacacacacacacacacacacacacacacacatacatatacacacacaagcatatgctactctcactcctctgaccactacccctcacccccatgctttctgctgtgcttggcaattctgaacttaattatatagtaggcaatgttacctactgccatttcatgtctgtttatcttgtttccaaaataagattgaaccttagtctcaaacaggaactatgttgtgtcctattttaacctgttgttcttgttttctagaatgtacacacacacacacacacacacacacacacacacacacacacacacacaaaggatacaaagtcatatttttaagtagatagcctcaatttcgttgttgttttcctctatgactggccactagctcatttttctatttcatactagagtgttctgttttctagtgaaatttgttgaaggtgttaaggtctactgttggacctagaatggataagttccattcattggaggccccagtcacgctcctcattctgtcagagagagaatatgggtaaaatctgtttaaaaacatggcacagctaacaaagagggaggctgtttctgtgatactcacaagccagtgctaagcacataatacctgctcaataaaaattggttaggcagggctgtaactgtgactcgggagggaagcacttgtccagcatagacaaggcccagggtttcaactctatcactaagataataaaaggcacatcaggcaactggtcagtgagtaagcttctcctattccattcctctaaccacaggagatgactttctacacaaacatctacatgcacaaaggtggcatggctgaccgcgcatgggggtagagtttctaaaagaacagacagataaacgtgttgttcgtagctcaaaataaaatcctcctctcatttcagggtgcacttattttagtggttggggtgaggatttttgtgaagggatgagcccatgtgtgagaatgggaattaaaacaagcagagctttgccgtctgcagacatagatgccgtcccatcctgctgccttttgtggggtcccatcctgctctatatgattctttggtactttaaagtatggaggaaaagttagagaaagaggctgggatagctattgccctgctagcaaagttttcactatgttcttagtatgtagcttccacactagagcccagttgtaaccctatgagggagccgcccttgctaccatccttttacaggggataatactaagaaagcaggactggaggcaagtaagtgtgatcttgcatcaagagacccgtgggccagtggctgaggaagagctaattgaactgggacagaacagagagctggattctgatctacttctctctgctgagtgtgatcacatggaagcccttggtcctctgcaagatctacaagctgacgaagtgccccgaaacttgggagacaccatgccacttctgtatgcttctctggtcctcgtggcatttctagaaactggaggtggcaaaggaggagtgcgagagaagagatataggagtgtgcgctcttaaataagagctctccccctcccttccggcccgaggcaaagcgttgtgggatgagtaagtggggatggaggaatgccaacatcaagcagcagagtgggtgctgcctttcccaaatcggtcctcaaagctcccaatcttgcaaggttaaggtcagaagctcaaggtcagcaaaagagtgcagtgacatcatgtcagactggggaaaattgtccaaacaggctgtgtgaacttggacaagagagtcaacctctctgagcttcaggtgcctggtctggaaacatgaagtaattaacaattcctacctcataggtttgatctgaagattgagaggatttaggtaacagattgaatggtaggaccattgctgcagcatttgaatactcaccattgttatgttggctgtattactgagtgtcttaaacggacatatataagtgatatatatgctttattatataatatgcaatcctgtgctaagaataagaatggcaacatggtctgggtggtgcattgtaagagatacagatcaggcccctggtaaccactctggttttcaatcaccatgatgccagcagtaccatgcccccaccctcaaaactttgtgcagtacttcagtagtcttatttcttgtatctatcttatcccaaatcccagtcagtgtgaaggcagtatacctccactttccaggataagggaaaggctgttcacacctaatggtccttttcatctttgtaggactgtttcctgagaacgttcattagtttctgtggtggctcatgagtacaatgcttgtttcccagggtgataacctatgtattaaatcagacagagggacctcctagtttttgactaaaatgactcttccgtaataggcaggaaggtttgggactccacccaagggcagttactaagaagcaaaagcatcgtattaaatgttttctcctgcaagagtggacaggttcttttgattgttttggttgggttgttgttgttactattattgttgttattgttaatgttattaattttataatccagcatgccattgctctgttttcagtttcaacactgatgcttcccatgaggctgcatcatttattgatttctaaagtccctcggttcctgcccttctcagaattataaggcggcagtctgtcaatgtccttcacagactgagtggagaacaagacccagtcacaaaggtcacaaagccaatcgtcagctcagctgagaaggctgggatgcgccagcccatggacctactcaggacggagatttgcatgtggctctcatgatctggacatactgaccattctcagcaagcacatctcagagccaagaagcaaaactttcccctcagcaataagtaagtatggtttgaatgagaaatctggggctaggtggcatctaactgaggatatgcacacacgagggtacaattacacaaggcatccaagagtgtgtaggtgatcactatatgttatatattagagatgcttatgttctaaatatgtgacagttgttttcaaacccagggctttgcaggatgcaagtacatcttcccacaacatttttagaacattatctaacaatgtctacaaaataaattattcatgctcttttacttggcaatgcctcttctggtaatatggaaatatctataggaatggaatttcacaaatacatggatgatagtgtttatgaaaatatcgttcaggctagcaaacaaaacatccaggcgatccattagaacctagagctaggtctactacacaacaagcagataacggaaatttcccaaatggctataaaatttaccttattatggtgctgaagggatggccaccacgtgttactacaagagctaaattgcagtggaatatggttatttgaaacaatttctcataggaacatcagtacccctctaatgtttggccataagtgcacatccatttacttatgcatgggatgagatgagtttgcagaaaggtgtgttaatagtcggcatcttagggtgggggttggggactcatggaggacaaaaggaggagaaatggcctggtgctgttttcttttttggtagttgaaagtttttaatggttagaacatgtattttttttgtgtgtgtgaatcccagggctttttttttttttttttttttgaaaaatataagttgtcccgtatgagcaccaaaaaaaaaaaaaaaaaaaaaaaaaaaaaaaaaaaaaaaaaaaaaagaaaatttaattaattaattttttaaaaagccaaaccaaaccaaaataaaaaaaaacaaacctacaagtaaagacagggaattctgggtaagtactccaatcctcagttaactaatggaagcaaaactgttttcatgttaattataacttagacacagcatcaaggaggagctgggagctgtcaatttaatctttctcagagctggttgcttttcatgactaattgttttactgtgctggtcttaattcaggaagtgacctgataagccaagcactaaggaacattctcccagcaagggagtggagtaacccgtgattccacttgagatgtttcatcttgtacggcttatcccagaaattgcaactataaataaagcccaagtgtgacaggtgggacttctggggcacgagatcctgccactctgacggttggtctcattcccatgggcttctttaaccagtcctgactctcaattcctgaatgacaagtgacataagagtgaactgtagaagtcccagctgtgacagtgatgaccacgggacttaaacaatgatgaaactataccgtctaaagctctgcctccacagattctcctgggctgtcgccatccagttctgacaccccaagaacatcatccatggccacacgcaaaactgcctatgcatagccacagaccagcaaaagaatccttcctggaccctatatatctttaatctatcctgctgaagagccagtgaaacggcaaaagagaccgacttaccaagccaacttctgtttaagtacacagacacaaacacaggagggactgtgaagaaatctactactgaattcacttccagccagaaccacagcttatcgttggctgcaataaactggagggaaagagaaaataagacagaaaaacaaaatgagaagcacggtgtcagcatttaatatatgtccttttgtcaaaggataaatgttgggtttctatggggtctgcggggcgacactctgctcttcacctaatctcatgctgttctgtacattaatcactagcttgatttggagaatccacagccttttgtaggaagtgactgactatatgccacattagccttagggaatgatcaggcgatgcgattttctgtggtttccaacagatgcctagagaaggtttaattcatctcagcttcttggcctttctgatacaaatctaactatgaataaagcacatatatgtgcactcacatttatgtgcacaattcaaattttgcacacaaaaaaaatctccataagcctaatctagtgtaaactccctaatcctacaagccttcactcctccttgacccccacgtcccaccagccttcactcctggttaaccctgataattgcagtctcgacattcctaaatatacatttgtgagcttaagtgtttttcaatgtactttgtaatagaaaaaaatacagtcatgtttgaatagcaatgagtcagcgtaccattgcttcaaacccttccttgaaccaaaataaacccatgtttcagaaagctctcagctaagtagatcttgtccacagaccctaaaccagaacacaggtctcttgtccaccacagagacctcaggcttcaccttgcctaggaaagcagtcgtgggtggagggttatccatacgtttaggattctcatgccccactgtggtactactggaagatgctgccaaacttacccgcaagccaaagtagaggaggaagaacacgttgaaagccatgtcgatctgtaatgtgaaatctttgtagaaattctggcaggattctattgggctattagacaggaagaagaaaaagcaagaggtaaataaaaggccaagaaaatatcgccacagcttccacaatgccaggaaacggtgtgtggggtagaggacaaaatgaatgttcgctgaatacaacatttggtctttctaccccttgtgaccatgaccatcaagcaagcattgccaaagggctctccattcaaccattcagtgttttgttcttttctttgcgttgggggttggtgataattttatgtactgtttttcatcatcattcaggagttgatctaagattctaaagaggatcatgcagacagacaccttggaggaaggacaagcaggaaggattaccaaatgtcttgatttcatattaacccttaaagaactgatgtcttcaattaaaaaggactcataacaaggctaaaataacaaaccctatgtcctccagcccattagaagtggagcccattttccagcacccacatctggatcttctaaaagctgttagtatattcataaaagacccaggaacagctcaagaaagccttgtaggagaggatcctggttactgtcctggctgaactaagactggacttcctgtgtggtactctgcactggggataaaagcaatgttcaacaatatgattcaaaacctcaaattaatgtatgaaagcagtactctaagggttaattttatttgttgttgttgttggcatgcaggttaatgggcttcatgtgtgtgccaagcagccaaatgcacacccctagcactctactttgttcaagagtaggcagttccaaagagtactactatacaaactggtatgtggcttccatgagatttcccactgcaaactgatcagagaatcagtatgtgaggagtcgcaaagtttggattaggtgggaagcagcaaagccttacagacacctcgaagctataaaagaaattccagtatactgctgtctgtaagcaaatggaagcacccagcccaggaatagaagacagcgaggtaagcgaaagggagggagtatggagagatctccaaatccttgttcagatgggaagcaacgtggacctctccccctaggagagtgggagctggagaggtgcatcaggaaagattgctgagcagcaaggccactttagaagtcactgcatttggataccagttagtatagttgtaccttacaaaggataatgcttggctgttcaacaggcaggagtcagtgcagcctgggaatgcagggcctactcagaggcacagtagggcagtctataggaacctccagtcacgtgacatgcactggctttctccattcttcacggggattacaaatcaaacatgccctttgtcgtgtcccaaacccccgatatgtgttaaccctccacacacaaaggaagaataacctattcttgcatttacaaagtaagcacactgaacaaaagcaacagaacacggttctttttacaaaggaaatgacaactgccgagttctcactaaggcaggaaagtgaagggagagacagaatggaatctggttagtctagtgctgaaaagaggcaggaacaaaagcttacacaaagcagcctacccttgtacttagcttgcaccccccccccacacacacacacatacacacaccatcaccaccacaagcatgcatttaagtggaaacaagggcctgtagccaacaagggacaggtgtaaaattcttaagctctagtggggcttataaataacaagagtacagatatgcatgaaagttgacaggtaagaactattacagatctcaaagaccttgagtgggcagtatgctgaaaattaagtgtgtgtgtgtgtgtatgtgtaagggaataagtgagtgagtatgtgagagatttgcaggtaagcattgcactcatgtgctggattgtgctagcaggaagttggcatctgcactaaaagtatatattcactatttcgttctacatagggaacaaaggaaagccttgggtccaaattcatcaaggaaaatcagtgattgcttgtctaaggccaagcaataggctcaatattgccttcgcaatagtcactgatagagacattggtgacatcggagggctctcatgactgctccaggccctattaattccatgggtttgtggtttgtttggagatttccttggaagatttttttttctggattatggtagagagatgatagcttagtgtcactgtgttgtttttgttcaacttaagtgggataagatattcaaaaaagtgtaaacaactcttcttcatcaatccttgatttcctggtcacatcttttgttctggtccttctcatagtgtccagtgtttaaagtgcaacaattaaaaggctttaatctaaaaggtgccatgttgaaacccatacctgaacactccccatctcccttcacagaaaataacagagaaaatataatagaccttgccattggtcatttacaatcttagaactgatgtaattatcacccccttaaccattcactgagctctacactttgaactcaaacagtaaaatagaagtcatgtggcagttttgaatggctgctcctctggctaaggcacaaagtaaccggaacacaccctgagctatggatatgcttgggatgagaggcaagaagaggaaaattcttagacaaaagctgaactgagcctcagcaccaggtgggaccagagcactctgagaatatattttacatccatttcatcaacgtctccctgccttgggagtgccaggaacaacaccctgcatggtttctcaactgccgacagaactatttatcaggatcccttctgagataaatcctctgagtgcttatagttcatgctctcacacaatcagagaccacagggtggagtgccaaagccccattatttcattccccaaatggaaacaaaccatggcattcattgatcttttaaaaaaagagaatccataactcaccaaccaaaaggttggcttatcaggatttatttttctccccatgagactttctcttcgtgattaatactcattgcaggagcaaactgaaatggaagcgcctcttttgacttgtgtgaagcatcagagtttccttgtctacatccgcagatggcagtggggaaatggaacttctatttaaaactacaaaagaaaatgactctgagtcacattcttaaatttaggttgccattctgatgaggcaggcccacatcagcgaaggttttaggtgaacatacaatgcaaactgggggtagggaagagggttaaggaccgaaagacaccagttataactctcataggagcaatcaggccaaacctaactcatttctgcctgaccagtgactgggtaagttgaggatgtaagacttggtagctgatagacttttcattcctaagtttctaatgtctatacagattgtctatgatattgaagccttgggaacatttagtatgttgaacaataatctaagcttgaggattttccaaggattccccacgatctgttccttctgacaggacatgtgcaatataggacattggctgggatatgaacttcttgaaaggacatgtttaacatagagttgtctctggaggagacacttccatctactaaacaatgatatttcctgtaactgcccttgagcatgaggatttgatagatagaactttctggacttggctttggaacttttcaaaactcaaagcaaggctttcctgccctccccacaacgcccatcttttctaatcctgtatcatctcccagagagacatacggactcttttcctaagcatccatacttaccctcacatccatgaactcttgtttttctacctcctgctgttgactgtccaactccatgaagatatttctctcagactgcggttctcaaactttggcttatatctggagaactttgccaaaaattgctaggcctcagctccggagtttctgatttactagtctggattagggatatagggttttgcttttctcccaatcttccaaattccactgatgttcttgtccagagaccccactacgagaactactacttctgaggagttttctagcaactatgctctagctatgggtgccattgctcaagaagattcccattcaaacctgaacagagatgattaagtgtttgagccctaccctcagataaccagctgcataccacttaactaactgctaagatcaaggctttgaacagatattttcagtttcagatatggacaagagggaaagaattaaaaacatacagggacataattacaacaccaccttacaggctttggcagtaggcattcaattaacaatcagagagtacccgctgagtacattctcagttctagattacatgggaaatgatggaactggatgggggaggggggtgcaggggacagtagtttacaggcaataaggaaatgctaagcagctttggaacacaacaacaagcattccagataataatagggaagggactggtcaagaaacaaagtttccctttgtacaataatttctatcattcaaattctccccattcttgaaggctagtccttttgaaaattgaatggggccttctcaatccccaccaggattatagaggtccgattcaaagcactgcggatatgagtccattcaaaaaatttaatgatggcagactctactcctccagcttacctctgtaatgttgctattttaatctaattaaaagatgtcattcatggagcattaagggacccttctgtttcaagtatcaactccgtgcccagctaagaagaaactccaaaatctgcctcattcaagagttttcaatgtaattattttttgctacttgctataagtgaaagtctttgttgctttaggctggtgcctttgttccttcaggaatgagacctgaatattgctaactctaaatcttcgctagtgctgtgacctcttcaaatgctcttgtctctgtgttcagacttcagacagctttctgaagtcctaaaagcttgactcatcatctttacagatcttctttcatctctgagtttctttcttttttttttttaaatggatgttggaacatacatatgctttaaatttttttattcatatatattttgcatactggtgttttgcctacatgcatatctgtgtaccatgtgcaccctttgcctgtaaaggcctgaagatgggctcagctctcctgaaactagaatcacagatagttattaactgcctttgtgggtgctagaaattgagcccagatcctctgggaaaccaaccagtgctctaaaccacggtgttatctctccaggctttcacaggtgactttatacagctctagatcagaaagtgcctcattcagtccacactcaattcttcttcaactgtatagcatttacgtaatattcatgaatttgatccttataaaaggattagataaaatgtgtattttgctaaaattctttgatttgaaagcagaaaatcagagagtctaatatctacccaagttcacataactaaggggttaagttgggatgaggatcaagcaactttattgtaaaatcacgctacctttccagaacggctgtcatgtccttagaaggggaggtgtgtaagacacagtatccagtatcagcagagcatttcaagagactcatgtgaaaacaaggggtgggtgttctgatggactgctgaggtcagactgccatagtgtaagaagtcatgtgtttgaggggttgtttgagagaatctacaggaaactggcctgtctaaactatgtccaacatatcataaaacttgacagtatttgaattcttcaatactccttcctaactatggactggagggttaataaactttgtatgccatttttgctaatcaaagtaaaaaaaaaagatgaaaacatttagacacagattatagaactcatctacagccactggagggtataaatctcactaatgtgaagttttatcttggcggtgtctggatatttcggtcaagatgagtgcttcactctacctgtttactaatgaggataaaatgtacctgactatccagtctatattaattttaaaagagaaagaagtctttgcaatgcatcccaacctataatcagtggtattattcacataacttcagatattaaaaaaatatcttgtgaacttgtaagaataatggaactagtttgagtgactggatgctaattaatcattgagacagcatacatctctaagcggaccattaccttctaaactggacagcatcccaggtcctggaacaacccacagtctatctgtctttgtatcattttacttttcttagtacccccctttaagcacctgctcagagctatacacttaagagtttatctttcagtgctagagaggtgacttagcagttaacagcacttgttgctgtctcaggcgacaggggttcggttctcagaacccacatggcagctaacaactgcctgtaactccagtcacagaggatcaagcctttctctgggctttgacaacaccacatgcacacatgtggggcacagacatacactcaggcaacatacccagacacataaagtaaaagtattatatctaaattaaaaatgtttacctttctaatatcagggtgggacatacatttggtaagtagtatagtttatatttctttcttagcacacagaatcaagtctcttctgtctactgatattaggacttcatccacgaacatctttaaggaaggtgtcttctacaccattctctttgacagatgggctgtaatcaatacttgatgaaatccaatgataattatatcaaataaactcttcgtttaaacttgaagcattttcttaggcattgcacttgctttgcatttttcttaaaggacaatgcacttgttttaatgtaaatagaaaacactcattgtcactctacagtatggatctaagctcactttgttaaatggctttgtcgggaagtccttcgctatggtttgtgtcgataatttattcatcttcctgacaacagcttttaattgtgcctgtgctcaattataaaatgggattcaatagcaataaacacatagatcatcgggactgtgctgagatgaacagggatggatagaggggagatatgtgaaccctcgctgctctgttgggtccttgtgtgctctgtaatcttgagctttgaacaacaatgactgcagtggatctcagagcatttgtatggcacagggtgtctaccttagtaattagtcctaagaataaagcattcttctaggagacaaagaaaatgacacagactgctgataaagagacaaaacatgtcagttccttacacattgaatttctcaatgaaacacacagatagcttgctatcacaaaactcaggtggttaaaagccttgctactctcttatagaaccttttaaattcactctaaaaaaagaattcagtatctatgctgggtagtttctgtcaacttaatacaaacatagatgtatctgggaggagaatcttaatcgaggaactgcctccatcagactgtccaaagggtatgtcatggaggcattttctaaattattaatttatgtaggagagtccagcccattacaggcagtgtcaaccctgggcaggtggacctgaactgtataagaaaggttgataagcaagccaaggggagcaagccaggaagctgcattcccccatggcctctacttcggttcttgcctccaggttcctgtttgagcccctgtcctggattcccttcatgatgaactataatctataaggtgaaacaagccctttcctcccaaagttttttattttgggggggggtggtaacataaaagcaaactataagagcatcttatctatgcttatatttaccttcatttatgcataaatgtacccgaatcatttaaaagcaaaacactggaattataagtcagcctcaccagcaatagacaattggtgtgaagttggaaagatgactcacaatcctgaaatcctagctctatcacctatgacctgtattatgttatagaattagcatgacctctccaagccttgaccttcttgtctgtaaactggggataaagacataaaatttaaaggcttttgtaaggagaaagttggcggactatctattcaatcaacaatacttgtaagtcacagtggggatgacagtggcaactgccaatgggacatgcccccagaagcaatgatgcaaaagaacaaaattgaaagcattagtgatgttcatgctccatttctctgcatatgtctacattactgtgtcgttgtaaaatacaccaatgtgattcaaatactcaacaggacatgcagtaagctcttgattggagagctcactaccacatggtgagattctatatgtcaggatattaatttggaataaaaattaaagaagaacatagggaaatgagagtcatgcagccatactgtgtcataaatactaaataattaatcaagatttcttgacagcaaaagccatgagtcgctttaatgaatggctcacgggaggctggatgctcttcctcccaggtctttggctctgtttgtcctgttggcgtaacgtgcatgcggaagaggggcagagaaatgagccagccaaacccttcctaagtactcttttctatctgggctcccataaatgtattttctcactgttggaatcctggaatgatgtccaagacaacctacccactaatgcgtattttctctagcttgactacagactacaattatttcaatcacagttgttaccagagtggaattagtgtccatatttgccagcaacttttatgtaataaatcagagttaagccattacataaaaaaacagagttttgccaaacaagagctgcctgctgcagtttttactaaattatctgtgaagtgacaatggatgcattcgagacatccacttctctaactccatgggccctagccatctccccttcagcagtctcatctgtctagaagaggggagatataaagagattgtctaattaggactaaagacatctttatgcagatgtgtgttccagatacaagtggggagcctcctcaagggcatggttcaagagccacatgggtatgagtaggaggcacaaaaaagacatgtgcacacacatttccagaacccttcagcacagacatatattctgctccaaccccaaccccacctttggtctatctgtcaaatggaatatcttaggtaaggcaactagtagaaacaaaaggcagaagaaaaaaaaatcccagatcaagacaaagagctggggactcagacacagagcctggcatatggtgggtgggttagaggaggctgctagcacctgagaacattctccttggacaggaggtccttgattggagtaagaggattcatcaattcgctgtgctttctcttctcatggcttctctcaggacactaaatctcacacatgtcctaagaggttcataggcagtcatatctaaacagtgataaccaataggcagctacatctacacactggtaagtaatgatccaggatcaccattcattaaaaaaaaaaaaaaaacagtctgaaatagaaaagagtttcaaaatagctgggcatcatacttgtatagaaaatggagagtgccctggaaggagaaagcatgagccccctacacaccaaaagcagcctgggagggtgagtctgaccaggtgtgctggcattttgtcacataataagttttcaaataactatgacttccagctgttattataggcagagatcaaaacaattcttagtgagccttctccacatgttagactttgacatgtggaggtcattcacaggtttgctacatacgtcctcttctttgtccttgataccatgcatttggcactgtcacctcactctaatcttaccttcaaggacttagcgttaaaagctcatctaatgaactgatgcactgactgactgactgactgactgactgactgactgactggctggctggctggctggctggctgacagactggctggctgacaggctgacaggctgacaggctgactagctgactgactgactgactgactgactgactgactgactgactgactgactgacagcatagttccaattctgatgcctctcaaccatgactacctagagcagttcactcatggttgacatcaacaaaaccttttagtgctgaggagtcctagcatcaggaacaggtaacagcattttcttttatctgttgcttttccttgaagactaaaaagcaataaccagcaacacatacacccagcctgggatgaattttgtttgacactaatggctggtgatagctttgtttgtggtatcctatggttctttgttactggagattttttccccccttaggacattgggagagacctggcaccagtcttattgacatctagcatagaaaacaattatacctttattgcacaaggaaataaaaaagctgtgtgttagctctgtctttggctgacagcagaggcgtggatgttttgttaggtattcctatttaggaattttgcacagagcctacagcatcacagccaaaaaggacagtctgagatgttgctgattagcggtcatgaatctgctgactgcaaggaaaggggagtaatttcttcagaatgtcagaaggcaacctgggcagtagagaccaacaaaaggacagtcagtgggacaaattaccttcagaaccaaaggtcctcttaatctaagagaatttcttactaaaccctatactcatataagcatatttccaagtatatgttcttttatctacttcatggaatcagtgcctttgctctgggaagaattcttttccttcatatttctttttctttcccttttgctgctggttcacactgtaagtcctttatttatcaaaattcattttatctcttcaggccatagagataactcttaccacaatctagatggatggtgtgcactgggcttttgaatctaaatttggagaggggtattgtgagctaaaagcagcaagcttcttcctgctgctcctccttgcagtgctgttgctggctctgccattcttccccatgttgttttctgcatccctataaaaccacagcagcatggtcctgctctgaggatgccccaggtctgatttctcaggactggtgcctttgccctgtgattgggtcctctcacccccactctctgtctctctgcaggctttctgtcactatagcaggaaccgctgtgtgtttctaggaacaaagggaactatttctttgctgaagagcctctcaaggagacccagcgggttcctttccaggaggcctagatagaagctctcctcctaaagatgagtgctttgactcctgggtcagcatcacctgactgagcagggccgtcccctaattccatctctgctcctttcagaaaggaaaacagactcaaaggacctctttagtggttacccaaagatcacgtttgaaattctaagtaaagtccctgcttcagtggtgtgaacaggatgtgtctaatagaatggagggtagaaggggtttaactcttccaagcccccagatataagaaaactgaccttcaaggagggagggccagagaggcaagaggtcttcagctttgtttcattctaactgccaaaaattcatagatttagtgttaactatactggcaagctactactatggggctttcccctcccactgtggtattatcttagcctgatgacactctactttctgtcttcctgagttcacagcccagtatgtctgcagcttaaaatgccttctcgtgtgaaataacaccatccacagatccagcaagatcctagcaattagattttacaaaagctcatccagagaatacaagacagaatgacaaagtagacatttcataacaacaataaaaaagaatgaaaagtgcatttaaagaaagtcatcaccagccctatagtaaaacgcgtgttgcaatggggaagaaaggatcacagttattaatcaataatgctgaatgtagtgccaacaggtttcagtaaatatgaataacctctatagtactatccttttatgtattttaaagttgaattagtgttattgctagatacaataagctatgtgcaaggaaaatagttgtatttcttgggagaaatttatcttactagtggtttttattaagttgatatatttatcagatctaagcaaaccaaagtaggaaacattgttcaggaagccacgagaagtggtgggatccctgggcaatctgagcacattcatgccaagttgggaaggcacagaaccgaccatcaggtaagctgctacttagcaatggaccttagattctaaatccctggccacgagcctgatagtgagctccaggctaacatgagacttagttatctctttcccaatgctctagtcttgagctctcaagccatggagtggctttggggaatatcaacaatttgcaggcccacaagaatatcctagaggaattacatatcccaattcttcagtgtataggaatgctcgctgctttaattccatgcatgcgtccagtgcttactacattcaaaaaagctaccaggaaaagcatgtcgcatgcatgggcagtgcagggagaggatctagttaacctggaggcaacaacccaaagggtgaggttgcagcatgcaatgaaaaccacacttggtcttggctgccatgcagaaaagacctacatcaaagagtctgctgtgcggctcctgggtaagagtcgatatgagagaggtgagttacttcagcaatgacagatatgggcagaaaaaggttcaaaccactataaacagaacaccatacagagcactggcatttcacacaagaagaggcagctttcgagcccaggaggggagagaagacagggaggggagcacaggctgactcttagtctggtgagatggtctccttggccagcccttcatatgcgtgtatttttactcagggacttttgatgtgatttcacaaataacctcatgacatcttctgccataattgcttagaagttttgaatgtttgggaggagcaaggtgttggtgacataaagatacacaccatgatttcctgttgggatggtttatttcaaaagcagggctgatacataagagacagttaagtgccaacgtttccgaattcactgggaatctccaggcagaatgtgttgagaatccaaagcttttgaaaggcaaaatcacccctaaaagccacctatgccctgtaactttaatccactcacaataaagctattctttttcttataccatactcagtgaaggaaccttccataaaggtgacatgccttgatatattctttaattaaatgtgacgaagcagcaaatgagtaaacacttgaaacgttcagtttcttcttcctgtctctctgtctctgtctctctctgtctctgtttgtacacacctgtgcattctttgctgtggaggccagtgagcaccgggctctgcctgccccccacccccatactgggattataaacacacaataccagctccttttttttaaatgtgggtttatggagatcattttcaaggcaagcttttaaaagattttgtgtttgtttgttttgtttgtttgtttgtttgtttgttttgaaggaggaagacagcactgattgaggaagggattaagctccactccagtgtcaatgacatagcagctactaaagagtactgtctttctttctttctttctttctttctttctttctttctttctttctttctttctttctctctctctctctctctctctctcccttccttccttccttctttccttctttccttccttccttccttccttccttccttccttccttccttccttcctttctttctttctttctttctttctttcttcttcttcttctttttttttttcctgcctgccttccatgatctcaaagatactgaatactgctcatagaggtatgtactgtaatcctggcaatgcaatcctttcccatagctctctccagctggaaggagagtgaggaatatagtgttggtaaatgactccttttaatatgctctcctggtgctcatagcttgcgcagatcgtgatgacagccgtgataaagacttggacacactgtgaacaaacaggacgtagtatccacctgtcagtctcactgagagcagaacaccctctgagacctgagttccaccccagaacataaagataaatatagccagactggacaaagcagcctactcattcaacagatatctccagcattctttagtggcgggcactccacttgttggaaggacacgacattcaatgacacacagttgctactccagaacaatacaccattcaagagtgacttgtttcgaagttgcactaaatacatttttctggctatagacaagctatgaatctctctgcactttaaaatcctcacttacatgtaaatacaactcatttgagatgttgagagagataaaatagtaaatgttaaatgctgtgatcatggccagctttggtgatgctatgtccgcaatacctactgtgatctctaagactccaacctaagtaataagcagaggtttttgggatgaaaggaccatctctgagtgagttgagatggattttaagtaatgaacagacactgatctgagagagaaggtgggttggggcacaggagtggagaactgagtgtgggcagagatttgggtatacaatagggcacagagcctcacactgttgcagagcctactggcttgaataactggcaagaaccgagggtagacagaagatagtgaagcacctgtgtgcacattaatgtgcctggtcttcatcctagagatagcaggaagccgacagaaactcaaatgtaggggaatggctagtttatcaaattaaatcccagaagaaagaagtaatttttatatttttttatgtgtataaatgtttgcctgcaagtatgtatgtttgtatgtatgtatgtatgtatgtatgtatgcatgcatggatggatggatgcatggatggatggatgcacatataccaggcacaagccagatacctaagaagatgagaagaaggcatcagatcccagaactggagttacagagagttgtgagccatgtagattctaggaaccaaaacccaggtcctctacaagagcatccagtactatcgacctctgatccatctctttaacgctaacctatgcaagtcctaaggtgaaattctctgcttcaggacagctaaggccaccttgaggaatggctttcttcagagccttgcactgtcaaagttttttagagacaggctcataataccaacaaagtagttctctgagccacaatggccatccaggtctatttctgtggtcttaactgtcacaaagaaaggaaagcacatggctttttgtcttctgaaagaagttaccttaccaagaggctactacaaaagcagtgtttaaatgacagtagaaaagcattcgagagaggcctgcctctatactttgaacagggatatctatacagacagacacatgcctacagtggtaggtatgatgcatgtggtcaaacttaggcatatggaggagctatgacttacgtatgtcctcagaatcatcactgacaatagtacttaaaggacagagaccaactgacaattgcaaccctggtcctttgggggcttggatgttccagctcccagaaggacacctgaaatcctcattcttagagacttccctttggtcagaagagttaagagggaaggtgatttttttttttttcagagagtgctttctctttaaaatgtaaccaagtgtgtttatgtccatttagcacaactttaaagtgtaactgtgatgggagctctgcccccatggctcatggagcagaaagaggagagtgtcgtctccctgttgcagagaccatgcagtcatgctgactgtatggatttacctctgcctgtggcttctgagaggagacaatgatgccctgaacccaccatggaaacagactgagactccccatagtcgcagccactgtggtgcctcgtgtccactcagccagggatcactcaatgggaaggaatgttactggaggatgcttttgtttggatattctgtctccactcacctccatcatccagaatactgtaacacagtggttctcaacctgtgagttgtgacgcctttagaggtcaaatgacactttcacaggggttgcctaagactgtcagaaaattcataacaactcataatagtaacaacattacagttataaagtagcaatgaagtgcttttgtggttgagagtcatcagcgtatgaggaactgtattaaagagttccagcattaggaaggttgagaaccactgctgtcacagatcttaagttcaaaatatctgatctttgcacctgccacccctataagatgcaggaagtctctccaggttcgagaagagtgggatttttctgggctaccatctcctttctctctggagtgaataaaactagacaaacccaacagagtctgtgtcctcctccctgctggctccaacaacagacaaacccatgcacagtcaccaaacagaacaatgcaaagtaacctcagagcactgtcaccttccccaagtgacaatggtatgtctggggtagaaatggcaaccagcaaagactactaaaatgcctgagcaacaccatcaacagagaaagctcaggctatgccttccccagctgtctcattgtgaaagtaaggccctccacacacccacatttgttaggagttccagatgagcacatatcaaagaggaatcactactcagttgacaacagcttcttattggattaactgaaaaagcaagggttcatggacattttgatgtgcatggcttggtaaacaaagtaaaaatagatgttttttaatttcagatatctataatcctgggtctaaaagtggttgtgttgataacaattattttcttattgttgaattttaaacaagatttgggaatttgtaccatgtcaaaatctgcgaatgtgatttaatataaactttagtgtgtcctttcaaagttgtttctctttttcaaattcagtttctcataagggaattatgtggtcctgcaaggagaattttgtttgctgactgggaagttggtaacacaaatcagcaagggataaatcattatcaatctttatggcaaacacgcaaaacaaaaacgtagacagctggcaaattcctctcaagttaacagcatgtgtcagaagttgtgacagtgaactgtggctatataacagaattattggaggtgagatggttcacccagaaatgctgtacagtagcttttgtgaccctcttgtaggtattaagctattgtgatgtaaaattatcattctacaagtttgctcttgcagaatatacaggttcagttcccaccaacttacatctataaccatttctagagaatctgacacactctttctggcctccataatcattgcacaggcagagtgcatatgcatacatatagataaaaagcacattaaaaatctgtaatgtattgaggagccaatacaatctctatttgagcagagtctattagaaatctgcaagtgggtttctttagaaagcctgtgttaggcacctgttgcatgtatagtagcatgtagaaatatacacaaaacaggagtaggaagctactgagaagcatgacagcatcaattgtcccaaaagaggacattaatttaaacaaaagcatcatttacttaccacatggattctcagagtctccaagtctctgagactttcttcaagagaaaaatcaactggtaataaatgaagttattaacacatgtgataaggtaactcctgggatgaagaaatcatggcaatctgctcagataagcagatactgaacagtaccaggctgaacgatgccactactgtcagtcccccagaaggctaccctagatttcctattccagtttatctctttccttgccaaaaattcaatgctaaccccatgaagaagtgaaaaactgatgtctacttaagaatcaaggagacatgaaggtctactcccatgaggagtaagcattaaaacctgctccaactatgaaagctaatcatggaatcgcagataagcagcaaggcagaaagagagacaaggcaatgtttagagtttaggcattttgcaacaccctctgccattgccatgggtggtaccctctttgtctgcccttgctttggccaatactattggaagtaaagccaatgcacaaaatgaagctacgaagatgaatccttagaccaacaaaaactgcaaagaacatggccatgagtttcatctttctgtgagaaatgaaagaaaaaaacacggaaatgtgtgaagcctaaaagctcctggaactgaacacctaacagatgagcaaccagaaagagcagatccagccctccttcctgaaatagaacctgtgctactgctgctgcccacctggaatttcacctgcaggtggctggggattttaaaaagcctggtgtttccaccttttctgcttaaatggtaagcaaccagaacagcttgacctgggaacaagctggttagttatacaaagccttccccaaaagagcgaggaaacgtctgctgtgaagaaaggggcctttccaacttacaattactttctaaagaaatgtcttaagcagtgaacaagagaaggatcccagggatctagcaagctacaaggatacacacaagcaaaggactggttgctgcctcacccacttgactcctatgctggcacatttcaaaggcaaaccttgtgactgtgaatggtcagctcagtggtcaccacctcttggaagtcttcctgcatcctcctctcacctagaatcactgaggcctttcctggggctttcctctcttcaccagcacgtctttcctagcaccttcactgacttaaaggaaatttgtttctgtctcccccttacctgctgcacctgagctctctaatgggggctatacaatagaccctaaataagggtttaaagaagagaagagaaattaagggatggaggaagaaaataagcagactttagaaagcagaccgtaatctgtgagttgctagtgtcaagaaatctcatcttgcaaagtgatttccaagtagccccagaatcatgtatagagatcaaaacctaagctatgtgatatttgcatcaaccatattaatgctacccccaggtgctgtcatgaccccaagagactgccttatggagtccttctttgtcccctggaaaaatatgggttattttacctaacacagaacacacttgaggacaagaggggagcatgaccttgccgatagcctcattcaccccccaataagtccatctgttctgaacagccaagaaaggccaaagccctgagatgccgcggcagaatttgaatcttatattagaagaattctgtcctgaattgtttggagtctgtgtcattagccatcacaatgctaaattattttctcttaaataaaaagataaccacttcctctttattaaaaaaatcatatgaaaaaaatggatctcccttttatttagactagaattactttttgtttatttgtactttagttcagaaatctggaccaaaacttgacactaaacatcctaaaattataacttagaaatctagagatatgtgtacatcagaagttaggaagtcaatctgggtcaatgttactggtccactccttcagacatctaacacaaagagccaaggatccaagcaataatgggaacgcacattaaaaaccaagcgtgacaaagtatttcacataagagtttggatctgcagggtctccttggtaagacactaagctagtggatataaactagcatgctctaaatattctctaatatactctaaataaggttgaatatgatatactctgggtaatcttacataagtgaagaaaacacctggcatgaaaggggtttctaagtactgactttttgattttatttgtctttagaggtcaggattgattttgatggtcagtttcttttggttactactttttcttctttggtgagtgtgcctgttcatgtgcatatatgtgtatgaatatgactcgtacaagctatagcccatgttctaggtcagaggacaacctcaggtgtcaatactcctaccttgcttgagaccgggtcttccagtgttttgttccctgcttataacaagctagctggctaagattttcctctcccttccttccatctctcagtaagaactttgggaatccaagtgcgcatgctatatatccattgttttagtctccttagcatttgaacccaaatcctcttgtttatgtggcaaaacttttcaaattccccaggccttcaccttttctaaacaccatgtgtgcaaatcaggatcattttgtaaaataatgcccaaagttttgaagttgtccctagctcctgcaatagtgtgctgtcaatagaactacttgtaattgctttgagtagagaactaacaatgttgcccttaactgttgagtaaatgaaatcctagtcaggaagttcttaattacatttgcttctcatgagcagcaatacaatggtacaaattcatgcaccacttttgctcaaatgaaacatgacatcatggtataaattcaaggcagccctgcccagagatgttataaaagaataaagtttcaccataaggagagaaaccacacagttttagttaagtcttaagaatgatcttattcaataagatgcttttcctcagcttaaagtgtgatctgttagcactaagacaaattaggatcacttcattgctgtgcgaagctgaaaacaaaaattttcctctcattgtgtcctaaaactcaatgaaaagagttctctaaattatcaacatgacataaaattctttcaacttggtaaagataatttaaaattccctgaggagaagttctctgaaattatttagactacggtaaattctgagacaggacacctagaaagcacttgtcaatttcctgtcataattgctgaacataacgcttctgcctgccctgagggaggtctaggcagactgtgcaaacctgggctcagcctactttcccacacccaatctcccccttccccacaaagctacaaacacagtaaccccctgacattctctccaaacccctacttttgaccttctttactgaaaagcaagctccacgagacaggaatctttcagtaaagcttagatgtcgctgctaatcaatatgcatgtcctatagatgaacaaatgaatagacagagggcagagcagaaggaatgctggaaaagattgaatgttaaagcccttgtctgattttactaagctaaggcagtattagtttacaagtactttcactgtctggtttcagtaccagcatgaagcacctctaatcccaattcctagctatatatgacttttgtacccacatgaaaggaatttcatttctcttgtaccaatacaagtcatttgataatttaatcatctctattacatactttgaaaggcatctgacatccaattttgagttatatcttaaccactactcccaatctcatttcaaagtagaacaaaattatctccttgtcaattgcttatctggttaggcaaagaacacattaacagtctggcaaatgttagtcccaagatctccatatgatgtacaattaattgaggagtctcttcagttcagtgtttgcccacacttacagtgtgtgctcatgatgacaacacagatcctagactctagcgaaatgtgtcgtcccaggattaggaactcctcatccagatcaggggctcaatctctagtcccagtgactacccacatggtatgatgttcagaattctggggacttttcagagggcatataaatgctagaaccccagaggtggtatgggttgttgcagtggggaaacatgttggttgttgactggttgctgttggttgtggtttgttaagtagtcatgtacaaagaagaaagaagaaattagatatcctaatggcaaagatcaaatgccccaaggaactcgataccccaaacagcaggaagtagtataatgatagctttgcttcctttcctttctatccttttttctctttatctagtgttaggggttaaaagggtgggaaaggggtggaagaaaaaaagaacctacaaagcagcaaaagagagctacaacatgatctcaacaacttaggttctttttcttcatcaaatgaaggaaatcacagtggtgctactgaatggggtagtaaggacagattggcaatttacatagagtaagttcccaatagctagtgatacagcttgtagaattacagagagcaacttctgtgaccagaatgtccagcagctgtcagctaggtctgtttcctgactagcaattatctgatacacatctgctatatgaatggccacagtgaccactgactacctagttagtgtttgccttgtggtagttgctttctccctctccactgatgcttattcaggatcgactacatttcctacagagggcattttgtacactcttgcgttgatcctatggaacctgagcttgcaggcataccataaatgctgaaatgggagaggtccaagacagacacatagattctaatctttccattgacagttctgttgagaaaagctaaccagagatggccagctctgaactgagaattaaaaacagttggtgtagttttgctggcttttagaacatggctggggttgctttacaccatcttctgctctgtacattcccagttcctagcaaagtggactgagaaacaccagcaagttgcaatcccgctgataagaatcagtttctcctgattggctctggtgctgagtttttgaagatgaggaaggaaatgtgagctgtgccatgccagtccaattccctctctaagttccagttttccagggtttgcttgctggaatttccatgatcgctgtactttcttgtgctgggcaacaccttccagagctgtgcattaacctcccactggacaaataaatctatgtgcaaaagtggaagcctttatgggactgcaaagccaagtaacaacatcccagagcactgcagaaactgaagagcagatggaaatatccaggggaaaattcacttaacttccatgaacaactctgcaggagaagaaagtagacacgcacacctctatctgagacttaaaagcacatttcccccctcacatgtgtgttggcagttccacagctggtaaatttttcattcatgtatgaaactaagtatgctgcacccccattgtgacccagcgtagcaccaagacttatttctatagcagtgttaagcacacaccgcagatattatatgtacatttgcagcaatccatatcctgtcaacctttgtaaggatcccaaggcagaagctgagccactctcgtactcagccaagctcaacagagaatttccctgaagtatgtccttaagcagcatccaccaattacatgtctttagtgaggtataattgtggtatgcccactattccagatgtgctcttaccagccacctaacaacgaagactctttcttctccattagggtgcagaagcagccaacagcaagggctctgtaccaggtagaggccatggggcaccagtcagtcttctctatttgctttcattctcattaacatgtattaagtgcatatttgtagtgtacagtgtcgggtgtgcacaggtcaaatcagtgtaattagcattccctcttcttagtcatttctttgtgttgggagcctttgaacttcactactggacatcaccacagttgttcctcctatctgtctgttctgatatctaacctccttttatttccctcacacctcccagcctagaaatcattattaggcattgaaatcaactttttagcttccacatatgagcacaaacagccaatactgagctcttcttccatggcttatttcacttaacacagtatgtaccatgttgctccaaatgaccatattttcattcttttgcaggccaaatcaaaatttattttgtataggtgtcaccttattttttattatagtgcttgagattggactcaggccctcttgcacacgaggcaagcactcatcaactaagctacatccccagcctagacagtgccatggcttatataggttcctagaattaatcaaagaaaaacctgccatatccagggatccaccccataatcagcatccaaacgctgacaccattgcatacactagcaagattttatcgaaaggacccagatatagctgtctcttgtgagactatgccggggcctagcaaacacagaagtggatgctcacagtcagctaatggatggatcatagggctcccaatggaggagctagagaaagtagccgaggagctaaagggatctgcaaccctataggtggaacaacattatgaactaaccagtaccccggagctcttgactctagctgcatatatatcaaaagatggcctagtcggccatcactggaaagagaggcccattggacttgcaaactttatatgccccagtacaggggaacaccagggccaaaaagggggagtgggtgggcaggggagtgggggtgggtggatatgggggacttttggtatagcattggaaatgtaaatgggctaaatacctaataaaaaatggaaaaaaaaaaaagaaaaacctattctccagaaaataccgtgtttctaggatgcctgtttccacacagtagggaaaacagaggtcacctatatgttatggcaccaagttcgaattcttcaaagccaaagattatacaaagggcaagcaatcatgagtatgacatggattattggacctgcctattcaaattttgtctcacaaatgatactcaaagacaaccccagagggtgctgaccctgaagtcttaacctgcaaagggcaaaccttcctgccctgcttgtattgatttggagtgctaggtagtgattctaagtagctatacctggacttcctatccaggggggaatgaactgagggtgaaaggaagtcagaaataccagaaatagttaggtaaggagggctaaggctcaatctatcaatctgagctgcattggcatcataatgtgctctgcctcaaattacacagtatgatttttttaaatcactaaatgtcaaacttgttcagtccctatcccccatgccccatccccctccacctcccacataggaacttctctgcctctctctcctcattcctgctcttttcttctcaccattctcagtaagctatttgggtagtggaataaatccttcatttggttggcatcctccatattttcttgaaagaaattgtgtttttttaaaatacttcatgataagttaatttcctgccattatccttaaagatctaccagatcatataattccttccacttaaaaattggtttaaaaaaaaaaaaaaaaacctttcttctcttgctttctattcttgtttgcagggcaactgctgccatacacgcagttctggattttattttaagtaatgtgtagttgactatagtttgtttgtgcaattggtataattaaatctaattatataattggtgaaagactgagtaatcacataattagaatgtgcagtaataactgttgcagtcccattgttatgacgtgtaatgatacaattatgatgtgggacaatgagatggcattcacagggtggcctgcaaagaaaggacactcctggcctcttggaaatcagcagagttcttggccctgggcagcagctgtcaagacctcaacttggacttccaattcgtcactatctgctaatctaaccctggagaatgacaccctagaacatcaactctgaagaagtatttgtggccagacactccaagacccaaactaccaaaccccaaaacactgtccctgaagcacagagcagcctgtggattcccaaaattgtcagttcatgactgttctcaattcaaataaattcattgaggcacaaaacaaaacaacaggtagcaaaatatttcctgacagcgcccatgcatgcgcccgagagagagcaagcgcgcgcacacgcgagcacagacacacacacacacacacacacacacacacacacacacacacacacacacaattattagtgggcataggaatgatggttgaggatgaagcactgggctcagtctttggcaaacaaacactcatcttcacaggcaaatggagacagaccaccagaaaggtgctagctcagcctttagtcttgtaattggcagtgagccctaacttcactgcaggctatctttcccttcctgctccccagtctggttcaggtgagcagcagcaactgtgacattcctcactgctcattctttagcactgctgcattcttttgctcatgttgtccacttgcaatagctcagagaacccctggctggcagccctcagtgctgagccttactccccattctgagcctccttgtacgtttctgcagtccactgacctttcccctgtgctgcatgaataccccagagctgtatacctccaggtagggctatgggccaaatgacagggttcattttcagtgtgttcctcagtaagaatggtcagactgctattgttttttctcaaattgatttgcttttcaaatttccagggctactagtcttcatttttcttctttctttgcacttatttattaatttatttatttttactataatgaaataccagagtctgggatcaactctttaacttattgtttgagaggttccaggcatcactctggcttctcccttactctggtaagggcattaaggagggtgggatcccaatagttgaagaatgggctacacagagggatcaggagggaaagccagagaactgggaagtgttccatcttgtgacctctgacttggccacatctctgaaacatctcaccgtttctcagcatcaacatactaaagatcaaactaccaacacaggaactctgaggggacaaatcacattgaaagcacagtgcttctctcctcttccaggtccctccctgtatcaccatctcagctgatgctcagctcataattccagtgaaagccaccgggaccaagcttcactctgttccctgcactcatatttttcaggcactaccttctatccttccttcttctgatgagaggtcgggcctccctaaatgggtgttcagccttcactatcagagttgctactgagctctggagccaacactcacagtggcttccttccagaagactgtcacaggctccttgcctcagcctgcctggagcgctcaccttgtcacccactaactcttcacttgtcagggatgctgaccatatccatgtggcaaactccacagggaattctgagtgcctgtcttcccagcctttggcaggtggccacttcctcctccacaaagcagtctcctgctggctatctcgctcttttcagttatgttcctcctcaggttcccacccaggttcctcctgcttcactctgcttttaaatattggtaaaaactctcattattatcatcagacactattaacagacactgttaacagttcagtgtaaaatgttccttacagacttgtcttgggagattgtggagctcttcagtgagagacatggtaatccacattgggtccctaggtgaagacactgaagggtacctcatcccacttccttcttgcttcctgtttgtctcccagtgcgatcagctgctttataccccagcaccaaacatcctggccacatcagccaacatgcttgctctgtgctaacactgtgagctcaactaaagtcctgggttgcttgtgtcaggtactgtctccataacaggaaaagtgggccacacccaaaaagaaggcagggaagtaggagggagacttgctgataagaagtggttccagcaggaaaggaaggggaatgagagggaggagaatggagtgtataaaaatgtatggtgatataagtgtctagaactgtcaaatacatcaaccaatgaaagaaccaactaaccaactaatctcagggcccggtcaggtaaatggagaaaaggaaggagattagggaagagattaagattgtgcacagaactagacatccaatcaggtaattttcaaacactctacaatcctataaggcatccttaataagtttcacagctgtaaaaaccaagaagtttccttctaggaggttcggtggtaatgccccaaggcctagttaaaaaaacaaacaaatccctttgtccctttgttaccaatgtcatgtgaaatggcttcaggccaagtggattttgttgttattgttgttgttctgtgatgcccagagattcacaatcaagtgatatataaccatctgctcagcttttaaaaatgcaaaatgactcagccttactaattgaagtcagcactaagcaaaaaaggaagtattattttatataccaccaagagacaaaacgttggtaggctgacctgcaagcagacactcagcataagagatttattttctttacttattcacttattcaaagagacagtgtgcctttagacttcccaggctagcttaaagttcttgggttcacaagctcgtcttgcctcagcccttcctgtagctagcactcagggtgcgtactactgtgactaattcttttgactgcttttaatttaattaattaacttttgtaagaatattttttggctacctttgaattccccaagtgagttctgttctctaaatcagctataagaataaaaatatggaagggcttcatgatgacccagaataaatggggggcggggggaagagaaacatctaaacacaacacaacagggcagatattgcaggcatgtgtgtcggagatgtttccatggatataatatacagatgagattcacttacaaactaactcacattataaaccaaacaagaatattgttatggaatcttgctatgctgacttttgaaccgaaatagaaagaaaaaaaaagcaacccaactcatttatactgagaagtgccagttcccaacctctgttttaaacttagttctttttctcttttaggttgacacccacctatacagactcactccatatccatctggtgctcttggtgtgtaggcatatcacggcaccaaagtgttttataaacagttgccaattttacctatctaccctatacataacaggcatctccttaaaacttcaaatatattccttaaccaaaaggggaaccaagggggatgctttctagaagtgaaaagaatgtgaagctaagaattagaagtctgtggccatggctggcagaggttttgggatttggggtgaagatcttagaggtaaataacctatcctttgggtcactaaagctgtgctttgatactaggctgagttgttccaaactctgccttaattaaggccagacccaggagtccactggctgtcagagttatctgcccctctagctctctatgggttcaggtctcttctgcggtgtctctagaaattggccagcaggatctgagatggaagggctgcctttgttagaactaggcctgggaaagtgttttctttttaacacgtttccaagatatcagggcattagacaggaaacttgaaagggatgcaggtcatcatgtgcatctccaggggccgctgtaagaggggtctgtcacagggtacgttctcctcacacaaaatgaaggaggaaagtggttaactcgcactgtcaatttgattggatttggaatgacctagaagttgcacttctccacatttccataaggcatttccaaagatgtccagcttagtaagcaagagtcattctgggcgtgggcagcaccatcctgtgaacggagaggtcacaagactgagcaaaatgaaagaaagcaggaggcatgcagaacagcctgctttcttccctgttcctctgctccctggctatggactcagtatgctctgttaccttgcattcctactaccaagccttctctgtcacaatgggctgtatctcctgcagctgtgagccaaataaatccttcttcctttaagttgctccttctgggcatttgtcatagcactgagaaaaaaaaatactcaaacaatgaatgaggttgatcatgtctgccccttccttccatggtgggatagaaagtttgcaaacataaaatcatccatgctcttaaatatagtccttttatatactagccacaccttccagagtctccctctgtgcataaacagctcccatactcaggagcctttccatacaacctagagaactaggggtggaagagtcactgacaggccactggcaagtgggtggtacccacaaaggcctggtgaaactcaatgaaattacctacgccctgcctcccacgggcactgaacttaagagagagttggataggcagggggcttataaattaggataagtcactgggttcataaggaaacgatatataaaccactactctagcaagtgacctgaaaagaaagtccttgagccaggaggctcaaaccgtggtaactgttcacagtgtgagcagtgcttactcctttgctatggtaactgttcacagtgtgaacagtgcttactcctttgctatggtaactgttcacagtgtgagcagtatctactccttgctatggtaactgttcacagtgtgaacagtgcttactcctttgctatggtaactgttcacagtgtgaacagtgcttactcctttgctatggtaactgttcacagtgtgagcagtgcttactcctttgctatggtaactgttcacagtgtgaacagtgcttactcctttgctatggtaactgttcacagtgtgagcagtgtctactccttgctatggtaactgttcacagtgtgagcagtgtctactccttgctatggtaactgttcacagtgtgagcagtgtctactccttgctatgtgcttcccagcctgcctttgccttctgtccttcttcccccaaccttgccctcctcctcttccttccccactgcttagttcttactccttaagatcccggaagggatttcttaaaagagtctcccaaacactcaataaacaaacaaacaaataaaaaagagaccatggaaagcatgcaaaactgtggggtgcggttgcttcccttctatacacacatccagaatttaagattttcattcaattatcagagttcaacatctcccaatacagacatcttaaaaagaaagagcattggctgggtggtgtcagcacccacatttaatcctaacactcaggaaaacagaagcagtaaatctctgagttcaaggccagcctggtctacagagtgagttccaggacagtcaaggggacgcagagaatctcttatctcaaaaactaaaacaagcaaatgagaagaaagaaaagaaggaaaagaaagaagagaaaagagcattaagcttcaaaggattaacctatgccaccataactctgtatccaagaatatttatagtacagcctgggagaacctggggtttgtagccacaaaatgtcagagttcgaatttcagttctgacacttccaagctgtgtgacaagacaaatgtcataaagtctctgagctatagttctgattggtgatgaacatggcctccatggaccacgggattgtggggcaattatagaaaacacaagaaagcaaatcacagtgtttagggagtgaaaacttctctctgggagacaggaagaggcagctctaggttcagccaccaaaaagaagctgttgtgtctgggaaatgcaccagaggctttgtgaaagattcaggtctctgtgctacaacgacaactgcttaatcctctgagaaatccataagaataagaaaataaagagtcatctttgagcatcacagtgtattaaatcccatttatagattttatagtgaaatggcaagcttaatcaaaatcagcctccagcccctacttcttcccttactctgcctctccttgcaacatgttacaaacgaggtctggccatttcaatcaaataaactctgacattgccctacgacgcacaaagatgtcccaggacagccttcataactaggttccagggacctgctgtaaggcccagttgatcctgtgtcagcagccagcttgtgttcacctggggtagctggctacttaatgtcaatgggaaagttctagatcctctagtggctgggcctaccagcacagttgcaatgattctaggacaaccctgataaactgactcttactttattgaccaggactcagattcagaaagatggagccaggagaacattgagaccagagtgccttgtccttgacatttccactgccaggggtaaagttgctccttcccctaggaaaaatgagcatctaccctgaggagctgagtgaggtagggcacttaggatgcgcgccagcctctctataactgactgtatcttgtaatcgagtatgatgtgtgctagctcaatacttaactatattgaaacaatgctagggtttctctttgtttgcacagaattaccattttggaaactatatatagtgggtatgggtttttcttttaatctcatcatgtaaaccaaaatgtgctgccttttcagatgacactaaccactatggtttgctcacaaagatgctacccagatgactcttgaacatctagattttcagtggtaaagtccttatcataagtctcactcctcagctagagtagctagctgtctatttcaccacagtacaagtgcaggaaagtgaagatctgtctagactcagccaaaagtgagactcccagaacagtaactctacagatacttcctttattagccacacagacattaggactggaaactcaggagtcaggcatctcgggactaaggagcctctgccaaggcaaatactactcatgagttcatagcctccagtatggatcctttgccctccctctcacactgactggccacaagatcccctcccttcctcacttgaggtgtcaatcagcaaaccaagatcagctttttaattagcacagtgcaaaaggaatacactgacatcaagcagagatcatatacaaagtagactgaggagcatgagtcctggtggtacgggttcacttcctagagatccattaagtcacggtgggaagggcctatgaattactatactatgccaccattccagaatatctagtagagagaattcctaaagcagatggccagcataagcttagtggtcccagaaggctgtgagctttttgcccatcacatgtctgctatgtgcttggtgctatgttcatgactacttaaggacatgattgcctttcagagaccagccaaacttaatcaccctactccttttatttgcagtatgtgtgcatgttagttttgtggacccagacacacctgagtcctgaagctgtgattagtttcagattcaaattcagatgtcaattattccagttcctttcgtgaccagcaagaagtagcccagtcctactcctaactcctggttggatagaggggtcatatttcttctggatggtcccttaaagtctttctactttacatgactgactttcaaagtaccatttggaggatgcagatggacccatgggtttaaacatcgcctcttctttgcagttcagcgtccaagtccctggatccaaatagagagcacaggcaagctcatatagttatttaggtctttaagggacaagacatcaagtgtggagaaaccttactgcagagagatagagccgactatcaggacagccaggctgctccccgacaacgaggaaaccaggacaccatccaatgatgactcaggaccatctcccttcagttgccacaggagtcccacacaaaggacacagagtctctgaaggcagagttcccaggatgcagactctggtggtgtcacccatcatttggatggttctggttttatcttcctttaccagactttctcacctagaacagtctgattcttacagaagcacctcgcaggcttacgaagaggctttatgaattagtaaggaaacaagatgtggattaggacatactgggctgtagtgggacagtaaacacattttcattgctagtgtaccaatgctacctcttgtcaagctccagaggagatggcagaaaaatctgtctgtctgtctgtctgtctgtctgtctgtctattctctggtcccgggatagtctgatatgtgctcaggcttagtaaatgtgccatgaatggatggaggaagaagccaaaaacaaacccacagcaaacgggtactgagctatttatgcagagcgctgcaaggctggggaagcattcagaagctccttctcatggtgtctagagacagaggagggggccaacctgtggtaccctgcagcaggaggaagccagcaatgtgaggaaggacaggggggatgcatgttgtgttaaaggaaagatggggccttttccagaaaaaaaaaatgagaaatggagcatggcccacctgtttctaccagctcaaggggatttcccgtgttatggaagaaagcaggaacctcccaggaggcccttttatgaaaaccacaggaaaagctaattctagtgtccccagtaatcctctagggtaaactagtaaggcccccttctccaggagcctctttctccccagcaaacgttttagtatggcagcaaagtcatcctgcctatctgaacctagccttcaagtcacagctcaaagaccagcctgtgccatgggatgagcaactcggggaatttgtccttcccagggtctcaggaaatggcagggaccaagagctagcaggcactagaggccattgaaataaaggctggatgcaaaggagcactgcaacactgaccctggcactgcccatgtcccttctgatagtgctatgatcccctctcgcaggaccaaggccctagcataacaactctacaatggcaccaaccctgaacccaggtttctaagtctacaggtattaacctgccagggcctcagggcctctgttgccaagtgacacacaacatgtaacatctaactgccactgcaacagactcctctcctcctagtgtgtggaagagaaagagagactctgttcagctggaaaagacaaaattctaacagtcacttaagatttttagatttggtattttaatctcttttgaaatgccaaataatattaaaggagggcatgctatttttatgatggttcagaaagggtcacagactaatgacaggttgagaacattgcctggaggttcttgcccttgctatgtgtacgcatttctgttctatttatagctgacatcagttgctgcgttcctacacagttttacatggaaataccaccaaccagaactgagaggcacacgcagcccttgaggccgcctccttctctgagatcttgaacattctgaactctgctggtcgtttctcagcaatagctgataggagctgatcaaacacatacgtcagaacccaaatcccctgcctctttttgtcttcacccacaagacctcctatttggcccatcctggcttcagatcccagccactacctacccccacccccaccccatttctgagacagcagtagcagggttctctatagccagacatttgtcagcatgattgggtgaggtttagcagaaaagcaatttcttactgggaaaatcatttatcatggacagtctgtcgaaaacagtctcattgcaaacccttccctgggatagaagaactgacaactggcactaagtaatctacagcagggccatggggactcattcatcttttgcttgcccagctcaagacgggacgtgtctagcatagaagtatcagtcatagctgcacccaagagattccacggaaaaggtgatgggctctggcgaccatcccgtgcttcaggatgtacaatgagagactgactgtgttctccattttgctcagaggtgggatggtgcatgtcactgtgggggtgggggtggggcatcttcctcacttcaaaataggctcccttggcactttctgtttagcttaaaaaccagacctctctttcttagtgtgtaattatgaaaaggcttattgctttttcataattcaacttcccctttgcctggggcattattttctctgccagaccatagaatgttgtttatagcatattagataattactatgtgtgtgctgtttccactgacgtcaacactctggaaacagaatactgggcaatctgaggaccatggagacaaggagaagcagagagatttcccccactaaattcttgccttttgtggaggagagaattagttacaaatagaaaaagtaatatacctcattaattattgaatgtctgcctgaacccaggttctggcttgtgagttcggtaagttctagaagatgcttgtgggttccatggtactgtggttttaaacttttggcatcaggcagtgacttggaaggaacagtcagatgtaagttatcatgtaaagcatgtattctcttaggaccaaattaaaagtcttcttcataggtgtttagttcttagcccacttcagagtcacacatgcttataacattactacacaagtcttggaacaattctaaaccaccaagtgtagtacatgagatatattcacacaaaaactgccctctggttgatttcattttgctgtcattttcagagatgcggaattctaactttaaaagaaataatatgattacagccaacactacatgtagagactaacgtttacagcgggagttcaatcttacttttgacgagtcagctttatcttccaggctcaaaagaagagatatttacaatagacttttaggacagaacatgctagaaagaaagtatccctgagatatagtgggtggctagaagtcatactgggtagaaagtgtagatcgctggtaatatagacaccattgactcctccaaagaaaggtgcttgtggccaagagctttgtgttttacagtaaataagaagggtgtgttttgaaaggaacttgagcagcaatgacaaccgtggacaagatagaaagtaaacccacgtaggaatagcatacaactgtaaatggttagagcggtttagctttgggattcctcagccagtactgtctctttcaccaccctcaactgcaccatagaataatcatattaaattttcattttctaattaaccatgatttgatatgggaacccatcccaaagaataggttctatggtgaagtccaagctaaggagagcgatgtgaaaactggcagaagcccgctctttctctcttactggtgtgcacaatttcttcagagtggcaaagcctggtaggtcccactttgcagtgtgtgcaccacactgcatgttttttcagatgagaagaaacacgtgcacctttgtgttcagtcaggagttatccagatttgttggccctgttgccattaaaaatcagtccattgtctctttccccctaagggactggcacacaggctcccaggggagcagtggttgaaaatcaggatgacattgagggctataaatcacccagcattgctgggaaccacccagcctctttggctccaggctcttaatgcaagggaaacctgtccttcctcccatccattcctgcagaaggattctgatctaggaacacccctgatgctaccagcagtgtattttctgcctttggggagtgtaatagattggctgcttctcaggatgaagcaggtgacctcactgtgcaatcagatgactttttaaatgtctagagttccttcattacatccactacaccaagcaactcagttcaacacacttggatggacaagtcaccaaggcaggctttcccttgggacccagggatggaggagatgtgactattttctctattagttctctgacactatctaagttcttcagtgcctatgcaaaggcacgctcctgctctttaccatttatatatgtggctggggaacctatacttgatgggcacactttaggagcagagttgaagtgagtctttcctagttaatctgagatctactgccactgaacaaacagaacatgggcatgaacagtcacagcctggggtgaagcaggaccatgctttttccttgactatggtttctgtcttttatatcattgttgtgtatacatgaacatgtgtgtgaaaatgtgcattattgtgtatctatatgtatgtttttatctattatctattagatgatacaatggaatcagttatcccaacagcttccaaaatagctctccccggggctgctggtgtttaagttggcctctagttctctgtgttaacttttcattgctgtaacaaaatatctgagatagacaacttaataaggagaaatatagagctaacacaatgaagatgactgaagatctgggttcaatccctggaacctacagtagaagaggaaaagtgactcttacatattgtcctctgacatactaccacatgtgtgctgtagcatacaaatgtgtccatgcatacatacatacacaacaacgactaaataagcataaatacaaaatttaaagaaatgtttattctggtgatagttccagaaatgtcatctttgtctcttgattctgtcccttccagtgagtagcagctagtacattgtagcagagaagcctgggggagtgggtgtattcacgtcacgactgcagggaagcacacagagagaagaggtaccagggtgttcatagattcttcaaaggccctaagatccaactcctagaagactagccacctcccagtagtccctcaggctggctaccaactctttaacctggtactcagacattttgggttttaaatctagcactcccaatacttctacagagtggaaccaagactcaggcctttggagagaaagctgccagctagtaaactccacaacctaggagtctctcttatttcttcccaattttcaagtgaaaggctctcctgtccataatgcttccaatggaagcatcaatctcccagcaaagactaatgagacagccttctgagtatttttcttaccattacatttcccccagccagaattctatcttatatcaacccaatattacccatgctccatacaatccatgtgctgacgtatatggcgctattgtttcagcacacacagagttgtataaacaccccatattgtagaatcctttcctcgtctcagaaagaaactcaagtaccatttcactaccaacccctgctatgcctgctaacaccatccctgaagccgtcagccagaactaatctattcctgtttccatgaaatcccctgtccttgagagtcagtatcaatggagtctcatatgagtgaccttgcccgactctgtcacatcagtataatgctttctaggttcattcgtgttggggaatatgtgaaaactttattactttttatagtagtgtcatatatcattgcttggatatctcacattctctctctctctctctctctctctctctctctctctctctctctgtctcacttttgtctcacattctcttaatccagtcacccattcatgggtgttggtgatacttcccaccacatagttattatgagaaattacaaacacttgctacaagtttagtgcagacatatgccttcagtgttcccaggtaaagacttggatggaaaaattatttttgaggaatgttccagagcctttatgtcatcataatagcaacacacatggatggcaatctgtccgaatccttgcgggtgttccttctgatctgttttattgtaggtgccctagtaaatgtgaaatggtatcttgtatttttgatttgcatttcgtttatgagtaaaagctgaatgtggctgattgattttccttcatatgcttgttggttatgtttgcatctcctttggagaaagagctattcattagctctgtccactttaaaatcaggttagtttttcattgctgagaaagaaaagctctttatgcagcccagtacattcatcattaaatacatgttctgcaaacattttctctagttctgggggctgcagctttttcttcataggatcccttgatacacaaaagctttcactcttactgatatatctattatgttggtgttgcttctgcttatggtattatgttcaaagattcattgtcaaacccaatgtaacaaaggctcaaacctgtgttttgttctggaagggaaatctccagtctgctttgagttcactttgttatggtataaagtaagggtctgagtttatttacgcatagatagccaagttatcccagcactgtgcatccacaggctgtcctttaccccaccagaggatcttgttacgtgtttggaaaaggtatccaactatagcaatacgggttcatgtcttgattcccaagttgattccattaacacttccatctagaatgatgtttagaagctgaaaattgtttcgttcatctgtctgaagtcagaattccaaccagagcacaaggagccctacagtctctgggttcctgaccttggccacagagcagcagtttgtggggttcattgagagagtcctcaaacttgaatgagaaaaaccgcaccttttttttcattatccttcgacccaaatctgtagtatccccctttacagagcagagacaaccaatggaaactctaaatgactttgatgacaatagaatcccacatatcttttatggataagacaactaatgtgacataactcttcaaacacattaatgctactgatgagatgcactggtgtgttataagtgttgatagctattggtaaaaaatatcctcatcaaaaacaagcacggtgcataagtttgtttcttagattctaataactgcatagttagataattattttccttgtaatccaatgtttgtatgatacatatttgtaagttaaaaatgctctgacaagggaaccatagatttcattagacctctaaaggaatcctgaacatacacaaaaacactgaagaaatctagctttcctcattatcagttttatcttcttcatatttaccatcgatgaaatcatgacatttatttatttgtcgattgcctcccctctgatactagcacataagggctgagagcttcaaatagtgcctggcacataatagctattcaataaacattgagctactaagttgtgagtcatttctaaacaagagctaaaccaccggcttaatgaaaataaagattaatgataccaaactactgatgtgtaagtcattgtgaaaatgatttcatgttggtgtcatcattttcatctagtttaataaacaccagtgtgccctgtgcccagtaataagtacctagtattctccatgcccatgagtaagaacctatgacaccaggtgcccagcagtaagtacattgcatgcagtaataaattattgtccatactgatggttgagaaaacaaagggtcagagaagttgacgccaacgcaagattactcagctaatgaattacaaagtgatggtctgtggccagtcatcctgcctgagaacccacatttcactataataagacacatctcaagggggagagatgaaataggaatgttagagaaagggaagaaaaacttgcttattgcgcaaccaagaaagctaagatcccgtgaagttaaaaaatgtgtcctggaatgcagagttcagcagacctttccaacaaaatgttctttccactgtctggtttatggaccatggcagaaaaccacctgagaggaagcacagtagaaccaggtgctgacaggtcactccacatgagaggactcatgtttgtgtcactattgtcatccagtttaataaacaccagtgtgccccatacccacaagtaactacctagtgctccacatgctcagtagtaagtaccctgcgggcagtaatgagttattatccatattgatggctgaggcaaccgaatgtcagaggagttgacaccaacgcaagatcacactgctaatgaattgcaaagtgatgatctacctatctgcatagaaaagcttcgcaagcacaatgaatactaatagacattaaccacagcctgttcactcctttcctgggatcagcttgcatctctaaatattaggacatagcttcatccacgtgagacattaagcattcattagggtgggttccaattatccctggttagaggtcaggttacagagagacagcaaggcccgatgacaggcttaatctgcttttttattccctagctcaagagttatctggctttgaccttatccagtcttacagtacagaagttaaattgaagtagagagacaggtattatcctttaacgccgttgagggctactagagaaccatccatcaggtctgcagagaaacaaggcacaggaaatgtcctcatcccttctgagtagcagcaaatgggttgtttagcaaggaatccctgtgaccaggatacttcctgcctccagagcatacgttcaggctggcctctccccatctcctgctccaggctccctttgcgggtaatcctgtctataggtatataaggtttaaagggctggattaagccatgtatgtttccagccgtgatggtgctcacatgaacaaaaccttgtgggcactgaagttcaggagactgggttcccctctttttctgctatttgcataagtggtagaagaggccaattgcagacttcccaggaaaagtctatacaggacttgctacatgacttacttacatagataggcatagcttttcctcaaaggaagctccaacctttgctgtctacttctgggaggcattttctaagcccttggagtgccataactgactacaaagtgccttcacctgcggtcttggggcaaccagatggtcatgagctgattcaggatgagggctgatcacactggaatgtgtaacagtgcatcttgggaaagcaagtggaaactgaggtcaggtagccatggatataaacacccagatttatacagtcaagcccagtagagctgagctctcaggctgagctgggctcccagactgcatgtatggatggcatgtgatcacatgtgaataacgaaggtgccatgctcctggtgcagaaccttcctaggctctgccctgtgcacctctttcccttggccaaactgatcttaggtattcccctgtaataaactgtcaccatgaatacagttatttttgtgaattctggggtcccttgtagtgaattattaatgctgaaagtagtttggggcatgcccccttgccctaacttacagttaaagtaaaaagcggagaagagtctaaggatactagccttacccctccctggttctgtattagataatcctacccaatagctttggacccagtgctagcctgcctgccttcttcctcaaaggttccctaaattcctggagctgagaaggcatactctcttttagactccaaaccaacgtttctcaggctacttgttagccaatcccaaggtcggaaatgttttccatcacaaatcagaaaacgggatctatgaatctaactaactccataactgaaacaaaggtacatgaaaccatcccacactcttggctgggcctgggtctttcctggctcagtctcattttgtgaaacagctgtctcttctgagatctgttccagttgtgaaccacgtatgagttgagatttgccatttcagaagctcagtactatccactaccccataattgatcactgtgaccactttctagtgtatatagttcttgtctcttcatgtctttccctaatgaaaccaaggaaaaaaataattaagaaaaacaacaacaacaacacacagctaatgtcctgagcaacccttgttcttagtcctgtgctgagagcgttcgcatacaccattatttctatcccttgtcactacagtcaccccattttacaaagggaaaatcctacatcttgaaagggttaatctgtctgttcagggatgcacaacataaagcagaacagaattcagccaggaaagggctcagtcttgctgctaacctactaggcatcttttgctctaatcttcacttctgcagggatcttccagcctagctcttggcgcctcagtgcagaggggcactgagaaacaaattggaatgcaagacactgtgtctaccagtccaaagaggaagagtctgaaaaaccattcctacttcagaggagccaggctccctgacctgccagtatatagctctctcaggcctgtctgtcacggttccatgcactcctcccagaggagtcttcttcttccagaacactggtcacccctgcctgcttcctactgcctctccttccccacaccaattaaactgtcacagctggctggcttggagacaggtgaggacaggaaggaatctggaagaggcggggaattcgtggaagaagggggcctctcagccccagctgctcttctgcttcctgtcaaattggtctgaagccttgtggatgaaccaacaggcatccccagtgactccccaaacctgcctctttctctatcagggtggttagtagatacagctacatggagaaatggcagctgtttgtatctgtttgcatccagtgctgcctgggtcttggcatagcacgaggatctcaggtgatatgaccagctgctggttgcccacaaatcacagccaaaggaggatcttgtcttctaataatgtagaagcttacaaccaggagagaagcagaaagcaaagagatcttaaactagcccagcaatatgtaccctatggctcttcttgtctgtgctgatgaaggcagtagggaaagctggaaaacccaagacattcccttacttggttttatgggcccagactccaatgcattaggctacaagagaatgacacctggacttagtctgcaggcagaaaggacaggggctgccaatagatctttgttcaacctttaagttcaaagactctgggacctccaggacccttatggtggaagaaactgcagtaaactagcaatagaaataggctatgagagaggaagccctcggcatgggatccatggatgaatgctagagtccttggccaataaacattcctgtagcatccaattcccaaagaagggtgtgtttgacctgcaaactgtcatgagcattctacatgagaagctatacacattgccttctatgcctccacttgctgcagtgctggctgcaactctcttgtgactcctccaagcctgtgtacgtgcatacacacagatgcacagcctcctttcctacttccccagtgttatccatgcctgataacagattgtatttgaaggccccagcaagccatgctgctgcctggcacgtgtctcaattattgatgtagctctttacagaacttgcttgattattcttgcccgtgctattatagagagggcatggcccttaatgcactcctggctcacttctcccttctgctacaggaaaagcacaggtggagactcctaattgcatcttttcacctttttctgcatcctgtctctgcagttcctcgggatgtcaagatcaggtgtatctcaaaatctctgcatcttctggctttgggtgagggtggctatagaaagcatccacttatgtcccatcatggtgtggactcaggacacaggacagagtgttatcaggaagggtaagttgaattccaatagtaaatgacccttcctacaagttgttcctgtgtgtgacaacaggtgaaaggaagcttgggtattttccatgcagaaaccagcctgatgggatggctgtatggaaatcagaaatggcataagattatcatctttttttttctagttctgaaaatatctgagtcccagcttccatattcaaagattgttgctacactaacctgaactaccaattttccatgcaaaatccaaaggttcagtgattgaagcgaaaagcctgcactgggcaccgtgtctggggagaaatttcccagacacacttccattgtttctgaagggacaacagcttaagaattaccaggaaacattaagtgcaatactcagaaaatcattatttttaggctgatgaaaactgtggtcaggatttatgtacaccaatctgtactttctatgtactttgttagaaatgaagccaacctttgtataatgtgtgcatttagcaaaaataaggcagaaaagtctccagcgatcattgacacttacacacttaatatcattaagtctgttctggtcaagctaatccactagcagaatagacagatttgggcttctcataaagaatttgacaattgaagggggttatgctcatttccatttatgtcctggaaaatactcccttgtgacttagcaaccatgtttaaaaagcccttgcagtccttaaacaaacagaggagtatgtttatggggttctaaagacgttattttcagagatgacgtaggggttatgatatgtagctttggggctttacagtaagtttagctgatttattactatggcatacagtacttgcttagggaaaattggggatttaattaagcactgtttgaaaatgtgctttatgagaaataatccccagacacatagaggccaaagtttctccatcttaaagggagaaaggaccttttgggggatgaagaagcaagagttaagaaagtttcctggcacccctggagctgagctaattcaagaacagaaagagagagtttagagtagaggctgaaaacaagatctggcctgcagacgtgttttgcttggcttgctgggcactgggagagttgtatggccagtatttttaaattggagattcaatttgtaaggccagttttctcccttccctttgaagcatcacaagatctgatcacatgagtctatttttctgcatgggaacaattagcagcaattgagtctactttaggagacacccaagaccccccagcacctcatattcctcatcagatctaccccatccatttctaagagctcctaataatggtatatataaacttgaaaactcatgaaatctcatgaaagcttttcattattgcatagacttctgctagctaatctcaattgtcaacttgatgaggtctggaatcacctctgggcctggagtcaagtattatgcaaatgaggttaactgaactaggaaaagcccactgtgtctgggaccattcctttggttgggcatctagactataacattcgggaagatgatgggcacttgcattcacagccctctgcttcttgattgtggatatgacgtgaccaactgctacaagctcctcacatgacttccctgtcatgattgactgtaccctggacttgtgagtggaaatccacctgttttcccttgagtcacttttttttcagggtactttactgaaacagggaaagacatgaagtcacctcctaatccacgaagactccttttcatatacagagattgaaaaggacaggctggaaatggaatacttgctttatcatatttgtaataactacgacattgggatgagtatgccgtatgacacctgtatttgagattgcttgtttaaccatggaaacatctagaatggtagaaaggacagggtggagaaaacacagcccacttttctatcagacatggcaggctcatatgtctaaagacctaaagcacatcttaatattcattcccttaatgttaggttgaagaaataaatgacaaatcgtaagcagttataatactgataattaatgcagatcagattggttacccttgactcatataaaggtaatggtaaatgtgatttttaatattctttacgaaaaagaagaatctgaaagacaagagcacctggagcccaggagaatcaccaggagatgttggacaactactaagacaaatgccatggcttgaatgtgggggggtcaaaagacaacttatgggagttgattctctctttgaaacatttatatcctgggaatcaaattcagttcatcaagcttagtggcaagcatctttacctgctaagccacctcaccagccctattctgatttttgaaagaggttcatgtagcctagaatggtctggaacttactatgttgatgaagctggtcatgaacttctgctcactatgttgatgaagctggtcatgaacttctgctcgtcttgtctctaccttccaaggactgggctcacagtcacacaccaccattgcctggctaaagccaatcactgctcttagaagggtgatttcaagacagggttttgcttcatttactgaaaataaaaatcatgagaccaatgtgcagatcatagtaagagtcccctcaggaatttttggaggatttctctctcaattggaaatatccccgagagccaaacattccattgtaaggggatgtctttcagcttatcagcctccagcatttagcgccagtggaatggcaattagaatatattgccttatgaaatctctttattagtctgtttggtccctttgaagtttggactacctcttacaaaatatatacaatttaaacatcatgatgagaaaaatctggacttagccatgctattcagtattttccactatcaaacatggttgacattcaataggttaattgattgatatgtttaaattcatatgtgtatagagtctatcctgtctggtactgtgatgaggttggggccaatgcccctattgctatatcctactctattggaattatacactactacccttaatatgtatacaagcacatgttcacatacacacacacacacacacacacacacacacacatacatgtacacatatacacaaagcctccaacctcccaaattttttgaaaaatgacatatgcatcaaaaaatcccaagggcattcttactgcaaaggattctatttttatatcacagatgactcatcattggtcagggtctttccaaagtgacaatctttcaagttgtcaggacagaggacaaggggtaagagacaagagagaggtcgcatgtcctgcagctcataaatcccaagaggaagctgtaacatctgctgccacctagtgccaccctggctagctatgttgtcatgagcactgcccttctgtttggtttgcagcattctgagccagtttgcctccaactggatcccacgctggctttcagcaattattgaatgcatttttgctgtgatttggggacagtaatagggtaagatgtgactggggagaaaacccagaagcctgtgccataaactcaaagtgaaccacagaacacctggggatctaacagggaatgcattctttcacttgctctcaaacaaaacaatcacttaaagggttgtcaaagtgctaagagagtgctgggtcatccaaaacattccttctaaatcctggaaaatggtgaggcggtcagaaagtgcccactctaattctgaagggtcggggaatgtggatttataggcatagttagaagatagtattttcacagggaaagcaaatgagccattgggctcagtgttctcaaaagtaatgcctaacaaatgccaagaagtgaagccaatgacccagccttgtcaactttccacaatacagctgcatgctgacgtctccaactctgaagtgagggtggggggtgggcaggggaaagaagaaaagaaagaaagacatatggacagattggagtagacaggggagaaaggaaagaaggaagggagggaggaagggagggaggaagggaggaagggggggagggagggagggagggagggagggagggagggagggagggagggaggaagttagttcaacagaggaagggaggaaagaaagagggagggagggaaggaaaggagagggagatagaatggaggaagggagagaagaaagaaaaggagacagagcaagacagagagagaggatcaaagagtttaaggcctcttgccagtgaagacaaagctaactggccccaaagtccttctgtctgagtttaatcttttccaccgctccacctgggattatatctactttctcctggcatgaaagtctatagttcaatgaagacctaagagtcttgaattggcaccaaaagtcaatgtgctttttttttttttttttttttagtagacagtaaatcacaagacatctttgctcatggcttaaatttggtaaaaacgacacaaaagatcaagaggaagggctttatctcaaagggctttattttttgactatagtactttcctttggtgacttttagcaggtgacttttaacctctagtcatgtctaaaaggtagaagaagaaactctgagagacaaatgaattcaacctaatgtcatacaaccaaagaacagaccttgtcctttacatctacctatggagaagtaaaagacatagaaagaagtcatctctgccccttataccttcgccacctatattttctgccaggtttacctgcaattaagggagaatatgctcaggcacagagattagtggtaccaagggatttttaagatgtgacaacatatttccttgtattcaaggaaattggttcaaggggtccctatgaatacccaaatccacgtaccttcaagttgcttatctgaaacgacacatttgcatataacttagatatatccttccttatacgttacattctctagattataaataatatttaatacaatgtcaatgttgtactagtagcaactgttgtgcagagagtaatgaaaacaaaatatatctatgtatgagctgtaaaactgggatcttcttagacaatattttcaatccacagttggttgactcctcagatatagaagagaactctattcccaagttgtctttgctatcaaacctgaaaggtctatctcattcactcctctcactcccagtagagtcccctatagtttctaataagctgcctgaggaacattcacactctttaacacttgaagatgccatcttatcatggtacctatgggaccacttgcacagtgagggatgagtgaggacagagactgtcttagtgctatggaaggttgaggaggaacacttgagaaaaaataaagtcaatctagtgttatataaccaaagaagagaccctgtggcctaaatccatccacatggaagcagacaggtaaagaatgtgcctcctttatccctctgtatcatttctacctgtctttgctaccaagtttatccctactaatgagagaatggcaacatgaaaaactagatgatgcagaaagactgggtcaacgctccttacacatcacagaattcaaaggtgccatgagaggctagattctgaaaggaaaagaaggctcccgttgggagctatttatggcatctaccctgaaggcagcccgtctccatccctcagtggctcagctcctctaccatctgacactctattctttcaacagctgctggctctcctgttgtgttcccccacacagatgtgcagtgctgttctgaacaccctgcccttgaactttccctacccataattttccaaaccaaagcctggcaataaaaatgtcactgagggatggtgaaaattgtggtggggagtatctttaaaagaggagaagaaagagatgctttgcacgcaccgtgatttgtgttgacttcttcaacaaaggttaagtgcatgccgtgccttctcaaatagagcaagaaggtggggtgctggagctaattattcagagcactacctacaatgaccctgatccattaaaggaagttaacagctaagatatgcccaggcgctttctcccaatgccctggctgcccagctgctcatgctgcaaggctacataatggtgaaagggaaagctaccactgatcacaagggaaccctgatgtatgctgtctccacatccctgccaagtggttggccaagcagttgggcacattggaggcaccaagtcaacatctgtgcatggtgacttagaacaaaagtaatgaaagaaagaggctagtttgtttttttttcttttcaatcattttttaataccttccaacaaaccgtttttgggcccacttttcctatactctgttgttttaataatatttgtgaattttacacaatataatgcaaaactataaaagattaagccttgcaactctctaaaggataaaagaatgcattcaattaaagggaaaaggcatctctcctacctgcttctgtgtgcagagcagagcaggtagggatgggtggggagactccttccttagaaagaatccgctgggtatgaggactctcgagaaacaaccatcaacttccctgtgatccacagcagatgcaggggacaggatggtgatggggctctcccaagagctatctattgtacacttggctctcaggatgagaatgggggaaagagaagacaaagggaagaaggcagaggacttgacaggacaaagcagcaccaagctctttctagaacttctccagtctagaagtttattccttgacatttacaagtgacagcggggactgggggagctggtggcacattagagtgagattctggcttcaggacttgttagctatatggtttgaagcaaattttagggttccagacttctagtcagtaaagtgggaattataaatctccagctagggattagaagaagccattaatactttctgtaatgtgctgagcattctaattcacatgcagcccaacaatggggacacaaatttcctctagccttttgttattattcaaatttgtgtggatgtgtctgtggttacatgcatgtgtctgactgtgtgggtgtatgtactcagatgtgtagcggctagaggttgaaaatcaagtatgttcctcaattgtttcccactttcctctctgagacattagtctttaacctggtgttcaaagaggtggctaggatgctagggacccacctgtctcacctaccacctagcactgggactgtagacacacagttcttttgcattgctgctcacctcagggcctcgtgcttttatggcaagcattttgctgactgagccatcttctaatcccctgattttttactttagaaagaaaatttatcggatgaaagcagagatatcagataagatatgaagagtagtggaaggtaaaactgtgaaataataacagattgggctaaggctctggatttctgaattataataacagagtcacttgtgtttccagaggctatggaaacaatctggtcagtttctactgcaaatttatgtacaattatctgcaactatgtttaaccataagcactgtcactacctggaaaatatttaaggttttcacattgaagctgtgaaagtgaataaatgaatgaatgagtgaatgaatgaatataaaatgaacaaataaatgaaatttatgaggactgagaagtggtcattcccctggcggtggagcacttggacaggaagtgctacaaaatttgtgctatggtttcctcgaccatccaaatgccctactcactcaggcggcaagccttaaacaagaatccaagagcaaaagctggaaaagccagagaaggcagccccaactgtgcaccaggcatttgggtgcagatagagtcattaaggaagatttttaacaatgcataacctttctgctttcctctgctaacagcaggtggtatgcctttcagaatggaggctgctttgaagttgccagtgagcaggacctgaccttcatttccagtatatgcagcattaaatattcataatccacgtaactgaagcataagaaggagcagcatttaagcatgaatcaaaggaataaatatctccccacgtgtgagtcatcctttcccagaataccactggaaaaatgcagatgcacggagctttgagagcggctgtctctccaactttcttttaaattatagaaggaagcagcagggactgctgccttgtgccatccatgcgtcctgacccccatgctgacactataaggtcttttcaccccttatatattcagaatttggtctggtatcgaggagagaggaggagcaagcaacagtgacattgacattcataggaccttgaagggcacatttgacttggttgcgcaattttaaaaactatttagtgtgtgtgtgtgtgtgtgtgtgtgtgtgcatatgtttgtgtgtgtcatatgtgtgtgtatggaaacatatatgccacagtacaggtgtgggggttggaagaaaactttcaggagcatgttctcacctcgcagcatgctgaggcagagtttcccttgtttctcgtgttttgaccaactggcccatgtgctattagaggattctcctgtctctgcctcccgtctcaccacaggaatgccagttttaaagaagcacatcaccactcctgccttttaaaatgtgggttccagagattaagttccacttgttaggcttatgtagtagatgcttctacctgctgagaccctgcttatacattttttttaaaaaagtctttgtgttataaaaatcagggtgcataggagaaggagtacctgcagagtcagggtcagaattaggaggtggggaatttgcagaacatggacctttgaaaggataagattacttgtctccggaaggcactgacattaaagacatctcaaccaagtcctgctataatgtcctcctttgtttgaatcttcctagcatctttcactggaatgatggtgctccatttgaaccctttttaatctgattctctttatctgtaggctccaggacaagctgtctcatacagatggtgatcactgcagatgatccaaatgactcttcgcatagagaccacataaggaaaataaagacccaaaggagtcaaacacctcattgagaaagatccactaggggatctatctatcttggattaagaactgaaaagcaaagatgtgtgagattaccgtagttgagtaaaatttgaaaggtaaggtacatcaccaattataattacacctgccactcacaaagttaacctgaactttactgcctttctgttggctcattgagatagaatgagcatctactctgcttgtctgtgtgcacagtctaaatcggcctctctgacatcagctagctgagttaaccacagggacctgtttcatatgcccatctgcaccctttgtagcttgctctctctctctctctctctctctctctctctctctctctctctctctctctctctctctctccctctctccctctctccctctctccctctctccctctctctttctcatatatgcatgtgtgatatatgtgcaagcagagatcaagagagacgaccaggtgccctgctttcttaccctctgacttattcctttaaggcggagtctcttactaagcccacagctaagatggctgccaagcaagccagtggtcttcctgtctccatccccccaaagctctggagtcatagaccatgcccagcttttcagaaaccccttagtgatttgagctcggatcctcataagcataagtagatgttcttacccaccaggtcatatccccaaaccctctttgcactgcctaaagggccacatgtggaaagccttgcatcttgagcttctctaactatgagacttccaatctaccaagtaggtaaagacagcgctggttaaatataataagagaacaattttgcaaaccgtgtcagtctggcaagggtcactccaatttatttgcagagggttaacactaaagcaaattcatctcagaataccaggtatttttgacagggcaatgacttggtataatttttaagaggaatttaatttgctctccaagatggccagccaagtcatgtctattaagagacagaggtagttttgaatgaaaaaggtagacttcaagaatttgccttatactttctcaccctagttccatgtgtagtttatatatagagtttcatctcatttcattcactaagcttgattgcagtttgattaggggattgtctttggtgttctgactatgaccttctagatttatcataaaggcaacaacattgtaaattttactttagttcatctctataaactgagcatatttgctcaacctggatgggaaggtgaaggattctcagtataggcttctcactagcttttccacaaatcagagtgttagggtgtggtctcagagagagaccaagaagcagcaatgaaaagtagagttatgtacgtagccacaggtgttctgctaaaccaagtctgttacaaaaaagacccacacagtctgcatagtttaggtggagagaacggctgaatccatgctaaggcttggtcagcccccataaagaatgaggaatctccaagagtactggcatttctggcttgggaaactgaaaaccagaactgaagatcagccttggtacagacttcttggatgagcctaaaagatccagaatcactgagggtttcaagtctcatcttcacaaagactgagcaatttcaggactaaccccaaagggctggaggaggctggggaggcaccggtgaagagtgtcaacctaggtgaacaacctaggaacaacctaggatgctctgccatcctcccccaaggaagaccagactctacacagccaaaaattgactcgtagttgacacaattttaaaaaaagacaccatccaaatccatctgccagaaatagtttattaccatgacatacatggggtcagaaagggagacaaaggaaatggaggcacagtctagatctctgtccctttagcagaccgccacactcaccttcacataagtgtgtactctctgggggcacacagactacatatccgaaactctttcctaagccccagcacaggcgttggcagggtgtgtaccccatgacccctggagagagattggagaaagatgaccaagtgcttgagagtgccagttcatttcaaatgtggtccagaatctctaaataaatatgaaaagagagcttaccttcactcacagaactggagacttgcagactgaatgatactcttctttcttgactagcaatttcagatgaagagagcatgcatattcttgtgccctgaggacatttaaaggactcacggctcaagacaggtgagggcccagccttgtgtctgaggtgggctaggtgacttctgacagtctgacagtggcagatttcagacaaggatgaagagatatgtttctttacttttccctgatgtgacagtatggcctttatagccacatgtacaaaatcccctgcctggtgaccagattgctcagggaaattcggaatttgggtgtgcattaaattgccaccataccaccccataggaaaaagagcattgagcccaaatttgaggcataccagagtctgatccaacaggaacacaagacaggtattctgggttcgaaggctaagacccaagcaggattaacattagagcgatgaaaaccacccccaaagtaaacaatgaggactgcaaggtcaagggctcttgtccttggccagagctgtcaagtttgtgtcacagcagaaaagcaagtctattcccagatctgtgtgtctcagatgctgtcaactttgagacttcagtaagatagttggaaaaagtgatgtattcagcagtggttcccacagcattaagagtagccatggtgcctggtctcttcagcctccccaaaggttcatcatctgtgaaccatgcttaccctggggttccagatcactaacctgccactccaagggtcttcatgagcatcactctctacaagttctcagagagtcccagacctctagctctgggaggcctcatgaatgccttatcccatttctttagtttcataattggagaagcacagtgaccattgattcagctacatattcatttggcaggtagaatccttgcactgggctttctaatctatcttccaatatgatttttctggatgagaaaaggatcctatggctgtggctagaatggctcaggctcatgttggactctgtcaccctctcccagagcttacacactcccaaaggagccctcttaaccccttggcatgtacagtataaatactcaatcaggaaacagctcattacaaatgtatacccaacaagaaggtttggtccctaagtgcctctcccttccataccatcagtatcaacctagccgttcttttgagagaactttccccattcataaatgaagcacagggaagccccgccttccttcaagtcttcagcactcaggagaatctcggtaaggctagtattaagttaaataagctcatcaatataagggatcataattgccctaggggaaaaacaacggacaagacaacatatatgcatactcactttgacgagtctatgaagtatattacgagggcaccaatgctgagagcaaagactaacacaacctgcaaaagaaaagagacactccatcacttaagggctgggagctgaaagcttgcatttctgagtggctgtaacaactgcttccacatctcatgtgctcatgtgctccctgccctgtgacaacccagacattgactcctcacccagcagtgggagtaaccttgcttcttgccaatagaggtcagggcagactttcccatcctgtgtccttagattttgatcctgccctgtcaccttgaagatcagcttctccaccactgaattaaacaaactttagcagggaaagagagcattaaaagacttggaaggatgacatttttcatcctctaccgaccctaggatttaaagggaacgatcacttttaacagatttgttgaggtataaaatgcatccattttgaacacataattctttaataaatttgtaaaatttgccaacttattgacatcaccgtgatccagtttcagaacatttttatcaccacaataagatctttcttgcttgtgaaattaatccctgttgtatcctctgggcccagacagtcgctaatctgctttctgtctctacataagaaatatccatttgaaaagtgcacattggctactacagataccactttgggtacatgtgaagagaaatatttatgcacacacacacacatacacacacaatcctatatcaatataaatttgctcaattctgagtatgcttataagatttctcaaacatgtagagaaaacattaaatgcaaaaaatgtcaactaggtcatacatctgaccatttagttatatgacagtctttaagctttttgcccttgttcaaaatcatcacaaatataaaagacagctttgacatctccttcaatgcacacctggcacataaaagtccactgaaggaacctgtagcagatcaggctgctactaacacctctagccctcattcaactttccaatgatttatttcatcttttgcagagaagacgactaatgccaataaaaaatgatcccagtaaaaaagacactaagagccagcaattaaggctgagcacagaaataaactaaaaaggacaacaaaaccatacacaatgcctgtgtgctgctcaaccctgccctttagatatacacaactcctaaagagactgtagggaagacccttagacatgtgaactctcctcaggatccatatgcagaaatctggctggcctgcaatgatggaaagagagtaacccctacttctgctaagtctaagtattattaagctgtggtgcattagtgtgtgtgtgtgtgtgtgtgtgtgtgtgtgtgtgtctgtgtgtctgtgtgtctgtgtgtctgtgtgtaagagaaaattgcacactcctctgtttttctgtgcgtgttaatatggttgatataaaatgcagtgtatgtgtaatgcccatttaaagcactgaacgcccccctccccgcccaaggaaccacaggagagaggtgatcagctagccacacagtgtgagaaatgactgggcacaacataagggacacacagtgttctcagcaatagctagcactcctttctcaagagtggtggttagagagctacaccactggggtatatttcattcttcctctttgcttttcaaatcaaggctcccattgaatgcaagacagctcctgcagtttgtctgcaaccaccagctacccaatcaactagttcttggctggctcgcctctgcttccgctcttcacatgggttcattcacagcttgtgtgcaagggtataccggaaataaagctataagcaggcttttcatcctacgacaaacagtgtcagattaatttggagctgggatgctatttctgagccataagcagttagatcctggtcctgacctcattctcagaaagctgcagagggaaggggtgttatgacagcagaggggagggtccccttcattcataaattactgattgggcacagatccctgcccagttagctccatgtgtatgaatgtagagctgctgtcagggctcactaaacagtcctatgccaccaaatgctatgtcttatgaaaggaacactcagagaccttgcaaatggcacctacattctgtgagaagttaggatctcagcacttctgtgaaagcagtattttcccagaaacaggatggccagagtcactaacactaatctgtctcagttgcttccactttggaattatgtgtcacttatttaagtaaatcagtgacaagagtttgaaatacaccctgctggcctcttcaaactcaaacagcagcatcttcaagagtaatagcaaaaggaacacgggaggaatacggtccccacagagcccctgttggcttggatcctgtgacctgccagaaggctttctctcagagagattgggaaattcaaactgtcccaaccaccaggagcctcccaacaggcaaataaaataacaataataatagcaataatagtaataacaataataataaaacagtatttagtaagaaggtaaactgtgcatgtaggcaaataaaataataatagtaatagtaataataataataataaataatatttagtaagaaggtgaactgtgcatgtaggcaaataaaataataataaagtggtactcagtaagaaggtgaactgtgcatgtaaactttacagttactaacgtgccttgtgttcatgtcaggcttgactatactatcagcctagactcagcttgtgcagaaacctggccaaaaaactgtgagcccaacagactcagccacttgttacatggctctctcaaagccacctgagtggaagggcatgactcaccaactttctccaactttcaaaacaatacattctaaatgtttttgtttgttttttgggaaggaaaaccatggccaatgtaaaggcagtggctgagcaagtctagcaaacccactgaaagtagaagaaaacctactctgtgaagctgccctctaacttctacatctgggttgtggtgtcatttgtgcacacacacacacacacacacacacacacacacacacactggggggggggggtcctatactgttacataattatagtcagttgttcaaagaagggacagagattgtatgctaaagctactgaaggcagatcatcaatcaagagatggaggagtagttaaaggagagtagagacaatatgggttcttgcttcagtatttcttcattctccaagtagctgttctttgtacaagttacagctatgctcatattgtttcagtacagtgcagggcccctgaagaccctgcctacttctaaagccccagtgttaaggaagatagaaatccaagggacagggaaatgcatgttatctccagcaactaagtcataaaataacctttaaaatgaccatgcctttcccacacaagggcctatatgtggttggtggtataatccaagaggtcatttgctccttgtctgtctgtcatgacaccagcgtctgtatagtttgtttaactcctcatgaacggtactcagctgagcactttgacagtactcactgttatataagctctcagactgactgcaaacactcatatgaatttagagactgcttttagtgcactgcactcactcctggcttaaatccaagagaaaactgaaagtcggatgagagcctggcatctctgcttctgtttagtatccacactttggatgaacataccgagctaacttatttacccttaactttttgtctggaatcaccttgaattctagaagaagctaatgttctcaagatggaccactccccagataggacaattagccatgagggtcaagctgagctctagaacaaaggttatcatctggctgaaaccagataggtcccaaggcagcagtggggacagtgactgacagattactgccttatcagaccactttgtaggacaggagccgagatcaagatgaattggtgatagggaggaccatccttaagtcctgctttttcacacacatctcttgtcctctatttaagtctaaacctcgtgtcagtatcactgaaagacacaggggtcaactggatcattttatctgttcctcttttcaatgtggccgcactgagtaaattggggagggatggctgagcctgccttcttgaggcttctagagcccagactattgagtctatttctagagtgctagggcgagagagagagagagagagagagagagagagagagagagagagagagagagggagggagggagggagggagggagggagggagggagggagggagggagggagggagggagggagggagagagaaggaaggaaggaaggaaggaaggaaggaaggaaggaaggaaggaaggaaggaaggaaggaaggagcagcttgacaagtatcattggaacaatggaacagaattcatttattttcagaatgggaaatgaaacatgacaagtgtttgtaccaaagaatgccaggaacacagacggtgtgtgaaaacagtacacacaaaaagtccatcctccttctcaggaggagtctaggcatgaattgagatgagagcaaggcacatcagcagccatttgtctggatggaaatcctagcaagccatgaagatccttcaaatgcctgggagggaaaatgtcatgaaaatgagaaacagtgtgagcaagcctagcctatacccttcagttaccaaagctcctgcggaaaggcagattcagtgaagttggggcaggcagagagagcacagagggagggccagaaagctataaagcaattcctgagaaattagcatataaaaagaacaaatgggcaaagatgaaggctgggagaaagtgtggctgaggtcagccaatgggctgctagcacagatgcaaaggtaaggtactccagtgtctgaaggttacccatgcatcattttgatattcaacagcactctcctgaatggagacttaagacactaatgagacattagacacatggagttatacatagaactacacgtaacagatggaatatatacagaaaagccaaattattatcaaaatgcctgtattatggaatatggaagcgcaaatcctttgtacagcatggctgtttatgacaaaaactctctttgatctagcccacttcctcccttgatgtggattcttccttaataaattatctctgtctgctagctaccatctagatatcctgtccaattctttgttcagggacaacacggacaccaaggtccaaaaaaaaaaaaaaaaaaaaaaaagcagctctgcagaaatgtctccagttgtcaggtttgtaaccatcatggtaggagtaaaggtattctaagccatgcacttcaggtcttagactactgacaccatggaccctcaaggaattagagtttaaccagtaatcttgtgctgggtgacaggaaagactgtggttttttgatgccaactagaccagggggagcttgtctcaggaaagagggatttcatacaattctgacaacttgtcagaccatcttgtaggatggaatggaggcagacactaatgggtcaatgatgggcaggaccacacttgaccagggtgcctcttgccttctatttaagcccaatcctcagagcagtaccttgaatgtgaactggggtgggaatgtctcttaacctcttttctcattcctcttcccagtgtggtcatatacaactctcttctctgcttttcactattacttatcattttacttgacatactggtagggctgcagggtactgggcttagactgtagtaataggctgagtcacatcaatggacacatgagaaaacatgggccttcagagatggacctggagctgaagctcaaaggagtcatatctctggggagttttcttacaaagccgaggtagagtctccttgtgcgatatcttggcaagcataggtacttactgccaaatctgacaacctaagtttgatccctggaacccacaaggtagaaacagagcaggcagaggcacacatgtccaatacccccaaataaatgcaaaacaaaataaagacgaacagggagtgcactggttccttcctggtaccagagaaactcaaaacaatgggaggggagctggggcccttcatttttgttcagcttgtctcaaaaatctgacatgtggccatgagtgggtgttcctgaattaaagccattagggaaaaccacttagctcaagtcagagattaattcacaaatgtagccttatcaattagcccattagaacatatgtaagaggcccacaggcttggagaatctactaggcgtgctccagaaagtctggagaggaggaggaattaattcttttctaagcgggcttttgtacattctcctcagctcacagcagaacaaatgaccctaatcaatgatggtacatgttctatatagaaactggctactggcaacagagacttttcttggaaaaaggacagttttccctatctgatgcttgaaggtatgtggctttttttttcttcctttaaattaatttatatataaaaaaattaactatgtacagaaaaaaaatacatgggcaaattctcaaggcaaaaccatctggggacagtttgtttctgagaggggtgtgcagtctaacatcaaaattgcaatgctggggctagtgaatgtaataatctcggtggacatttctctaccatgatgtgcaaggtgtagaataagagacagggaaacgggagaccaaaataataaagtcaagctgccatgagcaggtgtggaatccaaagatgaaatgaatcaagaatcttatgaatctaagaaatgtcttacacataaacagactccttgagaggaccaatcatagcaacaccaccgcttccatgtcaaacccgataaatggtagaggaagagagaatgggggtgaaacacacacacacacacacacacacacacacacacacacaaagaaacaaagaatattcctgatgttccaggtgggcctgtgctagagaggccagaccgcaagtatggagtacaatggcaagtggcaaggagaggcagcaggatcatggggcctcactaggcagcattggtgaactagatgtatggagcctgacctttcatcaccctgggagtcagtttcccagtctgtgaaatgctaggattggaagagaaacttattaggggaggatcttgggaggttcctgaccagttataaatgaagtattttcatctggaaaaggcagcacttttatatgccacctgtatacctctcgtgtataaacatgatgcagtatgatgacaacaatacccaacaaaacatctgtgtctctcagtcttctcttgtcaagtcagatgcatggactcagtggatgctctgattcacagtgtgcatctgcggcacccaaattgattgctcacgcagcacatgagcccccaagctaatgcagaacagaatagaaaggacccttggagaggctatagaagagctccctcccaggaccaggcctctgccatggctatataaatcaaggcagggtctaccccaacctctttttcttatgcttcttgtcatctgtgaaaagcctgcactttttctctacattttaacacctgaagctcagactggatctcagtgttttgttttgttttgttttgttttgttttgtggaaaataaaaagtgtgggggagcaggttttaataacaaatctgtcaagtaacattttttcattcctaaagctttaatgattctcctaaatcggtatgatattgacacctcaaaaggtgctcttgtgagcataaattttaaatgatttataaagtatagaagaggtgttttgaccaggtcatttagatagccaaaggtctcttaaatttaccatctgatagtctgacacattgcaattgatttatagatatgtgcaaacaaacatgatataaattatttcagtggacatccaaactccaaggaaagaatgaaagagaaatgtgttcaagaagaaaataagccagagacagcaatgcctttaaggagccgctgtactggaaaagcacagtgcttcatttgggaacacgacttctttcttcatatgtaacgttcaggtataagactttgctgttatcactggtatttagtgttggaactagaaccccaccattgagtatgctaaggacacactctacaagcaaactatacccctggtcccaaattcatacataaaataaccgagcagaaattactaagattttataggttttcacacacatttatgggaaatgagtgattttcccaaatgtaaacctatgaacctatgaatgacctggaatgttaggacacagagaagggacccacaccaatggcttcaaatcataactctagtatggaacaaaagaataatctccggcagagtcaattcactgaaaactcagatccatctcttctagctgtatctaagactccttccctctttctactccaattactgtggacattcagatcttgtcattaaccactcacttcttccagcccttcctaccactgggcctttgcacaaccagttctaggcttctacaagtgtcacttctcataggcttgcgtaaccatcagcaatcaactccacagttatttcctgcctgttgctataaaaaattgcctgcaagtatatagtctctttgtggcactccacattaaagcagtaacatgattttttgctgtattttgatcattgtgtctctccaaggctggactgcaagtgctctgatgacagaatgcatgtcctttgttggcaggaactcaactgcatcagctctctcagtattcattaaatagatgagtacttaggaaaggggatggggaacaaatctggagattaaatagcatggaaacagaagaagaatggaagggcaaggatgagattcaagaatctggaaccttgcatggaaatgagatgtggctccaggtgacacaggacgcagggaccaatgagtggggattaagtgcaccctagtgtgtggggtgagtgggatggaggataccgtgtacatgccgaaaagccatgtacatagtttagagtggatggcggcacctttccagaatagcaataagggtctggagggagggagatagcctgttaggacgaaagacaccaatagaatttaattggatgacagacttctcaagagaaaaagggtttaaacaaggatggaagaaagaacacttactggtccctcactacaaagaggcatgacaggtccagagacagttgaaagagatattaggcatccaggaaaaaacagattcaactgttgtggtgagcacattaaatgaagcacattaatgagcacacattaaatgaagaagcagagaatacacttgggtgaaaaccaggaatctgtgatcacaagacacaaccaaatataactatcatccatatgtaataagtgaattaattggtatagccatctatagcatatacccatatatgaacattgccagagataaactgacacattaatgatctcaagtggttgatagctaacaatagttattaatcaagtatgtgcacagcaatgcacctatgtccatttataagtcatgtcagcccaaaatgaccagcccagaagacagtgagagtccctcttaacataagctatgcagaacaagtttcttacagaccatccatctgctgcaagagagacagaatgaaggcaatagcaggcctgtgggaggacacagagaaatatgataaatatgactaatacagacagaggtggagggtgtggatttgtttttgctttaaatgttccccaaagaagaatctggaatatcaattacaagctaattgcctaacaacttcctccttcaaaatgaaggttgacctagccccaggttcagatgagagctgctgcaggttagtgactccaatcatgcagggatgctctgaaatcctggttggttgccaataattatgacatcttacccatataatatgttccttttgataatctattataactatttaaaaaaaaacaaacctgaaatgaagaaaaataattgtaacaatgagtcagaaaatgtcccctaaattcctgtccttcctacagcctcagattaatgacactgaaattttatgtcattgcctcataatacttaaaaggatgcatttttgcctaattttaccaacaagcattaaaaccgatgcttcaggaagcaacccaagatcttccatttgaggtctgaagtttgaaggtccttttctatctaatcattgaaaaacatgggggaaacttccatctgttggtgaaactcccaagtcctagttaatgagttttgtgagaaattgcctggcttaagtgagtgtgggtttggccaactggatttttaatttaattaggtttataagatgagaaatcatgggtagcactgccaggtcaacacttgccactcactgtcaccaaggattacatttacagccttctctgccctacttctcaaatcttgccagctcttagattatattaaaggcaaagctggggttgagaagggatttaaatagatttttggccagtcgggtttagaagggactcattcatgactggcaaaagatcaaaacagtcaaggatccacaggcagaagcacaaagagacaagttgggacatacatgtacatttagaatgcttttcagtatctaataaaggcatcgtcctacttctgtttctttaataaacaacaccatggccaaaagcaagttagggggaaatgttttatttcatcatacagttcatcatggcgggaagtcaaggcaggaacttggaggagggaactgaagcagaagccatgaaagaatactgccttctcatttgttctccatggctttattcagtctctttcttaaacaacacaggaccacctgaccaggagtggcatcgcccacagtgggcccttccaaatcagtcactagtcaagaaaatatctacccctctccccaacgcaaatagatacacacacaggccaatcagatggaagctatacctcaactgaggattcctcttcccaggtgactctagtttgtgccaagttggctaaaactaaccagcacaaaaggctatccatcctatagtacataatgtcacaaaggttgcctgaaggtgttatgctaaatgaaaggagccagccacagatggacaaacagagcacaggattccaccttagaagtcacttgagtagtcaagttcaaagagatagcaagggtggttactaaggaatgttattaggttacagaggaatggcaggggagggcagagaatcattgtttgataactgagagtgaagttttgatttaacaagataaagagctctatgcatggataatggcgaagactataatttacatgtgcttactatcactgagttatgtatgtattaacttgccaaggactgaaacgaattaatcaaacatatgaacaaacacacatgtatcatgcaaatatgcacatacacacatatatacttgattactcttttctgagcatctgtatgttgaatctagaaatgtatttatattgaaaaatacatacatgatcactctctggtaagaatttctactgttgaatgcaatgggtacctccaagaaacctactagatgcaagtggcatgtccctagacattgcatcttattacctagtaagctgaatttactttccaatagccacaaaacaggcatgggtccacagctttcctttttactccctttctggtccatggctagggatcagagctgcttgtaagtttaggggagactcaaggttctgagcagaggcagaagctcctttgtcttttggtaactgtagcttaagattccaagtgtgattctgtgtctgagaagaccatgcccttaatcctatgcgtgatccacaaactgataaccatccctccaaaagaggatggaacagacacagaacatctggtctccatgtttcctcaaggccagtttgcagtaatgtatgatcacagccccttcatggattactggaacattagaggcactactagaaataacctcaagttattctacaggaataattttagccatccaaggccttgtttttaagaaagattattgatgtactctaggaagtaaatcccacatcgatgccaacatccaataggtttcaaaatgccctcttgccccaggctgggcctgatcacaaatgtgcccatccactaaggcccattagtgcctctgttgattttctcctcttcagagcctcctgctgaccctagcaaatgagctagtcctggccagtgctggctaggctgagaatgactccaccattccttttgtcaagtacacagcagagagaaatccagatctccagaggatagcttccctagttcatccacttctgacatctctcttcctccttcaaaatgatatttttgtatttattattaaatttagatagataagctacactttctgaagtagaaatcttcaagagagagcaaccctcttgctgctcacaaatcccagctcccatagcctgggaaattggaagctaaatcagaggcaaacagctgggcatatacaattatgtttgccctgaaggagggaagataccctcaacccatcaaagtctcatctcccaccctgattcttgggactgtgtcaccaatccacattacccatcaaggatcagaagatgctaactgcacagggaagcttgagctctggctgactcaatacagacatggaaaagactacacatgccacttgtatggggcaagtgttttgggtggaaagatgagagcatggcaggtgacatacacactcagcttcttgcatctttttcagacagaaggcaagaggaggaaatggtggaacaccgcttactatcctttcaaggatatttacatgaagggcaggtgagtcagggtcagacccacctcatacctcaggacttttgacaggtgagcgaagcacagagctgggcatcagtaaggtagggggcagaagatatgtgaagaattttttatttcataggtttaagagccttgacatagttgacagggggaaatataccagaatatagtcaggtttatggcatagttttgttttgttttttgtttttttttttttttcccttctaaggttttaaactcagatgtagggaaagctgtcactttttagggggtagacatccttattgtaacaatctggttgcttgtttcagcacagccccagcctgagggctgaaatttccccctcatctgatccactaaaagatcatcaggtacaagagctcatttatgtgaacttctagaccaccctacagttcttcacgccttcgatgcatgaagttgccaagtgtctaatcattgcaagctagagggctgactggacaggggatgtagggatgaagaagaggccccagcatgctgagactgctcagggactaaagcccttagctccaatatgtagagctgagttggaactgttagaacctatatagaacttggtgtagcagtgtgcatctgtaatggcagtgagccccctataagatgggagatagagaaaggagaacttcgggagcttctggaagcttgttattagttcctgagcaacaaggagataagcacacattcctgtgtgcattcataccaaaacacatacaaatgcatactcactcatgtgcttgtaaacatgttgcactcatccatatgtacacacctgcccacactcacataaagcacacatacacagttgtataccattaagcatgcacttgtactcacacatttacacacacacacacacacacacacacacacacacacacacacacacacgaattccctgctacactcaacttaaacttgaatctctatcagcagggcaccaaactccaacattttcataccaaatctcctttgggctacctgccccaagatagggcttctcaaacccacatctccatgaaagtgacctggaaggagggcccactcagaggagatgaccagattctttctatctttcccattaggagcttctggacaggcccagaatctgcatttctacctaattcaaggctaggtgtttgctgtccatccaaggactctgttttacaaattaatccagtataaaaggaaaaaaaatattctttaaagacactgcttttctttttttttaatttttaacatttttttattacgtattttcctcaattacatttccaatgctatctcaaaagtccctcataccctctcccccactttcctacccacccattcccatatttttggccctggcgttcccctgtactggggcatataaagtttgcttgtccaatgggcctctcttttcagtgatggccgactaggccatcttttgatacatatgcagctagagtcaagagctccggggtactggctagttcataatgttgttccacctatagggttgcagatcccttcagatccttgggtactttctctagctcctccattgggagccctgtgatccatccaatagctgactgtgagcatccacttctgtgtttgttaggccccggcatagtctcacaagagacagctatatctgggtcctttcagcaaaatcttgctagtgtatgcaatggtgtcagcgtttggaagctgattatggaatggatccctggatatggcagacacactgcttttctttgacatagattcaaaaacattttaaattggttaattttaggtatttgttctttagacaaaatctccttcagttatctattaggagataccacaccctctagtatcacccatgaatgctttctaataaacttcaattttttagtgaacaaagaaacatgttgaaagacgttttgaaatcttatgagtggggggaggaagcgggtttgtagtcctctttgccttgactatgagtcactgttagtctaggtacatgggctggacaatgcctagaaggtgttacattttaatttagtgtttatttattcattaaacatatatttattgcatagtgactgtacacccagcttggtactagacctgcatactcagcagggtgttgctgcttgctttcttacattaatttgagtccccaaaattgtttgcacaagagaattcacacagaaggaccctgcccctcagttggttgtgattggtaaataaatatgctggcagccaatggctggtcagggcagacagaggtgggacttttaggatccccagacttgggacagagaggaaggaggaagaaggagatctgccatgcctggagaagaagaggagagacaccatgcctgacaagagtggagccaggagagcatggcacagttgggcagccctctgggtccaaggcagccaaggcagaatgttaaatgtagtaagtgataacttggaattatgagagggaggtggattaaccatgtggaggttgggaagtggcccaactactgtgctgcttaaggcatatcaaaatataaaggttgtgtgtgtgtgtgtgtgtgtgtgtgtgtgtgtgtgtgtgtgtgtgtctttcatttgggaacataaagcattggggtgggtagcattatgtaccaccaggatctatttaaatatttaattcaatagcagggaacctttgaaccataaccactgccctcctggggctcagagactagagtacaggcacatagagatacctggctccaccagtgaaacgttatgtggccagtgattaatctggaaaagggccattagctttgtggaccatggggtctgaaagcttttcccaaaagaaagatagaaaagatgtttacacattccctcctgcccccagaaaaaaatcatgtattccaatcccttcaagtaggctgtggaggtatgatgagcatacggaggtaccataccctcaacgaaagaccttaagggtttgtaaaacccggttttcacctcataggaatttggtcagtgtctctaagggcaggaccacacattggcattttcctagctagaaaaacttggaaggtagaagcaagaggatcaaaagttcaagatcagcctcagctgcactgtgagagggaggctagcctgttctaactgagatgtctcaaaaaaacaaaataggatgaggagggggaggaaatggaagagaaggaggtataggaagaggatgagagaagtaaaaaggaaaagagagaggagaaacccacccaaaaaattcacccaagaaattgcaatacgtggttacacatttggaaaaggcatgaatacacgcacagcagccaacaggagcagggtcagtcacaagactgggttgggctgtccaaaaggatcagctctcaatgtctctatagcatgatgttggagcaatgttaccagttagctcagatgatgagaagccgagccttgcttccctatatacatgcccacactgttccttgacatcatgacaacgacaatctgggcctggagattcagaccaaagtgaatgttgggactgagtcagaactttgcagtgagtgggccatttcctgccacctggatttcagcagcccaagttgttagagcaggctgttgttccctgactgctgagatctttcaagcaagcacagttctgtcatctcttgcttctgggaacctctgaaaccagatacatagtctaataagaccatgctccgtcttcaaatatcatgatagatggacaactgctccctgccaacagccatgcaagcattaagcatggccatgaaattgtcaagaggaaaaggtacgtgagggggtctaaaagactgtggccagctccagattgtctggagcaaaacatacatcacatgtaatgccttagactttccacagaactctcttttggcattctatctggaaagcccaagcagtaacaacacctgctggttctagaatcagaaaccagagtaagctcagtgggaacacagtggtccactgagaacaggttcataaaaggtcagctcaacggcatcaaaacagtggggattccctctcgactcaacccctttcccagggctatacggatgaacttccaacagaaatagaattcaagtcatcgtaatcgccctgaattgtcatctaaaaagcaagagataagggctagggagatggttccatggttaacgtataaaaatgctctcctagagaattgaacttgagttccaagcactgacatctgatagttcataaccacctgtaactctagatccaaaggctctggcatcctcttctggcctcagttgttaccattactcaaatgacattcctacatgtgcgcacacacacacacacttaaagataaaataaattctaaacaaaatcaagataatattcattctcaaaatacttttaatttaacctaatacactaaaaatattttattttagcaataatattaaaatctaaggagatactagaaatcactcatgtatccaatactctactacactttaactgtgttattctacctcataataattgtcccgtcacatgaaaagtagctttgcccaaatgacactaacaggaagcatagtttgtattactttcattttcaggactgtgtttgaattaaagtcaaataaaaacaactcagttgctgtagcatatttcaagtgctcaacgggcccatgttgctatggctaccatatcctgcagtctgatggagaatgtttcatcatggcttacagacagtttccagagcccataagtaaatagaaagggtcctgactcctttataccagtccaagtgaccatgctctgaacaaggatgctccttcctgttgtcaggccaaagagcatgacccaggaacagaccaagtcctagcaacgtgaatttgagaagatggctcttgatccctggtgaagcactcaaaacactgtttgatacagagtaaggtggctaaaaaacagttaaacaaatacacagcaccatggctgccaagccaagtactgaggtttttgaaatcttatcagaagatgctcaaaacatctctcacctgaagaaaagaaaaaagcaacagtatttctatctgcagtgtaattcctttcttgacctgagttctgatttgaaacagagctcagcagttccatgtcttgaacatctgaagtgttctgcaatgcctgcccttcttcattgcacaaagaacctatgctagctttcccccagtgtgaggcgagcatgccaccttttgagtaagtggcctctgcttattcagcactgacctcgggccagaggttcttatagccttcctgaagctgtatatgagctgtgagcatgcacaaacatgaacacacagagaggtgtatacagctggttcctaaccccacacatgtccacccctgatttatattctgacatattttctgacataactctatttacttctttatttgactattgtataatgccaagatgactctctaaggagtggtttttgaactgttccatctttactctctcctcaggacccagtatctagagttcaatgttgtaaaaagtgcgtacaatcattgagtaaatgaacagataactcactaaatgctctccctggggtttggatttttgcctctgtttgtttgctatttcaaaacactttccattttgcactttgagagccatcaattccatataatctgttgtaaacccttagctatatatctgtgtatttctaatttttccaaggagactctaagcccacttaattccatgtcacagcttgaagctgagtatcacagactcttgatgcccaacctaagagccatgcttgccaacaaatgagtacaacagagagagaggccttaaattaattttcttggtcacacatagtgggctatctctacaaataataatttaaaataaggtcgatatatatgtagttttgtgtgtaatatatatatatattatattacacatatatattatatataatatatatataatatatatatgtatatatttgcatgtttgctatatttctcatcctaattaaatgaagctattttgcaactgttttcctgtctaagagtagaactgtaaagaataatggaaaatgttaaatcatcaaaattggatttctttaattataaggcagtgcttaaaaaaaaaaataaaaggtttgagtcatctttaaaattctctgccaggagtacaaacgttatgctgaaaatggcacttgtcttagtaaacacatttccactgcaagtgattggtcccaataaagcaatccctgtgcacagcgctgacatttcttctaaatctcctaagaggaaaaaaaaaaaaacacatgaaaacttaataaatgacagagacaaggaagctcagaaggcttcctgtattggataggacagtcgtctaagcactcaagaggtcgtcagggcacaccctattttctgactttaaactctttgtagttttcttctccaagacttacggtgaattaaatcatggccctaaacatatgtttttattttctttctcctttttaaattttcttctctcctgactctctcttctacctttctaagacataattagatggctagttacatacaaacacaaatttgatttctctcagaaagctggattcttgagcgatgagacatactgaccagtcatgtgcagtgaagtggggggcaggccacaaaaatccagtgaatgctaaactattttctaaaataattctaaaatttaaaaaaagcgacttgttatatgaagaagagtctattcggatgatgtattatacttggagaatgagttgaattcacattcatatgactagagaaatagataaaaattgtaaatcaacctgaaaggtctgtggaatagatttttttttttaaaaaaaatcaatacatgagatgttaacttcaaattgagacaacagaaaatatgacccaagtaagtctatttctaataagaaagaataataaggggaggtagaggaggaggaagggaaggaagaagatgaagaagaggtagaggaggaataattgaggaaagagtggagagacttatcaatgaggttggattaatgaggggaagagctggtggaagtgggactaagctctaagggagtaaccaaccaatggtagaaaatagcctgtttataattgcattttccaacatatatattgatccctcattgggcaccattcccagagcaagggatgctgcagagcaagcaaatgacacccactcctgccatgcagctgacagtataaggcaaagacccacctcatctcccactgagttcaaaagagccaggcacaactgcaagtctagataggatggaagacagggagggatccagccttcctcttaagttctgaagactacagttcctcttggcttttcaagatttgagtcgcaaacagggagcctcttctcagagtctacttctgtttttgtcattattaaaccacagggttgcagctaacaaccatttcaaatcataaaagacttctcccaagtcttcaagtaggactctcctaattatagcgtgcaggggaaccagccttgacccgttcacaatattcctaaaatgcagatagaatttatatcacacatgactgaaatgcaggcttcttccaagacctaagataccaattaaatgttcctctgactacccatcatatccctctctgggatgtgcttaatcaggatcctatcctatctgcagtactggaacctacaataactgggttcatcgttcaaatgatgctaccaagaaacaaagccaattttcctgttaaaaatatgattgttgccctaatttatctgtctctccttggcagtgttctgggttaatttattgcccaataaaacaaaccggagcagggctgcggagtggcagaagcccactgtcttatccaagcacaagcagcccgcctgcgtcagaagcaaatgaaccactgcaaacctggctgctaacctgacttcctttactatcccaggaacacaatgggaggctggtttccaggcattaggggagagtgggcggttaataattatctactgtccggagaaatggagtgaatttggtcagtgagccaatggccatagggcttcttcttttctattagatgacaaatcttactgctacagaaccaaagaaggaagggggaatagaggatgggacaagctcattgttttcctctcatggtccctgccatcactgctgataactgactccccttgcttcccttgcagctaacacatcactgttaattggaaccaagccaatgctttggcatgactcctgggcaaggaggggcttaggtgtggaagggcttttccctcaagaatttcagggatgatcactgagcagaccacatagaaggaggtccttcctacttggaaggctgatacctccaaggggctaggccaactgcaggctcatgggtttctgatttgcttttggatcccagttttgactgtgttactgtgtccagagtagcattggggagctgctgggggcaagaggcaagggaaaggaaacttggaaaaatctgggctctgatccatagtccacaaaggaggatatgttcacaaaggcaaaggaaccaaacaccaagcagtaacacagtttggatcccaaagccactgaatgctatcaggagaagtcaagatcaccaatccataggcctgtgttgtaaaggcaaaactgcactcagtgcagaatgtatttacaccatgtcttagtatgcactagacacttgaagactggatgaaaaggaaaagttccagaggtctagagggcctgccttttacttgctacaggctgaagtgggcatgcctagcctatccttttccttgccatataaacccaccacacacatggaatcatcttcaggaagatgtcacatatacttgacagccaccataatttggcactgtgtaacttattgaaccacttggtcttcagattctttttaaaaacagcacctctgatttgtagatcagagatgtggggtcatagatgtgggtttcaacacagatctaggtttggtaggtctagtagcatcactttagcatcaaaggaggttctcaacaacccttagaccatgctgagcccttcgtatggctggttcttcccatattccttgtagcattgcagcatagtcccacggttatgctgtccttttgtgttatgtgccctgccttctccttgcattgttgtccttgtgctttggccattgcaatataaaatgagttatttgagcacaagtaccatggtacaatacagtgatcagataaccaagatgtacactaagttacctacagaaactgcagacattacagacatgctacacacactgatttccatcaaaagagggacatagcaggaaggtacatggattttgtcctcattgtgcttctcagaattgttcattgctgtaattatccatgtaatacttgcagaaagcagttgacatgggtgtgatggctaatactcattttgtcagtttgatgggctctagaatcacgtagggcaacaacctctagccatgtgtgtgactcatcttctagactcggttaattgaggacagacagtatgcagtgtgagtggtgccattccagaggcgagggtcctagactgagtaaaacaggaggggcaggctgagctgcagcactcatctctccctgcttcctgactgtagatgccatgggaacaattgtctcccactcctgtctccccacctcaaccaccatgatgacctagatcctcaaaccatagactgaaataaaacttgtttttccaaagttgctgttttcagccatggcaacaggaaaagtaagtaataaagttagtaactgaaacagtagacttctgtactggattcaaggtgttacgagggctatcaatccgacatttaagcagatggaaccagtatcaacccagaattgaatccactgagggtgggtatccaaatggctgtgaatggacctagcttgataatatactaacaacacaataaatatacatgagtgactataacaagtatataacagattcaaatattaatagagaaaaaatatagtgcacatttttataccaaaccctactctaaatattttatttatgttgcctcatttaaccaccacaaacttttcactatctccactgagtggctaagggaactgaaactcaggtgtctgttaatttccccctatacgttacagccattaaatggcacacccctaggactttcacccagctcttcctgagctgccagatagctgcacggctggctgttttttcctggggtctccatgcaggtcagcagagatgttctccgccaactgcccttgcttttgccctctctaggagaaggcttttccttgttcagggaagcagaagggagatgagaagtccatagcatcctcccagttttctcaggactttgttctaggttactgcttgcaaacagatgacccttctatgggattcagattgcagagtcttaacagtgtcgggcataatatagaagctattctatgatcacgtctccatgatgtggctgtgcctggataggattaactgtctagaaaatggattgtgttttttttttaaatatatattctaactgtctgatgccaattctaaaaggagtgaaactcacagggggacctcagtagttttcccaataccatctgtcagagttccagagatgctgtgactgatccaaacaccagtactcaagatctactaccagcaactggtctccaggaagttgaggataacattcatcctggaacttattctttagacttctgcagtcattaaaaagacccagagcaattttccacataactggctctgctaccaaaatagagccttcaggccagcttctcaccactgcactggcatagacacatggcaccatcatcttcctctgagtttctgcaatatcctagaagctgttcatgctcccgcacttgaccctaactgctacagtaatgggcagcagtgtgttgctggtactgattctttagcgtgcctctttctatcattgtctacatggacacaggatattgaaccttcctttttctaagggtccaaagaaaaccaaagtaccagagatctttactttgcatagaaataactgcaggtttatatctttccatgaatcaatgccaagagctagtcatgcagctcacatcccaccatggccattcccattcaaaatgagcaccacgtactcctcccgcctatcccctagcaatatgtatagaattgcatgctctgttgcaggcctttatggctatctttgtaacttggcatgagtgtagataattggaaaagaatttgctcagcacctactgtgactctgacacctgctaggtgctataaagcacaaaaaagaaacctaaaatgtaattctgtccttccaagaatacacattgcccatgaggagacaaatgaatgctccatagatacacagacaaccttatcagattgtgtatggctgaatgggaatatcaggcacagagctagatgataaacacctcaggaattgagaagcagatcaaagtgtggccaggttggctggctggggaaattccctatctaacacaagcaaggtgatcaatatgtgatatacaaatgagtcttagcaccagctccccaaaggcagccaataccaagtgctcagaactcgaaggcttctgtaattctttgctcttgcaaaatatagtagtctcaacccaggattctggacagaatcatcactgtgaagaccaaatttgttctctctgccacatgggcccccaccccacccaaaatacaacaattaaagcacaaaatataggatttagtgtgatagaagttcatattcaaaagactgcaatagccttctaaatatcaaaaggctatcaaaagagttgttcaagaatattccaggaaggaaactaagagacagtaaagtcatgaatgcatcgcagatagaaagaaaagtagatcttgcatttatgagcccgcatccctctgctgcctgtttatcttatgtgaagcaagtccaatggacatagcatattacacttctgatctgttctgatctgtttccacagaagtggctttttctcatagagtgagaatatacccaagaaagccattgtaattaataggaagagtccattctaaataaggtggccccagaagtattcccatatctcttctgtataacccacgcctccttttttgccatctgcagtaagtacagctgagatattccattaagcgttggtgagactagttttgggcagtttgaaaagtctatgaagacaatgtgaactctgcaaaactcagaataatgatcacattaactattgttattgcttgaatctacaccaggctcaggctttgaatggtcagtcccagttactggtgcgactttagaaggctatcgaaactttgggaggaggaagtgtctttggagcatgggtgtctttgaggttatccttttcctggtcacttcctgttactctctgcttcttggttggccatgctgtctttttccgaatgtcccaactcccacaggagggtaaagggcaaggcttagataattaacaataatacctagctgttaactggtacctttcaccagggagcctcaaatgaactttacaaataatatttaaaatatgtattttactgactcagagaggtaaagagataaatagaaagcccaaagctcgtaaaagaaatgccagggtgattaaagaataaagtccaggggctagagagatggtacagcagttacaagcacttgctctttttacagagaactagggttcagtttccagcacccatatggtaggttacaactttctgttagtccagtgccactagatttgatgccctcttctggcctctatgggtgcacatgcaaacatactgaaaaaaactcatatacataaatttacaacatcttttataaaaatggagtaaaatcgagatgttttccaccagatattgatttgccagctacttcattcaaaatcccaccaactatagtccctttaaattttttccaaattcttccatatccagtatcccaactggaacaacagggatacctgggtttcccaatttgctggaggtatgacctgtcactcactcctagaaacacatgatgctatagaaaggagaccatggaagatgccaggtcatacccctctgtctatgtgattcttactttatagaagtcatttcacacatctatgtatcagagatagatcatagcacctcaaataatttctatttatagacttggaaattctgccctgttcaggagtggttctggtgaccactactacatctgctggtacagggacagtttcccctccctccaatccacttcaatattcctaatctatctacatgtctgttctttttaaccaattatgatatcttcctggttttcccattgaccaagcaacaggataaaacctttatcatctgttgactttgctatctagagctggtgatttgacccttttgtgaaaaatatttttttaacatcaatgaaacctcagaaatgctccaaagttggaaatgtgggtgggagcagcaagagatgttggaactcagatagaagttggaagaaacagagaggttgaaaactctccttgcttgcatagatatataactctctgagtgtgaactctgcaagtgtcccctcatctactccataggttagagactatctctaacttggtcttctaatttgtcaccacctccatcttcattcaaacaaaagacctgttaattgtactcaagaccttaccatgccagaggcttggcaaggctgccactcagaggactgccacaagccatcatgaagccttatgcctagccttcagatggaaggcagtccctctctgttacctaccacttggtatttgtgtcccttcctctcttgtgtctttagcttggcatgtttgtgcactgtttaactgtatacaatcctacatagtagggttggatagaatactcagaatccagaaatataacaaaaacacttggccagagacagctactgttcaaagggtcaagagagaatcggtaaggcacaatactgacgaatgtcagactatgttgaccactctgaaaccatatacactttttaaagggtcaagagtatatgagtagtggagactgttcaatgggtaaataatgcatatgccatgcaaacatgggagcctgggtttgacccctgggtgtacttaaaaaagggagttgataacctgcctgtagcttcagcactgggggtgaagccaggaagattccagacacacggaacttgttggccaggaggcctagccaaaatggtgagctctgagttcaggtagaggccctgtctcaaggaaataagggagagagtgagtaagaaaacaggtcacctgatgttttcttctggctgctgtatataagcaggtagttccaggtgcatacacatacacacacacacacacacacacacacacacacacacacacacaggcacatggatatgcatgagtatctgaggggcaacacaaagaaatgaagtactaatacttgctatagtgcagatagactgaaaaatcacactacaagaaaaaagccagacacgggagagtacatactctataatatgtactgaggatgtatttcatctacaatagatattcagagtgagtatgtctatagaaacagttgaaagggcatccaaaactatattgccagtacccaaggagagaccctggcacaggtgagcaggcagggaagccccttgttctgtttttaagcccttactgcactcttattttcaattactaccacttagcctttcttcccattcccctcctcctcccccattaccttacatcctattcctctttaatgtacaaggtcgtaagagaacaggtctgggaataggctcactagctatcacggtgctcaagttcctgtggttaaacagataagggattatttgtagactaggtgtggtgaagaacacgaggatgcttcttctatgagatagctgtgtatctatctgttctgccttggcggggtcctgatcaacctccagcctgtatcaacaaagctaatgggtaactaaaaaatatacatggcaccatcattaagtccctgaagctaaatacattctttagtctagaaagatgagcatcccaatttccaggtcagaccagtgatgaccacagctcctttctggaagaaatcatagtggaaaacttggaaactttggaacacacaggcctcatataaatataaagcccagcctttttctagtttgttggttctattttctaagttttgatgatggatggatggaaaaagatgagtatatgcctacccagtctctgccacccatagatgcccatctttctccttgacctaatatattccataaaacacacatattttctcttccaccagtcccaaaattgtctgcttagaactttaagccacgtgactctcaatggacaagaaggggaagcaaatggggactcatttccatttcagccagcagccaacaattttctgccaacaagaaacctcagtggccccactattaaccaatatggtgcctgctgggcatgacagcttgacaaggacaccattctctttcaggttcctgagaaagtcaagcacattccagagattctttatatactggttgtacagacacactcatactcaaaagcagaggtaatttggctaagaattcaaggaagatgtttgagagaaggatccttcacattggagaagacagccatgacacactcaagagaatccttaacccttagtgtttcacaaatacgtgaatctttcttgtgtgctggatcctaagaaaggtaccagggataaagctgtaacaaggaaatcaataatagctactttgggggaacttattataatgagggaactagagattcactcaataaccaccccagtgtaagtctgaacccaaataagaaagaagtgtggagcagaacagaccgatagcagagttggtaatgagggagaagtcagagtagctgactggcaagtgctgggtaggtgaaatgtgtgaactgggggccaagcaaagagaaagatgggagaaagagggaacagcagacacaaacacaaagaacagtgcatgccaaacctagtgtagaaaaaaaaaatagagtatattagaaatttggacaaaagacagcatgaccagagcccacataataagaggaaacatgattcacagggccggagaaaaccaaaaagattcctagtggcttgcaaatagtgcttgatcttcagacatgatcagaagaaagaggggacatgagggtatttttgctgaatgtgtacatcatgacacacacatgcatgtagttcccacagagaccagaagagggcatcgggttctcccttcttcagttacagatgtttgcttgtgagccacctatgtgtgcaaagaaccaaaacctggtcctctctaagggctacaagtgctcttaattttgaagccagctctacagccttagttagtcattccttaaaatgggctaagcttgacacaagaatattatgatgctaaaattaaagcagaaccaacccaaacttttatctgaaagactgggcacagttctgaaaccttcaggagatactgttatgctaggggaaaaattgaatgaaatacctgcattattttcccacaaccatctgtaattgccttctaaagaatccttaaattagaattataatagctcatgataaacattgatttatttctcacactatcagagaataggcatggcataccgaatatgttcctgctgtctcatgaattggttttaagtggcctcatttatcatgaatttcaggatgctttaacaacttgtagaatgaatgagttaattatgttctcagaggtttaataagatccaccaatttaagtaataatctgactgtcttggaattaactcagtaaagtttttaaattaaggaataaatacatttggcttagctgaatatgagtgtattcataggaagtatatattctacaatctacaacatagtgaataggggagaacatggttgattaaaaaaaaaaagcattcctatcaacagataaatgttgatgcatacctgagccaactgttttccaagcccaggggctctaggtatacagactgtgcaggagagagtaataaaatttcatctccatgtaatgagttcactgaggattccagggaatggactgatttttcaataggcagggaggagggagggaacactgacatggagataagaatcggatgtcactcagggattggtcttgggctcaatcacctgagtataaggtggtgtgaagctttttctttcttcttgttaaaaaaaaatatgtgcacatgcatgcttacaggacaattttccgtgtgtgtgtgtgtgtgtgtgtgtgtgtgtgtgtgtgtgtgtgtgtaagcatgagcacctgcatgtagaaatggcttcaggaacactttgtacctctttcattagccaattagggtgaccagtgagtctcagggatcttcccatctctaccttctcagcactggggtgggggagtgtatggcatcacagccaacattttttatgtgggttctggggatttgactcaggttatcatacttggaagacaagcatttgcttgccaaatgatctagctccacggccctctttcctttaacacagttttgttcttttccctcactactctctcaagttgccaatggaaacaagctggagtggcttgggtcttctcttagcacacttcccagcagcttctgccctatgtcctggtgacagaggagtgccaggatgagagctcacattgcttgtgagtacacactggttctgttcctcaatggtcatgtgacattggaaaagtaagtttaccttgaaaataaggtgactggtacaatatacatctcattgtgcttgcccaatgattaaacaagatgcatacaaagtgcttacttagaaatgtgccctactggggacagttagttgttgaggctcacagcttgagggagaaatcagctcttatccccctaaaatctcatgaccatcatggcctcctaccagatgtcacacacctcctaccccgaaaacacacttacaatgagtttcttcccgcacacttaatcatggagaatattttccttctaattttgttttgagtggaattttctattgctatcagatagacaggtcatcttgcttgctataactggagaataaccccaaatatacagcagtgaagaaaactcaaatcagtaagattctatctctagactgtagcctcatcaagacacagagccttgggcttgaggctgattctccatgttgagaaagacagtaatgacttgtagaccttcaaggcaactatgcccctgtagtcaggaaaattcaaatagagacacaagcttctcatcacataagatggtgtcatcaaactctaggtcagggcaccaccgcaaatcatgccacatgcccctggtaaccttccatagtgtcaccttgagtggcttccattgcagttctagatactcaagaatactcctgaaacatctgtaaggaaggctcccaattcattcacttctgaaactacagagtgagacactggaatccacggagttcacctgcttataattcccaccagccacaagtcccaatgttactagtttgtcagtgaatctttgccagtttaatggtgaatggtgtgcacttgagggtaactcaggctccaggcttcctttcccagaccacccctgtgacattaggtttccaacatagcatctcacactttccatctctgtttataaatgcatgcacgtgttctttaaacaccctagatgagcaacaccactgcctaagggttagtaaagacaggtagtcacatttcattctgtgctctggccttcatcctgtgcaaatgccatattcattttaaaggagtgtccccgtccctgtccccatccccatccccgaggtagacagggggagggtcacggtctgcatcaaaatcagcctgctctgcagatctgaatcacacagcaccacacccatttactcatgcttgggctttgcactgctccagtaaaatgattggaaacaaagatgaagggagatgttctggaaccctgtgaatccagaatctcccctacacgtgcacacaaagagatgagtgtctttcacgggttacttagaagcagaatgtatacaccccaagaacattcctcatattaatggagctttgtgccaagtcagtgtaggctacctatccacagaggcactggcgctaactgaatcccaccccacctcctctacctgtcatatctgccctagcaaaagcatgtgacaatgcctagtccaggaaggcgataggtgacaggagaaaccaatttcagatgctcagttggacagcagttgattcatatggacaaatggaaatccttacctggcctgtggactgagcaaaaggcaaaactcaaaatgtcctctgagcatacacaaaaatatatcactgaatcacattttttcctagacagagtcaacaagaggataatatgcaaggagtcagaggtttcctggggcgggggcaccgagcccagcacacgtacaaaagcaggaggctctcagtcctctcatcttctagcacctcgcatgtgttggctcaaatggatgacaggtccttggatcactcattgtgtgggcagcaagctctcaaagcaaagggagtcaccactgccttatcttcagctctctattaacaaacttgtcaccactaagccaggttgttagtcatggggacaatttgacagaaaggcccaacaggggaaaacaaaatggcttggatgaactggccagtgaccaagtaacaaagaagtctgttatcactcccccactgggcaatggatagctcctgcaaaacatgtggtccagttaagagaatgtctcttctgaagacaggggtatcatgcagataaatgaacacagcagaaatatggtcaacgcacaaactccatctaaaaacaagcaatgtttctctctagcaatctgtggttgtgttgatcaaacatgtaattactgttgtcggggcaaggcaggagagttcaagttaataaagactgtaaagtcaacagagtgtccaagagaagatggtccatgaagctaatcggcctgctctgcagtatgaagaaacaggtaaggaatcaagggaatactccaggcctagagacctctgggcatatcgcttagctttcacagacctcactttttatcctacagacatcctccctccaatgtccatcagttctcaacctgaacaggacaacatagtagttgtggtcaaatctggagtctcccaagttagcttctaagaaaggtctggtattggctcgttgcctgatgtacatttgtcgactcatttgatcttatagtaagccaaatgggggacatatgattgttattcccatttaacaaatcagggagggcagcactcaggaaggttggcaatggagccaagattcacccagtcacattagtcaagcagatatcttgacgagtgtctagaaatgctctccaacaagtgcaccctcagaatctagtgatactcaataggacatcatgaaaatatggttcagttgataaagtgcttgccacagaagcatgaagccctgaattcaagttcccagaagcaacataagagccaggcatggcagttagagatagggatatcttcagaactcactggtcagccagttagccgagttggtgagtttcaggtacagtgaagagactgtctcaaagattaagacagagagtgactgaggaagacacttgacataagcttctggcttccatacacacacacacacacatatatatacaatatcacagatgtttatgagtatacgtgtgtgtgtgtgtgtgtgtgtgtgtgtgtgtgtgtgtacatgcacaattaaaagagtgactcggaacaactacttgttgtagtacattgactaaccaacaaaagataatctgaagctttaaacaaagggctattctgactgtacaacaagctttctagagaggcaaagaaatacagtttcataatacatttgagtttgtatctcaataatgagtataggatgattactgttagtcaaagatgaagtgacatgtgtccattcctggacatagccttggagtcaatgactcctccatgctttgagaaagaaccagttacccattctttttttctttgggggggggggtagggaagagaaccaaatccatgcttggcagcagtgacagccctaaacctgaagcagcaggaaatgaggtgacagatttatctcttccagctccctgggaggccttctggtggctgtcagacagagatccccagatctgttctcccaattacctctgtggcagacgaagctcactgaaacaggtctgtttccacctcaagccaatctgtctcctatactaatgcagatagctctattctcccaaaggctgagatgccctgaaagtgtgagaggatgtccaggttccagcaagcatcacggagttccaaatgctgattatcaacagacatctggaaccccagctggcctccctgtgtgtataagtcggccaactgtactcaggtaagactgggcagtggcaaagttaccagggaccactaggtgtcagtatctaggacagaaataaaggaagatctaagagtcaagtcttggagggagaaaaggtgtcatttaagaagccatccaaactttcctaagcttgagaaaaacaacaaacaatgacccaatacacaggacctcaaaggatgtctactgttctaaatgtagaaacagcaaatctaaccaaggcttgatctagagaattttcaaggctccctttgttatagtttaatgtatgctatttcgacatggaacagaactagcagacacagtttgagagtataaatagaagggactttacataaaatctttaaaacacatatcacataaacatttttcttcacaataaaacacgtggcccaacatgaatatttgtggggccgtgaaaagcagcctgttttggttgaatgaggcttgttccggagacccagtaggaaactctacaagggatggaacagtgagccatgtccccagagactggtgcctgacaccacagagcccccaactccataattctgtgactataagtcacatagataaagccccaagctccaggcattctggctagaccccacccccatagttatctgactaaagctaggtatgcgcctccctacagttacctggcaacagcaaagtagtccagcccagtataaaaggggctgcttggcttcttctcgctctttaagatctcaatactctcatctctagctctccttctctctctcccttcctccctctctccacatggccatggttggcctctctctttctttctctctgtctttctatatacaataaagccctaaaaccattgactgtctctgttcatcaaggcatgccacacttgaacgatgggataggctttccactaaagagccatgagccagaaggccttcctgcactccagccatggaccagaccaaggactctcgcccacgtgggaaccacccagcaccccctctcctcccttcatccctgggaatgactgagccacccccggggcccccattttgttctcagctcttccgcggtgtccagcggtgtctgggatgctcgagactgagaccgagaacctgttatctctggcctccgtgaggcccagagaccttggaccgccccttgtccagcccccgcgggctgggtccatagcttcccacagccagacacccacctggggctgtgtggaaagcatgtggccggcagtactcctgcatctgcctgcccagagcaccggaactctggtgggacttgggttttctcccactcccttaatccccccatgcccactgtgcccagtgcccagcaagtattctagtacatcttttccaatttctgccaccaggtggataaattttactgattctcttaagcatggattttagcacccaaaatacaaacaaatacccatagaagaagctagcctcaaagggtcacatattatgacctctagttatttgacctttggagtttctacgtgttcattttattgaacaaatattaactaccattatgtcgccaagctgccctcaaagccacaattccgagaccctgggtgctagtacttcaggcatgcaacaacattctactgaaattctctaaaagacaaaactatagtggtgtatggttgccagagattagagtctggagggtagagggagcattcaacgattacatgctgatcatggtggaggccatgagcacacacagatatgctaaatgacacaaactggcttactaaacaaacaaacaaaaaataaagaaaaatcccacaagtcactcttgactgcttaacaatttaaaaaaaaaaaaatgaaaacacttaaaaagcccataaatgagctctctgctcttgttggtgtttttaaaattacttaacatttagaacactatggatgagatattcagggttttaaagggatgcagccgaggtagaggttagatgcaatgacatagtaaagtggttttaaaatgcaaagggcatggaggagggcagaggtgtggtagtgaggccacaagaagtcagattagtctgtaccttcctattcaaggacaaacagcccaaggtctgtactacccactctctggccagacagccactgcccttgaaccttagtatctgtgcatatggaaaggggcctctaaaagaagattacatcttcctatacatttattccaatgcagttattcaagtgcaaaggcccacagttgagcatcggctattttccaccaactctctaaataggacaaatttgtccttcaaaactgcaaggactaaggtcatgagtgaagcctgatgagactgtggtcttgtgggaaattccactttccggtggctctgttggtgcctctgaagaatggctcaatggctctgcctttgaagatgcagggaacaaagatactcaaccagtccttttgaaagaccgagaagggggtgccatcctaagcttgattgaacgtggtcctgggatctgcaggggagagtttaactgacttgaaaggtgtatcgcttttctcaccagtgtctcctgaggctgtccaggacagctgatagaaaggtctagagattcaatacacagcatatctgccagacacacggcattctttaaaaggagtccttcacctaccccactgtcatattaataatgtggacaagaactcagggacactcatcggagcatgcacacacatgcatgcacatgtacacacatgcacattcgagtacacacacacacacacacacacacacacacacacacacacacacacaactccagccaggaacattcctcttgcctttcaatcacattcattgctcctaattttacctccagtcccacaggctgttaccttcacttctataactcaattgaattacttcccaagaaatgccttaattacaggctggtgtcattgtgccattagaggtttccattgaagtctctgggctctaacctgctgagattcccgataataaatggtacttacaaagctttgatagagcaccaatgaaacctaacatttaaacaggaaaaactatcacttctcaatgttcaacccttatatgcaaagctccctgtgtaggtacccaatatatgtaccatagtataaagggttgaagaggaaaaaagaaaagtacattttctataaatgacattgaagcagataacagggtttttttttttaatgcaaacaagccttatgggaaaattcacgggaaaatctgcatttgctcctttagaggggcaaagtgtcaccagatgaaagagctatatccgaaaatgtcagcagtctcctttactccaatcaagggcatcatgaaggagcatcagccaaaagtgagccaccacacatgcagagaacggggtgagatactattggtacctaggggtggggcccctgaccttttttctggtgatttgggggcaaagaatgaccactttcaagtgcatcaatcaatgtgctttcgctttgcttaggtgttttcattcatttcacactgaaggctcggtgctcttatttccaccttatgaataagtccagaagcctgtatgtggcttcttattctttattcttatcttggagcccccagataagaatgtctagaaacatggattggggttcattcccagttgccttcctcccttaacaccctgacttcaaggatataaaatcctgggcttttggaagattcccaaatgttgcaaattttgaaactgaaccaaggaatgcaagtttaaaactgtcttcaaaggaatcccttaaggaacacaatcctgctcatataaaagcatcactgagatcggatgaaagagctcatgacacagcagtatttccagaaataagactccttctctctcctccgggaagaagagccaggaggtacactaagctctcagccggctagctcaaaagcatgttactacagaacctgacactcagaacttgggggcagggggttgtgtctggagtgtcactgttgagatagtgtgggtcctttgtaagagctgacattggaattgactcagagcaggtgtgtcccatgtcttcatccattctgtggttgctcactaaggatgtcagaatgcagctgagttggtagcgcacttgcctggcacatgcaagaaggcactggatatgacttttggaaccacataaaagtgtggtggtccatgcctataatcccagcacacaagggatggaagtagtttaaggtcatctttggttccatagagagttaaagatcagtctgtgtatatgagacattgtcttgaataataaaaatcaaacctcttactttctcagaactattgttttccagtgactgtgagtgaagctggagatgaagttccagtcattagacggtcctcatactggtcccctaccacctgatctggctcttgacttgagagtttaaaccacaagagctgtttctgaggtactcttgccaactgttcactttggttcagtcagtggtggtggcccccaaaagaaagggaagagcttgaggcagcctacctctctcccttttttggcagtaattggtctcttccagaatccaccccacccccatttctgaaatttgagctccagcccttctcctaataagacttatggtgtcctatttgggtttttactcctcctaagcaaggttgcctagctctcctctgacagtctctctctggaactgcctggttttactagctggaacctgagttctataggtactaaataaatccaaccagatccctaccttctgaaactgacacttgtacaaaaatgtgacagatgatgaagaaagcaaataagcaagcaatagtttcttggaactacagacaatgaggatatgaaggaaatcagtactctggtcacatgaacagtggggagggacaagttgtttcatgactaggggacatcccagatggctgaaatcggagaccacaatggaattcacatacggcaggccagggcttgagcattacaatgcagcaggaccccaggtccccaggcagagctaacctgtaagccagccaacacgaggggggggggcacaggcaatgagaagctaagcagtgtgttaatgaaatgggatactagggcggggttaaaatatggcaggacatcaggaatttaccattgacttgactgacgtttgagtctttttggacttataatattagagtcttgtggatattaggtaatcactttattcctgagttttaatcctagccttttaattttatttgaatgagggcctcattatgctgctgaccttgaacagactgcattccatgcaggcactaagcttgtgatcttcctgcctcaacctccttagcagctatgattataggcctggtctaccaggccacatctaactgacacttttcatatgtgtgtctatgtgtaccagattatctcaggtgccatcctcaggaacgccggtcacctcctttgaaacagattcttctcttgggctggactttactgactggctactgagccccaggaacccttctgtctccacctccccagggctgagattataatctcataccaccacatccagtatgcttactaagcaagcttactaagttttactgactgaactatgcaccagcccttcattgaaatcttcaaatatcactttgatcagcgtatagtgagttttcttctttgtccatagacaaaggttttcagtcctactctcccaggttcagggcaatcaccttactcaggagagaactaacccacctcctcattaccatatacagagaccaagacgataagcaacagcttttgaggtatggttttatgagattatatcagtggtaataaagtcccgaagtcaaagaaaaagagtggtaactatttgtgtgcatggtggccttgaactttccagggccagctagtactctatgggcttcttgtcaagcagactcatacaccagcaaagccttgcattgtgaggcaacatactgtgtgctccagactgagagtcaaatatattctacaaagaaacctcaacatatcctgccaggccactagagagatgcacagcttcagattttactctgctttctacacctactttgctacatcacccaggccctttctcctgttttctaagtaacaaatgtatgctgccatataaggaaggagagaaaaaaatagtaatatgctctctgtagagccttctttccagagatgcagctcatctggcacttgccttgtttgcacctttaatcagaaggctgttaagatatctctgccagggttctgtacacaacttttctctaatgaagcatcaaatctctttcacaaacaatagctgtgtcacatagaagcagtctggccccagcaaacatggctgcaatctccctgccaatggaatacctctgttaggtctatctgacccagcacagtgccaccaccacaatgcttcaatccaagtctctgtcctgtcccattctgtgactcagagagacaaagaaacatggtatggtgagtgttcctagcctgtgacatagtatcttgggacctacaatctaatgaatgttagtcaatgtacaggtcttagttgcaactctggttatgggtctgcagtggctaacccagtagggttacctgcaaccctagttctatacctccagctgttagctagttcctagaaggcaaagtagctaagtctgatatatgacaagatgcctggggacaatcagtgactggtatactggacactgctgaataaggcatgaaggtagaaactgccaccaaagtgtatcatttaggagttggggagatggctcaataacggaagcatttacagcacatgcctgaggactggagtcaagatctctagaacccaataactgatgggcagcagtggcagcctgtttataatcctagcctcaggaggaagaggcagataatccacagagaaagcaagtgagtgaaactgaccatatggacaagttctgggtttgactgaggaagtctgcttaattaaataaaggaaatagatagtaaagataatttctaatagcaaccttgggcctctgtatgcatatgcaccctcatgcacatgcaccccaaaacacacacatatacccacacacatgcagaaatgtatacatacaactacacaaggatgcacactcacatgtgcacacatatggacttacgcaggtgcacacatgcgcacacagaaatagagaagaaaaagcatgataccaacatagtctgggatccaatgatgcccctgagcattttcccacacatacagtgacatgtatatgtcacatacatgtcacatacagtgacatgtatatgtcaagacaaataaaagaagactgtgctgttaagaacagctagaggttagaaatggcatttaattaaagcttataagagccagctacatacacaaatgtcccgagtttctatgactctggttgcatttctcagatgctaaagctatatttatcccatttgccagaaccagccatcaaactctgaacctggctctatccctagcatatgagatctatatgaggaatattttctcacaatgctggacagaacatccaagtcgcaatcactcatcctctaccaatgacaaagggaaacacactatagtgtgttgtgtagatgaaccatgatggtcagtaacacgtatgttaactgcattttttgtctttcatatttcttatatgtgatgaatttgtctggacacaactctaccaccagtaaatggactcttgcatcccagaatactgaagctaagattgcatagatgttggcacgagtgggtacactgaccctggtcccaacaggtcaccgggagatacagcaggagcaaaacaagctatcatttgtgggttttataaatgatttgtttttattttatgtgtatgaatctcatgaatgtatgcatataagcctattgtatgtatgcctagtgcctacagaggcgagaagaagatgctggagccacaggaactgtagttacagatacttgtaagttagcatattaatgctgggaactaaacccagatcccagcaggagcagcaaatactcttaacaattcagccatctctccagctccaaattatcatttgtttttaaaatgaaaaatctatgcaaatatataaatgcatgtacatgtgagtcataagcttgtctgtgcatgccctccattgagaatacctcaaattcttaacagttttaacctccaggaaacaggacatgcatgcagccctagaaataagataaaatggtatttttagctattcaacagtttcttttccattcatataagcacatccctcatctcttaaaacccgttatttaaaacagtgagccaagtgccccaagacaccaagcagctactaaacagactttctggaaaacaaggctaagcaaagcagagaggaatggaccactccttgcagacatcataaatcaaatgaatttgaatgtggggtctgtgtcaaacaaacaaaaacccaggagattgacagatgctaatcagaggaggcccagtccatttgagccataatgatcaaaaagtctcggatgcttttaaccatacagagaaggcagctgttacagaaccaacccatcagcttctgttttcccctctactcttttgagtccttctctgagtaggagtccactttggctacctggctcagttgagcatggtctatttcacagcggagagagaggctgctccatttatgaactaatacaaaccacttcaacaaggttcttttgcaagtgactgctacaatttatggcaaagagtctctgctggaaaattaagctaagcatcttcagtttgggggtagagggggccattctggaggatccgagagagctgaatagcagggcctatttgagaaggaggcatgtggtttaaagtcagaaaaggcagcaagatggcaggatcagaggtcagagtgacacagaaagatgctaaggacaaaattgcaggtggtctctgagagccaggaaatgtgaggaaacagattcctggaatcgcccagagactgctgggaggattctgactccaacgctacaaactgagtttgtgttgtaagttacagagctcctagtgatatcttatagcacaggctgggtgctaacggtgaagcacccctttggaagcagcctatttcacatgacaagagggggacgttcagttgggcctgcctcagtggcaagtccccaacctcctgactgactgtgcagactttctatggtaccgtaactctgggagaacctgatgagcagcaggcctcacctgtggctggataaagggagaagagtttgtcatccctgtcagctgtggtatggaattcagcaccatggctctgcacacagcagaatggcttgcctgcctagatcgtgtgttagtcccacatgtcaagcaggtgacatggtgctatagaggaaagagatgagaggccttcctacctacatgatggtggggtttagaccggcagagacaagtatgggatgtgaacaagaacaaagctctctctgtgctttcctctctcagcatccaggagtttccagcagaagccacaagattccaatcaccccacttgtaaaggctgaagacctcatctttgtgaaggaggcccagctggaattctggaatatctgtgagtaaggaggtaaagaacaagagcctcctggtgttctccagagtacagcaaagccaggactcagtgcaactctctcatgctgtaagaacacagactcaccaagtggcaacacctcaccaaaccccacacagtccagagccctggcatttcacctgcagggtacagtaagcattctcaggcactttcaataggagcatgttaaaacactaaaggctgataccagatcctgaatgaaaacttaactgctgttttctttctcctgctggggaacacaagtctttatcgcttcctttcattcgagtgacagcttcgctctggctctgtggttgtcatgcacggtgcatagcactgctttgctgatttataaccagttgaatcactgtctcattaagtcaaaagagattagtttgggaacctagtttgtaaactgcgagatgctacacacatatctggaggcaaggctaccaaggctctaagtacactcctcattaatctgcttgctctttaaagcagatgggagaaatgagacagcctgtacctatgtgaagacagactgggaacaacaaggcacatcctcttctgcccagatgctatcctctacctgagcttctttagtcccaagatatgaacagaaccaggagagaagggaaggtatgtgacactgactgcttcatttctcctacgcacattccatgagggacacccaagtgaagacatctctgtgtgggctgaccctcacaccaatgcacacaggagtcctgcaccaacagcaaatgggatggtgaactcagaggcagtgattagtattcatcccaatgggtttttagccaggctcttcttcatatggtaagctctagaagctaataaacctgaaaattggcctgttgcacccaaagtagactcattaattatgctaactataacctagtgtgtcctgctaaactagagatcacttgtcaacaaagagaagaatgtccatgaatacttccagagtcctgtctgaccaccagggttctgaagagcttattgaaatgaagggtagcactctattgcaaacttactataatcaggaagggtgtttgaccagatgcatacatgttaataaatcacatacctactgagttataggccagaacaacaactgtcctaagtgcatccaatttgagctctgtcattccttgacaaagagccaacaaacccctcagcactcttttctgtgtccatctctcaatggtcttgaactcacaaccaaactaggtgccccactttatatgggagaaggggaagagactgcatagctaaggcagagactggcctgggcaaagattttcctgcacacctaacctagcagcacccagggaatttgcacatttgcaccccaaatcattacctggtcctctccactttgggagtacacacactcacacacacacatacacacacacacacacacacacacacttttattagttccagctctacgttggccttcctgcataggacagccagtaggttattttaaagcaggcttagtattgccattgtgactgtgtgctaaaatacaggaatttttaaactgtgacaagatgcagggagctgtgatcaaactcagggataccccttctctgccttattgctaccatttattctccccacccctgttttaaaaatctcatgcttttaacaccagccccatgctgcaggagttgttaaccctttattcttaaagtccccaaagagctcctgttttaaagcacttgtgtgtgtgtgtgtgtgtgtgtgtgtgtgtgtgtgtgtgtgtgtgtgtgtgtgtgtgtttggggtgggggagggaattccactgtgcctgctgctttgactcactgaggtggctaattgcagcatctgtgtttctcatctgcccagagcttgcagctgtgtcacctttggactcctctccagtgagcctcaaaatggtatttcactttttgggtccaaatggacaatttctgagaagtcggcataactcatgtagctttggaaacaagtttaagttgtttttgtactttccattacccggattgttctggaatgcagtgagtaagcgcctctgtttcccttcctcacaaggagctcaagacttggggaggtggggagcactgtagaatgcagaggtccagaccagatgagcaggtctgtgctagaggggctagctcaaaaactcaggcgggtctcgctatgggaggactcagtagtctccccaccctggtctgcttccactgagcttgtagactcaaatcagcactgagagctctgaactggaaagctctcccaggccttctcccttacccctagcaacgagcagctccaataaaaagattcttttttcaaaagctgtatgcaacaaggaaaaagaattcctggagatgagagagagagagagagagagagagagagagagagagagagagagagagagagagagagtagtgcttgcagtgtgtgcatgaggatgtggatttgtgtctagaagcacacacaaacaatacaggtgggtgcacacatgtttgtgatcccagcactggagaagcagagatagatcagggcctggtgctttatgtccagacaatctaccctaattgacaagcttcaaaccaaggagaagctctgtctcaaaatgatacatatggtaccagagaaaaaggacactcatggttgtcttcaactacacacacacacacaaatatacacacatacacacacaaatatatacacatacaggtacaaacatacacatagacacacacatacacacatgtacacatacaaccactgagaagtaggaggctaaagagatgtctcaggagttaaaagcttttgctgctcttacagagagctcaggctccattcccagcactcacatggcagctcacaattgtctacaacatcaggaccaggggagacaattccccatcctgatctctacaggtaccaggcccattgtggtacccctacacacactcaagaaaacactcagacacatgaaaacaaactgaataagtggcccctgcttggtgtccggagccctctccttggcttggtcactcgctgtatgtatgtctcatgctcagcctttacagtatcaaagaacacagtcccagaatctcggggcaagtgagggggtctaatgttcaatttcattcttagatactccccaagtcaggtgtctccttgcagtgcactgtgttggcatttgtgctatctgttgccattcagaggtcccagaaccctgattaagagacaatgagaaggaaggaagtggaagaaagtctggccttggctttcaatagagtgtctgaggtgcattcgaaaacaaaacttctaatcctgctctcaccccctgactggcagcactggactgtcgtgcatttggaagagttatgcaatacgtctgtaagcctcgattctctctccagtaaaatgggaagactggggcacctgttcacaggtagaggtgtcgtgaagattaaatgagctaatttatgtgaagcaccatatcattatgtagttaaactcaattcgaagagtcacacattttccaatatacagtgattgtgaaattgcagtctagttcacactctgcatattttaatatatatttaatagcatgtactctcaccccaatcttgcccaaaacgcaggtattaagttgctagtgcatcttactaatcaaggcattcttaaatgaagagggcatgatctttcaattactgtctccttgtcatcagtaacagattcaaagctcacaaaacctgccaccataaagactttcacagctgactctctacagacaggcatgggagcagaggtatcttgcaagccagcacatcctttctgtcctgactgctagagatgaaacttctgagatccttgtccaagtcctgctgactcacagccccggctggctcataacaccatgatactggggagcttactggttggccattgggtcggggtgggatcccaattcacttagtggccctggaaactggaatttacaatgtatttccagtaagactgtaagtctgaattcccagacaacccacagataacacaaagatggccgcatccggtgtgaattctgagagaatcaagacttcactgacttatattaatggaaggttcatcctctgtccactgcacctttgttgctgtgagatgagaagccctcaaaggcaatactcggccaggaaatgaggaactctgccttcaattgagcccatcctctcagccagttaaagttccatacctgcaaatttacctattttaaattctgcggaaattttgacttacaaatgacccgattctctcaagcagccatgctgagaagaagagagaactttcaagtgcgagtctgattccataagaagtggtgaaggatggcaatcactgtcaggaatgaatttcttccaaggctctgtaaattgtgtctaggtaaacccaatcagctcggagggcttatgtttcctcctgcgcccaattttaaccttcctccttacaacagactctgcttctctccatcttccactttcagagaaacacttcagccattatctttcctctcaccaaccaccaagacaccacctccatcagaaaatgagcaggagtaggcttggagtgtactctaacggagcccctggggtttaagcatacatttctatgtgtgttcagcataggaaaatatcttattgggcactaaatgtttaattctctgagaaattggcaatccagtaagaaagaaatgggaggcattgagatccttttaaatcatggtaatggggcagctcacaacaccttaatgtcttcagtccatctgaaagcccaatctaggaaagtttaggaagcctggtggctaccccatgccaattaagacaaaggatgaccaactctcatcctgcctcaccagcatgggaagcatgttgcagagtcaaatagagaaaggtgattaagtctgaagggtgcaccatatgcttgccagtaataggtgggtccttcccaagtgttagctcatttaactgtcttctcaaggaagtgggaggcggagatattatccagacatcctttcagcccataatgttagcacagaaaagacctgggtagttttccctatgacctctggtttctaagcccctctttaccaacttttctgcgtttgtcaatctagatctgaggagggttgtgtctctgaatttttctttcccccaacacacatattgtgcatattacttaactcctcactttcttcattttttttttcagatggaaataaataatactctgttgcaaacataggagttcagttctgagggtgttgaaaaacctgggcagaccggcctgttctttcttttacgatcaaagtgtacgctagccctatctctcaaggctatgctgggtaccttttttagactatcctgtttttcacccctctagggtaggcctacatcttctctcattctttggggttcccttctcttgagcagctttgtctcctagtacatactgaagccaagtgaaggtggttcttcaatggagaggaccccccaaagacatctacctaatatactatccacttccccaacccaaccttcatcctaaaagcacccacaagcaaagtcagttggtccaaacccctgcttccctggatttctgtaactttccaacggggaccaaaggcaggcagtgcaagcccagtccctcactcctgtaacctaaacagcatctgcaccagtatacactggaaccattagaaaagcaaatccctgggccctggtcacaaacagagtttgagccaatgaaatgattgtccagcatccctgctttcaatcactgtgtatctctttggttttcatcaacagtgagatggaggatgaaagactgtgatgtgtgccttgccagctccgacccccaccccattgcactgagcagtgtcagtttttacgttaaattacttgatttgccaattttggatatgatctttgacactagagaccagacggtcatcttctgtcatatcatcactacttgtcccaaatgaatgatgccaaaaaccaacactaagcagcaatggggcatactgatagaccaaggctttcttaggcaactctccgattttcctgcccaggaagataaaatgtgtaaacaggaaagggccagtaggaggaaaaatgagactgagaaatagcaaggccatcatcttcaccctgcagttgtctttctcaaccagggactctgagaagtgacagagtataccttgacatctgtcatataccaaaaaagagtcaacacacatattttacagggtctggcaccagtatccacatgcttctttaacctggttcctcagagctcagtagcagtgagtccctaggccatgaagcatagatcattatgagagccaatgggaggaagacctttggttttagaagatgcatcttctgtgtgaatgaggactaggggtgagtgttatgatagtaaacttacaagtggagactttagaggtagatggggaaaatccattagaatttgccttaagtccacccagcagttgaaagctgccccctcttgattgtcagtggcccgtgagtgagtcaatacttaaacctagttaacatttgctccaagatgaagactagctgatatacatagagactctgtagcagggagcagaaccgtgttcaggatacatttatcttctaaataggttactcaaattcagtcagtagttttactggggggacaggtaaagacagaagatgggtggcttggtgggaaagacttccagtttattccattggggtttgttgaagaggtaggaactgccaagtaggcttgggaacaactgaggtctgagttaaaaactgtctccagactaaagagagtcagggggtggtaggatgattagcaacaaggacaaggcacttgatgggagggtgtctacatggtaacttgggagagggaccagtgatacacatacacagttacttgggagttccaaggtccctgtgtagcccaaggttagcacagcccaaacccagataagctctgaaacgtacaagggccaccttggtggggacatcattaacggctggtaggtttcttagacctatcatcctgaagagggcaatcactcagtgagcacacagatgtactgcatccatccttgtaactcgggtcctggaaaccaggctggtgtggcatgagaatgaagacaggacagacacacatacagatgtgctcttgagtcagatacatttgtgggcctgatgttgtgagcattctgatggggtggaacaactacacagcatctagagcctctgtacacttattatgtacagcaagtgtagggtggggtggggtgggaaaaactggtttcaataggagagcactatagagaagagagagtaagggggaggggctgggctttaccaatttctcatacgtccttggcatgaaatgacttacattcactctggactaaactcactccctacagagcatcaatcagaagatttaaaaataaataaaatagtgtacaccaggccgtaagttatgtcaacctctttgtggagcacagttatggatctgccagtggcctcacactgagacttttctcccttttctcctttacaaaattcacctgcttatgtttctagcctctcagaccttgtcccagtccatgaatctctcctttattctacctgagacagcatttcctgtccatctgcctgttcatctcaaactctaaattccactgtgcctcttacaaatggcggtatgtttttcccctgtgacttatttttacttagaaaacaaactcctagaatagagacccaagacctcattttttttctccctccttgtacctttcctgagatgtggattgtgagcagatatccacaaggttatgatggaaagaatgaccaaaccgtaatggtgagcagagtccacacactgctctgcaatgaccttcacagaggatctgcctcgtccccttccctattgctcaggtagacttcccctgtatgcagtcagctcaagggctgagccaagtacagttagttatccagtaagagtttaatccacctttcctgaagacaaatggtacaatcactacttgaaaggggcttctcgcttccattcctgcccccaccccctgtagctgcatccttctgcctcagcaaagccctaatacacctaatgtatgcatctgtctcactaaaaacaaatcaaaacaaaacaaaaaaggccaggggagagaataagcagcaatgggcaaagacagcttgggtcgagtcacagcagcactgtaaaaacagctacaattatagcccaaaacaggataggggaacgcacaagttggagggcatagtggatcgcaaatccccaagaaggcttagctccttaatatacttggagtagataacctgatgatcactaacagctacaataacttctcttatgtatcttctcatcaaaacccacagcaagcacagtgcccagaggaagtggtaaagatgtgagccgggattcagctgcctttctctgctctgttctcagaatttgatccagttttggtactcaaaaggctcagtagcaaaaagtatgcaaatcctcctattataaggaggcagcatcgggaactggagttaaagggacttgttcaaggtcctagagcacaggcctgagtcttcactgctcatcttgtacctcttcacatagagtctcaagaaaaatggtatcatgagactaaggttgatactgagggagacagcccatctcccacatataataatagttatatgtggccccacccccaagcgtccttacggcccacatgtcagtgtgcattccaaatgacagatgagtttttacctcatctaaagtcactttaaaggcaaggtggagacagaggtcatccccctgagaaatcagaaagtagagattatacactccaacacaatatcaagccctcttgagcccaacttcaactgaatcttggttagcatagtgtttcgcttcctgttttggtccaagaccccaaggagagaggctctagaagtgacactaccaggaaaactagagagctaataccatagccacaatgagtcatcacagtgatgacgctcagacttcagtctgcccacaaccacctggaaaactcatccagatgcagaagatggagcccgttctgccccaaggggaataggatagagccttagaatctataactctaactggtcccaaaggtaatactggcctcaccattcgctcagagacaatttgagccaaacatttcatttcactaatgcaaaagatctggaaccagagaggctatgatggccaaggtcacccaccacatcagcgacacagttggggaccagcatcatagctcttacattctcctttgttcctgctctaccagacttactttgaatcgccaatcagctccgtcactgtatgaactaagtcattttgaatactaagtgcttttcctatttcatctcctttatccttgttatcacttttgaggctggggcactggtcttatttataaagaaagggacgtttgaacaaatttaacagcggtgaatttatcttggaatcttaagtcaaatagcctagctggagtccacccagatctgcttgactcaggctgctcttccataggtctcacccagttctcgaaagacagattcctactacaatttgctgaaagtaaaacttaacagcctcagctcacagggggaaatctacagtctggggcaaaacaaagacagtatacactgggcaagtgtgtttttaaaacccatgtccaagagaaccacaggaaaaggatgctgaagccccaactcctccagaggtagcttgttaatttctttccaaacctttcaggggttcaaggcctagacccatgagtgtgacacaacagagttataaattctgcccccaagagtcctgaggttctctccaaacaaaattaatagcctgcaaactctaaatgggtgattacaatctataaagcagctcacaaaatgacttcatggggattcatatttattccctcccactgatttccactataaatttgctctgtttatgagtaaaaagtttcctctgctatgagtgcaggcataatactcttctgcagatggaaacatctggctgagttgcttagagctaattttgccactggtggtcttggccagtgggaagcatggcagaacctgccaggaaagctcagaatctgaaggtctcttgattattggcatcctgtgaacatggccttagatcctgcaagggttggaggcaacagggtgggtaatccatctatgaattctcctgtagcaacatctccagagctgtctttcttgtggtcttagacctgagggtagagtataatgtacaagaatgtaaatcaagatccaagtgtggttgttcccagacagctctcatgcatgagaagacacagtgtgctactcagctttctcttactataccaaaacactttgagaaaatcaacttatacaagaaaaggcttctaatgttttagagttttcaatatgtgtataattggacccagtgctcacgggcctgggataggacaagctactcaaatcgtggcacaagcaagacatgtagatgaagggacagatagagacagagatagagacagacatcagagtctcacaatgttcttcaagggcacaccctacatggcttcaattcctccagtaccatcatgggcaagaagccaagccttttactcacaggactttgggaaactgtccagatataaaccatagcagatagatagactgttaaacagaccaaaaaaaaccaaaaccaaaaacaaaaacaaaaacaaaaaccagtacagaaacaggtcagacaccatgaacaggaatggccaatctgccgtgctggtagtgattttcttaaagggcaaactggagggagataagcaaaactagtacaaagacggaaaggggagcttccacaaatccagtgacccccaggagtggaacttcacagcagcaacacagaaaaaaacccaacccaacacagaaaaaaacctgggtcaggcaagtcatgtaaaacctgtaagattctctttctgtagatttcctttcctaaggatttgcacgacaaagattttcttctaagcacaaaggggacaactggcaagctttcagacggaaattaatgtgaccagaaaagcatcttagacagatccttactgttgctgcaagaaagatgctcttgccaggaaggggggaggggactgctaggaggaaatgtcaccaggcttctagcctaccatcacagctgcctacacaagcagtggtagtggcctgggctaggggaccagatgaacagtggtggcatctcacaggttaggctgtccagagctatctgcctcagtttatgcaaaacggatgttgcaccaacaatacagcagattactcccaaagagcaatgtgcttggaaacaactcagcaaccaaggccagagctggaagccattgagaagccaggttggtatgaaattggcctggccagaccaacatgagacattcatcctcttttagtctgtaaaatgacacataaagaaaatccactgtcttcttctcttttcaaatattgcaggaggctccaggttcattggctgcagggcaggctgcaaggagaggctgtttgaatctgctgcactactaaacaaagatgtactaggctgattcagggtcaatatcttccatgcttccaaattctgtctttccagagctccaggggcatttctatcagacctctacacatcgacctcacttaagttcgattttactttggcaattctattctctttatttgtgtctagtaattgcatgtttgtcactcacatctcacaagaagataaagtcaccagaaaatagccacagtatccccacctatgtagggccacaggtgaataacttcagactacctgggctaggaagagatggaactacctcaggggaccactgtgacacagacatacaggggaatagcatgaaatgtgcttatggaggaatcttcaaggtgtagctaagctatccattattccatggtgcctagagctacctagagactttaagcatttgacatgaaaaatacatctctggaccatacccagtcttttcatatgctctccaacctgagtccaaactaaatgcatcctggaagaaatcatggttcctatttaggacagcctctccaggcagcctggtcctgttgttgatatctctcctgctgtggaaggaaagcccctgtgcgccagcctcagacattagctcggcttacagaaatgtgttccctttcagtaaggccggctacgatcccaggtaattcctctaagtgcacgcttaaaccccagcagctgttccagatcgccacagtgaagatgacgccaccggctgctgcccagacacaactgggaagatgaagccacccagctgctggtttcctaaccctgacatgccaccaaaatagcagcccagggctgtgtatgggtccttccttcaacacgcaggcctgtaccggatctgagtctaagaccaggaggctcaatattgcatgccttattggtatcaataagataccaggtttccttatccttgaaaggctcttaaggagacactgtgaatggactgccagctcccactcacgttcaaagcatcagaaagatgctcaagatcacaaataaaaaggcagcaaggtcaggcttgaattctgatcctccaagtggacaacgcagactgtgcccatgtgccatgctactgcctgtgtctataaaagccagtttctcttcttctcccaaaggagcctagctatctcaattgtcttttccacaccctgaacagccacgtcaactgagtacataaatatgctttgttgttgttatcaaaattgtattttcttactggatccagtcggatgagcgtgtttacacctgtgagttagcttaggaagggtttttttccatgatgtcatgtggaaatgtgcaactcatggagggaactgcatacatatgaacatgcaagtcctcacatgttcctagcctctgagcctaaatgaactctccagatgtttccataactcaggtgattgcaaactggctggtacttccccggtagcaaaataaatctgtctaaggagtttccattcaaaaaaataaaagtaaaaaacaaatccagagggatggcacagtcagcaaagtgcttgccttgctagcatggggacctgtgtttaatccttaaacatgtgtaaagaaagtcttgaactttgagaaaggaaggcttggtcatgaccagggcatggtcacaaatgcttacaatcccagtgctggagaagcagacactagcagatccctgggcttctagatcagcaagttacaatcactcgaaaaggaaaggagagaacagggaaaagaaatgcactgcccagcagtatctgagaaatgacaaccaaagctgtcctatacttccatgtttccaggtacatacaaacttacatacatacatgcatactcatataaacacataccaaccaaggtatcaatagcaaaactgcctctttcccaacatattaataaatgttagccatggttccctgaggaataagaaagatactaagcattttatttctcctactgcccccaatgagggctgagcaagtgacgtcatgatttggagaggaagcccctcccattccaactctgcctagcttcagtgttccttacagtctgttatccagactgatgcatacacactctacccgaatcttctccatgtgatttagggtcatgtgcaaggtcaaaggacaaaggatgatgctccaggagcaggccaggtcctgggacagtgatgagcaagaagcctgcagagtctgaagcctgaaactcaacactcaagagtttctgctgaacattagtatgagcagtacagtactttcctctgctctcagttccttacctacaatattataaaagctttgcacacttcttttttcttcttttctgacttgtgtacgtatgtatgatatacatgtgcatgtgtgttcatgtctatggggtacactatgtgtgggtgacggtgcagaagactgtattaagcactgtgctgtgaaatcatgcttgaggcttggtgaagacaaattctctctctctctctctctctctctctctctctctctttctctctaacacacacaaacactcacacctagaaataatggccatgagtatctgatcataaagtaagtacccacaacatctagtcaattctttttcatacacttcccaaacaggccacaggttgatgccagtaacttcactgattgctgaatccagaggccaccaatttggctagttttcctacccagcttgtcctgggtgatcatctgtctccacctcccaagtgctagtagtacatgcaggcacactgttctgtgtgggcttttggtacccaaacatcagtctctaagcttgcatagcaagcctgtatccactgaactatctccccaggccacatctgcagccttgattactagactcaattacaattctctatcagccacataggaaaaacttctccttttcctcctcccccttgataggccctaagagcagaggctatgcagtttggagctgaagcacattcctagatatggatgcatctgaattggatcttcatgggtagtccatgcattacccagagcagtgagcctccaggtccttcacctgataaaggtcagatgtcattttaacagatcatctcaagagaccccatcagatacacacaacaaacagtgcttgggctttctgactctctggtagtatgacagttaagattccagaggcagtcacagcatggggatgtgggtgattggcacaaagatgtagaggcgggacttcacttagcaccttgaaaaattgctggaactgatcttttagaccaatgtgcaatcacagtcgcactgtgctgcttgttaaaacactagtgaccaagtcccatttggtgactttctaatacccctactgcaatcctaaacccatacagctgacccacgactcaagcactggagagctgatgtcagaggtattgatccaaggacactccaggtcagtcttgagcagctgcctcagataccatgcatgttagcatcttatggagattatggtctagaagcaaaacaccaatgtggttatataagaaatcccagcccttgggaggcagtggcaggtggatctctgatctcaagctcaaggccaggctggtctgctgagtgagttccaagatagccagggctacaacagggaaacccagagaaaccctgtttcagagagagagagagagagagagagagagagagagagagagagagagagaggagagagaaaagaaaggagaagagagaatagaattgagaagagagaagagaggggagagagagagagagagagagagagagagagagagagagaagaaacagatctgagccagtgatatggctcagtaggtaaaagatatttgccacacagacctgataattggtcttccatctccagaactcaggacaaaaggagaaaaccaattcccaaaaggtgtcctctgacctacacatatgtcccatgatagggcacatgcatgtgctcacacctaagggcacacacacacacacacacacacacacacacacacacaccatgctcgtcatcatcataaaagcctgagacttgaagttcaagttcaaagctcgctgcattaacctcagttgcctctgagctccagcccatagacagaagagcttcagagacagcaagagaaatccaccccaccccatccatcccttccattaggaggacagccttaaagtggggcactgtgagatgtggggtgaattaggatgggagctcctctagagcattttataaacaagagagatcaggataggcattgaggcagaaggagagatgagatgaccagatagaaccatcccacaaaacctgccccctctactcccaggaccacgggaacagaacagaccatttgttgttaaggccccaccttaacaaataaatggaagttttgggagactgaaataggatctcttctttcctctttcccccaactctatcttcattttagactttcttcagttagactgaaaaacagaacatccccatcacagtcactgtctgttcagaagtctgatgctggcatccaaagaccaaagtcttctcaaaggagccacacaccgtattaggagtctggcagagagagattgttaggagaaggcaaagagaactcgaggcctgcatggtccctctctgcggagcccatgcgatttatgttggagcgcatcaaggttcctaagcagccttctcctccataagtgtggtgaatagtcccagtgccaccattaaggcccagcactggaacctgcagctgccgccagagagccacagccatagagagaacagcctgactgtgctttcagttggttgccatggcaatggctgctccttcatccctgtctttcagctctaaggaacgacaaggatacctaagagaagacagtggaaatgagaggaaggagaaatggtgactaggccctgttccccaaagccaaagcaaccaatccccctatgtgggcggtcacaattcttggtgactttgtgtaagctacgttggctctagaccttggtttgctcatctgtcaaagaaaatgctggaacagacttgagtcacaggcaaatcccagtatttcaagagtaaggatcagcctcaccaacccaggcactggaggagcatggtcttctgtaaatactgagataggcgaaccttgctcgtctcccagatccttctcctactgattaaagtcagctgtcattccaatggattacctcaggggacacaccaggcacaccgctgacaaggtttggggtttctggctctcaggtaatataataattgaaccagaaggtcacagtgccacatccagccctgtgactgatatcacagagctcagtatccaattcagaagtgcacagtcctctagatggcagccagtcctgttagcttagggaaagagactgtggggagaagggcactcactttatttggtgttgagagtgctgcagtgaggggaaagcgtggaaaggaggggcattccagacaaaaggacacacaaggacctgcggacacaagagcccattaagggagtgtttaaactgctatttcgctgctcaaatgagggatgaggagcagcagtaaacaagggtacagaggatggacacaaagcaagtggagaatggcaggaggtggattgagaaatggatagaggggaagggaaggggtcttcaggaagtggcttgaggttgctgagacttaaggaagatccagcttgcagccttcatcccacattcaagtcctctgcatcactgtggccctatgaagggtaacctcaggttgggaaatggttaaaggagcctgtatgctgagcttccctaaagtctagcagagagctgagctaaatgtgagaaatctgattagttttctgctctgagcaatctcatttatgaggccctgcaagtcggtctgcaggattagtggtccatggacaagacaaaccaatatacaacaagtaattagggaacatttctcttccctttaagctacttgcatggggtggggggctgcggagggagcaagacaagaggaaatagggcttccatagcatggtgcgtcttggtttatgttcattctgaggtcattttcagaatgtgacgctccttgccagtggaccaggattcagggctaaatatttcactcaatagcacaggggtggtgtgatggactccttgttcaaggatttttctctctcaaaggaaaccctaagcaaggagctgctgagatggtggcaaccccagggaacctgccttcaaaagcaagggctcctctgttttatttacttgaggacagcatggcctcacataatacctggttcctaagtaatgaatggaatgaatgacagacccaatgaatgagtgaattaataacagatggttttccgtgagccaacaatttaactaggaacctgtggcacataaaatctcataccctaatataacagtggcgatttacattggactcataggatttagggattgaaagtgagttttaatataatgtgatctggtgttttgtttgttgttgtttctttttttttcttaagtcgcaggttgtaacccattagtggaagattaaattgatttagggagcctttaccatcattttacaaatgggatgagaatagaacagagtagaggagagaagcaaatgaaacagaacatcgagtgaaacagatggacgctggagagctggctcaaccccttgcttgctgctgcattgggtgagctggcggggcaagcgctggagagctagtcctggtggcatgagtgcaggagagctggcaagctgaccaagtcagctaccacccaggccaagatccaaggctttgagttggcccacctcaacatctaccccatctatgatctgctggagcacatgaaggggctggtcctacagatgcaaagctcagggtctccatgacacggggcaacagcaggatatctgagagatgtcccagtgaggatccaatactgacagtgtagcagaggccagaggcctcgggccagaacaatgacttgttgcaatgcacatttctaaataaaaatgtaaggacaagagagtgaactgtgtgacatgccactgcttccatgactagatggtttggttttgtttctttttggtttattttctttgtacaggaggttgcaaaggtggagggcagatacaaagggatagggagtgggactagagtgtatggtgtgaaattcataaagaatcaataacaagttaataatagagactggagagatggttccgtggttaagagccctgactactcatccagaggtcctgattcaattcccagcaactacatggtggctcacaaccatctgtaatgggatccaatgccctcttctgttgtgtctgaagacagggacagtgtactcacatacgtgaaataaatctttttataaaggttaataaataaaaattttaaaagtaaaaaaaaaatctggaaaacaaactatcaaaatgtatcagatgtagacatgtagtaagaggaagcctgggtaagcctagccttgtatctgtgggtatgggtgtcagttgtacccctgctgaacagctcagaacatagcacaaagagaccctgttcttcccagaattgcttctaagctgttgctttgtatatgctcattagccaacttggttgtgttaacttgacagtgaccccttcagtgaggcccagatagccatggaaacaccactcctgcctctggtctacagctggtgtgggttacagacttggtaaatccactctgcatcaaggtggtctcaagtctctctggatacccttataccatcagcccaaaatcttacaatcgcatgcaaaccaaacatgagtgccttgcttccttggatgtgaaaaagatcccaagtgaacgttatctttcatcaatggcttttacaatgttgttcagaggttgcataccatagacatacaaatgaaattagtttcacgaagcagtagtaacccaactaggtatgaagagatgtgctatgacattatattctatttgattttttatgacactagtgatgacccacagtggcactggcacttagagttgaaaatggttgagggtattggaagagtttcacatggaacacatttgtattcatgatgttcagctgggcactcacatttggtggtatgtaacggaaggtgacagcttggcgagctggagccctactgttctgaggactaatcaggaatggtcttggtttggtctgtctcttatagacccacagggaagctcatcaacaaaacacactgcgagtcttatgcacagtacactaatagctattacagatacatgattattcttggccctctcttgctgctaactgggtagcagccattccctgtttgcttcgaagacttgaaagtaaaagccatccaataattaaaagttaaaagcaaagttgggatggtgatttgttttttattccccacccaacttggaagaatttgcctttggagaaccaaccaaaccaaatcaaagctgattcaatccactggagacatcatctggtttgcatagttgtctggctgagttacaccacagctgttcacagtgacatggttcattaaacaagaaagtcttcatcagaccctcccccctgcactgtgttttatcagatcctactccacacaccaccagagagtcgctgccttacacagtgtgcgaagctacccctggccagtggggcaatcagaggattatttttatgcgatgttctattggctagaccttgtaggttggctgcatcaattaaaagccactacattttctctgatagaaattactgccatcagacatcacactagacagtgagtttcctgtgggaagggaccatatcacttcatctttatacactaaagatgctaaagccaagtgcctggcatttggaaagcacaagacagaagtctagtgaatcaagtaggaaatgacagtagctctcctcatggtctcccaagtgcagtatatagaagtcaggaagtgccctgattgcaatgaacatttggtgtctcaagttatatctccttcctttctggttttttaattttccactcgactgggtcaaactgctcaaatctgcatgaaagcagacaggattcacaaaatctcctcaggccccccaaaggttcaacaacaccaattaggcttccttcagactcagagaccccactgggtggcggggcatcagtgccaggcttccttaagaatcccatggtccaaagaaactaccagaaaatgagctgctaagaagtgccagtgaccttgaagtttctctcctggcaagaagcagtgattcgacttagaaagcatagtaatgagtggctgaggcacacctggaaggttcgtcagcttacctgtcatagaccaactcaaagccgagcatatgtcataatcaccaagaggatgtaatcaaactcagatgacggagtctgcatccttaaaaactgccaggtgatgctgctcttatgggtgcccctttttggaaagcactggtttagactgtccaatgtctcaattggagtttggaatctaccagagcttataatttgaagcaagttacttcaactcttccagactcatgatgccaagtgccaaaccaaatcgccaagagtgtctttcctaccaggtcaaagaatatagctgcttagtaaaatgctgacaggtgaaggggcttgatgaaagctaaacattagggagggaatgtggtctgatggaaaaactctgtgacagaacagctggatagcattacagtcttagtgccgccactactaactttctacgtgacctctggattcatgccctccttagtaagatgaggacatttggcagtttataatggattgagctgaccctgttcttgactgtattatataccaccatgtatgagaactgcttccgtaaatatttgtaccacacctcagagtttccactgctacaccccaggtgaataactttactctaccttgaaaacaacccacactaggattttcttgtgtagctcccgatgctacactactcatatcatctaagggacacatttccttggcaactcaatgtggaatctttctagcttcataaaatcctaatgtaggctagagagatagctgtatgtataaggggtttgccttacaagtgtgaggacttaagtttggattcctaaaacccacaaacctccccccagaaacaatgatgtgtgtgtgtgtgtgtttaattccatattcttacaacaggatagcagggagagacaggagatacccaaagtagggggaatagctaccctgccatattttagtgaaaaaagtgaaacatttttaaacatggtagaaggtgaagaccaacaggtgaggaagagaaagaaagagggtggaggaggaggaagagagaaggggaagggagggagaagagagaggggttgagaagaggaaaaagggaaagagagggaggagagaatgggggaggacagggaggaaggggtgggaggttaacaagattgtcctcttgttaccatggccatttccacctgcctcccaatgctattctttgttcttttgtggtcacattcgtcacgatgccctagaaagctgggaatcatcagctgtccactgaggataagtcttactgtgttcataaatacacaggaggataaggaggggagagaaccatgttctgggagtggggcggctggggaaactagtttctaaattcatttccacaacccattcttgggcaggcaaacctcagaacaaagtctgaagggcaaattctacacctaagattcacagtgctttcctcctgctgtttcctttagcctcactgcatcccctccacccccaagtatcccctaccagccccacacaaacttccaggcagcagcagctgggttacttcacctgttgatactgagatgttgtttgttttttttttattttttttgtttttgtttgtttgtttgttttttaccaaatgctgatgaaatttccccatcaggaaatttaagtcaaggtgatattaatctacttctggtgtggagactggatcttcttgacactcttaaccatcctaccagtcacgaaccatcctagtgccatgagccaagacttcatggtcctttggaatgcaacctgcaagctggaaagcccttaattagtttcttgggaggctggagtcatcccttccagctgcttggcttacatggggcaggacctgatggaaaaggtggcaaccaaggagacttggataaatagggtgctgcttcagactttgtggtgctttaaataaaaatgacccccaaaggccatagagagtgtcactattgggagttatggcctcattggaggaagtgtgtcattagggggtgggctttgaggtctcagatgctcaattcatgctcagtgtagctgtcacttcttgctccctgtggatccagaggtagaactctcagttacccctccagcaccatgtctgccctcatggtgcaatgcttcctgcaatgatgataagagactaaacctgtgaactgtaagccagacccaatgaaatgttttcctttataagagttgccttggtcatggtgtctcttcacagcaatgaaaatcaaaataagacaccctcccaccccccagtatgaggtatcttaaactaggcaccttgttccattatcgaaggttctgagatgcaagctgtgttaaaggtgaagaccatcccacttgggttaacagggattcctgtctcattttcttggttggcagtatgagttttctgagtgtttcagacctgtgctcactttcaactttcctgatcagcctatagtagctatccccacttttcagggttagaaattgcgtcttagagaagccaaaatggttgcccaatgttacacatgagacaccaaagccttgttcagtcacaggtcttagacaatgaatcccacgaccctgtgcttctcaagatatgcaggtgtcatggaggctccagtggagaaaatcctctttcctgtcaaaacatccactacttcatgctgtggagtatggctcatttgtaattctgcttcccataaggaggtactgagagtcacagaccatatcttcatggaggttgtaggcacacttcttgacacatgacctagcatatacctaactctccttttaaaggacaaaaaactgtttgtgcataaataatgcatatgtgtgtgtagacacatgtatgtgcacgcaaaggccaaaagatggcattggggatttcccttgattgatttccattttatttattgaagcagggcctcatcttgaacctggaacttgccaattcgaactagtctagccagctaacttgccctgagaattgcttgtcttttccttcccagtgctaagattacaagtgacccaatgcctgcttgccttttaccagtgttctgggatctgaactccagccctcatgctcgtgtgggaagtcacagacactgagccatcccacttgtgaaatgtgttaatgaaatgaaccggtgggtaggttccactcatcctagaagtctatatgagtatctcacgccctcaggcctctctgctgagagagctaaaatcagactcaggaaaaaaaaaaaatgagctgcaagttacccaagagaagaaaggaggtggcagtaaaataaagaaaaggacaaaccggcaaagcctacgggaggggcaaagcaatacacaacacgattaacaattgcttcccttagacaccaggttcccctgaagtctcttacacatataaacacatttcatctttagaaccactcactgcatggttaggaaatgtggggcagagatgcctaagcagaagcactgggatttgaatccaggacacaagagtgccagagctggggatctctaactgtctacatttgctgcctcctaggaaaagacttgagctgtatgcccaggtgccccatgaacacagcagcccagaatttagagagaggggatattccccagggtcagacagctcctttgactccagcctgcaaggcccccaactcgggctgtgcggagaagtgccacaaaggcggcagctggagattaaattctgagtaattaacatgtttatccatcatagcagaatcattccctggagaattcaagtgtcatttcactgtgtctttaactcatggatgcttttactgtcttgccaacaaatactagtgaggaaaagggttggcagctacttgacagagaaggaaacacagcttctgcccaaaccagtatatgtggctgactagatgatgtctatgataccaagataggcacacatgggcaatttgggtcagttctcataactctgagactcagagcaatatgtctacagtgcacagaccaaaatcaagatagtaagggtcagggttcttagaggcaagctgtgagtctcagacaaggcagccctgaagatatcattttaacaaggcatgtcctttcctatacttataaagtgagggtaacatcttcaacccagaggcccctcaaagctaatccaaaagtagcaagctgagtgtaggatccaaaggaacacttttagtgatcataggaacgatcactcaagcaggaagccaggggtagggtgaggcaaagcaggttctttctgatgtgggtcaagtcccatcaaaagtcctccaggaagtggtacagatcactaagcagggtggttctccagccaccaaagcaagaaggtcgcttctggtggtaaacattggccatcatgccatcatggcccttgtctcacatagacagctgtataatggacatgagctgtaaaaagccctctgtggggactgcatggggaccatatttggattcccctgagattagccatagagtacaggtggggtggtgggatcaagtggtggtaagtcaaggttcgtgtaactaggaaagcaagtggcactggtggtggttttggcagtgatgacaagagtgactgttaccggcctcaggaacataaaggaaggtctagaggcatattggggatagttggaattctgaatgccattattccccagtatctatgccctgtcccctaaacttgctacctggaattctaggggtccacttgcctcccgactgagccctgaatatggcttggaaaaaggccaaagctgacaaatggcattcagtaggttggaacattaggcgggaagggacaagggttgttgggccactgcctcttcaaaccctcaggtgagggtctaaccacttcaaagttagaagccagttcttacataaagcaatgagaatagcatttatagtagcatgattgcatgttcttgtcatcccagcacagagataggaggatccctggactagctaaactggggaggcctaggtccaagtgagacaccttgtctcaaaatccaagtagatattgaagaataagagctcagattgatgcttgggttctacatgcccactcatcctcatacatgcatctgtacctgaacacacacacatatacacataaacacatatactcatacacatatatacacatacacaaacacatacatacacatagatatgcaaacacacaaacacacacactcacacatatcacaaatacacacaaacacacatatacacacatacacaaacacatttatacacatacatacatacacacacatacacacactcacacatatacactaacacatacactcacacacatatacacaaacacacacatatatacacacatgcacacatatacacaaatgcatacactcacacatagacacacacacatatacacacatacagagatatacacaaacacacacatacattcacacatgcacaaacatacatacacacacacacacacacacacacacacacacacacagggtagggaggcataagacagcaactcacaccaacctttcaacttcttagtgatgagagattcaaggaaacaggagggactcaagcccaaacctgcacagccattaaaagttcagccatctgcaatctacccttttcctccaaaatccttggctgtccatctgccatgccatgtgggtgctttctcacctgggactaacaatccgtgacttttggtccttgggattcatatacccatctgagctcctggaggtagggaagtggccctaagaaactcaggttttacattccatgtgagtgtgtattgtgtctcccagtagactaaagccatttggtcaatatctgtagatttttagcttattataaacacagttatgtctttaaacccaggggacacatcctacaacccctagcagatgcctggagacatagaaaccctaccaactctctgtgtatattcctgcactgcatgcctaagataaaatgtaatttatgcatgagacaagtaagaaattaatagccataacaaaaaataaaataggacaattataggaatgcactgtaataaatgtgatttaaaacatgagatgttgatttctggaaatttccatttaacactgaaggtccatagttgagtgagaaaagtgaagctgtatgcatcaggggaaccatatcacatccaaaaaccacattagttcctgcagcccatgagagcggaggctctgtctgtcactgatccctagctctatcctagactctgtcataaaatacgtatactgctaaaaaaaaaaaaaaaatactgccgacaaagaccatgcaaatgcatttacatgaccccttccccacaaagtgtgaccatgatgttgcaatccccttttctcattttggacagagtaagcctgtaacagcatgcaaatgagaataatcaaatgaatgggcaagaaaaaaaggagacccccaatgcagtgtccagaccattacccatatgcccactgcctcctcatgtggctgtcatttgcctgcctgatgcaccccatcaactcgcagtttgggctttctgtgttgccactgccattggtataatctgaggggctggtccccttgaccagcagaggacatctgaggaaggtctatatccctggagccctgttaacttaagagtcacagaacccaactataccaaggagacttgcacaggagactccacagctccctggcttctgaagcacggggagaagcagacacatactcatcctgcatctagtcacctgaagacatactaagcagctaagcgtccccttggtcgagagccatttgggacactgcaggtgacatacaaagaaaaataatccttgactttaataagtgcataaccttggtgggaagatgaaaggtgtatgaacctggcttattttggagcctaacccaaagtgtatggctttctcacttggcctaaacgatttgcatcttgactatgtcactttttttgacacacttctttctgtccccagtgcactcgtgggataccactttaccctcattcccatatagagatatttaggaacaacacaagctgttgaagctcccagggatatgagttgcacactttatgggagattgtatagatttagagttattcttagttccttctaggacaagatacaaatgaagattttttttttccttccccaatccttcccatcagagctgcttcagacagagatgtgaccctaagaagcttagggtccccgactctccctcaaaccctccttaacccacacctttctcacctcagaagtcagaagtgatgctcacaaacactcgacttctttcctctctctggatagccagtaggactgtctagaggttaactatggtcaagtggttctcttagccaatatgctatgagcaatgttggttgaccactgcctcctgccaagatgtataaacactgtcgagaggctagatcagggattataacgaagagccaccatgctttccgcactcacactttcatgactaatatatacctacactgaatggttaaaaaaaaaatctttgccaggaatggcatctcacacctgttatcccagtactctgaagataggggtatgaggatcactgtaagtttgaggcaagcctgggttacatagcaaacctctggccaaccaggggtactcaataagatgtgttggcagggagaaagagagagaaaaagagagaaagagagaaagaaatgaagaacaagtaaaacaaaaacaaagaacaagaagaagaacaagaacaaaaagaacaagaagggggtagaaaacgagacaaattatgtcatactaccactgtggaagttacatgttattacagcagactccagctgaacctaactaacacacttaagctctcccctgacctccaggcaaactttcattctcaactaactcgcaaacatacagataaaaagaaattcttcaagaaacaatctgtgctggaaaaggcaagccttgccatcttggcaggtctcacccttaacctccgtgtagacattcttccgaggaagcaatccctgaaggatgtcatttgcatgtggctctggatgagctgagtctgagaccctgggcaagcatggagaagaaaggaggactccagatggtgtccagtgctcagtacctctgagccaaactcttgtcatacatttgtcatagtctcagcaggctgcctattcctgggctccagccagtccatgccctgggcaagaatgcacgatgggacagatcttctgattgacatcccaccttctctctctcttcttcttgaccagtcccaccatattttaggatagcagacaagtcacttccctgtgtgtaacatgacaaagctccagcttgagaataggggtaaaaataaatatacactgtactaaaaccaattctcccacaagcagaagcctggctccaagaggccgtcccaaggatattgtcagtgaaaacatgcatagcacagcttgttattaatcaattaattcacagctagctttgtcccgagtcatccagcagacagaatgagaagggatttgcaagctgcgtgcatctgaattaatatttttaaatggcataagcgtgtaattaatactttccaggaacacatccacaccagatcaggcagtgttgttggtattttccccttgtccatatgcctctgtttttttaattacattttagaagggaaggcaaccatcctaagtttgttttgctttgttatttcttttgtgactcaaaataaccatgttctttctgcttcagtaaaccattactgcagcttgagaggattcctggaaaggtctcgttccattcagtttttaagaggagaaacaacctgcaaataatagaatcgaaagccttacccgtgaggtcggccacaggcagataccaactgtagtgtttaggagaggcaaggttataccatggaaataaagtgacccctgaaatcccaagatttcaaatttaattcttatttcatcttttaaaaatattagatttactttaattttatatatttcaatttttggcctccatgtatgtctgtgtaccacatgtgtgttttgtgctctccagacaggacagaagagggtgttgcatccctcgggactgcccttatagacagacagttttgagctgccatgtgtgtgctgggaaacaaaccatggtcctctgcaatagcaacaagtgtccttaactgccaacccatctagctagcccctaatccttatttcttaatcatgtaaagtccccttttgtcgatggctctccaagtttatgtttttcaaaagaaataacttggggatcaaagctggtttaatttgtggctctgacattttgacatctggcctccatcatctcaaggtgatatcgaagctgaggctaagataccaggcaaacatggagaaggaagtgggtaccactagtgccatctaatgctctacgcctctgatgtcctacagttgccacacagacctatcttgctgtccagacatcccacactctggaccagagatgcaaaaataacagagagagaactgaggacatgtactcaagagaactacaacaagaacaagagaaggcacagacaatcaggcaggacattgactcagggtagcagtaaagcccatgcccgtcatttttgctcataagccacccagctgtcagaatcataagtactgtacggaagagcacggtcatctggtggttattaatatatttctatacttgttatgaattcttagaggttaagagaccttatggtgctattctgcttgatgctctgcattctcctcattgaagtttgtccttcaagatcttcatcagataattactagaggtggtgagggagtgccgaacacagatgtgtgcacagatgtatcagaagctgaacgtttctgctcttccctttgccaacaggaactaccctttgtgctttaaaaagagaagagaaatcatatacggttacctcaagtgggcaagagccatgttccttagaaacagaaggaagggtgtgagggccggccaagagtatccctactggggaaatctcactgtgaacatcctgcctgggagctggaagataagccagatcactgttcccaaacactagaaggaagagtgacagttaaaaataaactatcaactctacacatttacatttagtcagtccaggctggcaaccccccccccagggcattccgatgttcagccattttgtagcctttgtactatagcaatatctaaggtcctcactagcacaagaattccataatgtgaaaaggttgaaaaggtttttccctgaggatcaacaatgatattaaagtgtgaatgcagatcaagtaaggtcaactctattccaatacatacatgtcccttttttaaaaaaaaaagaaaaaagaaagaaagaatgaaaaaaaaaaacctcatgtcggggataggaagattatgctgtgtttaaagagcctgctgccccagtacaagggcctgagtgccgctggcacccacataaaagccagagacaggagtgagtgaacatctaaaagcacgatgctagagatacgggcagagaaaataggttcatgatgctctgagcagccagtctagccaaattggtaatgatttagtgagagaggggctcaaaatgaagagttataggggaaggtatttgacattggcatctggcttctgtacacacatgtatggatgcatatgcctgctcccacatacatacccaccccacccaggaggtaaacaggaagagtgtagctttggcattactatagacttcttgaagactcattagagactgatccattccatcgtctcaatagaccacaaggttcccaccaacataggagttattctctatcctgagactaccgtggctcaacaaagaagaaagcagtcttacttgggaactatgattgctgggatttgaacttttctgttagtgacaaagtgaactaactctctggaagaaggtttatagagttgtatcaagcctggcacattattggtatccaagagcctaaggctttgctttcttccatagagaaggacctgcctggttcatttcagtatcactgtgagataataaaggaacagaggccctttaaagataaagccttacacagctctgggagacactttgttctatttccccttactcctgatgcactgttccttcagtgctccttcctgcccacaggtggttactgttggtagctggaaatccaggacagggtggaggcagcaaaggaacccaaggtgtcctattacaacatgcatgtccagttgtacacattggttgtgttgggttacaactttagaaatatcagggaagaaaatgtcagaaagtgactctcagcaatcattaaaaccttggggtcgctgggtgtgggtggtaggaggccggggtggggttgggaatcgacttcgaactaaatagctgccttatgtcattaccacattgatttacatagtcaagaccacatcctagccagaccaccaagaggatgaaaacaggaggcaactcagaatgcaaacatctctgttgcagtgcaataaaccagtttaccctttcgctaaatgtcaagttaatatttttcttggagtctgctgaatctctccccttcttcccctccacaggaagggtaccctgccattcagcagtgcctaacctcagcacagggaattgaggagaatagtgatggctgggaagttaacgcaaacagaactgctccaaatgcagaaatagcctttggcagtcatgagatctggtttttgggagctttgatcttgggcacataaccaagccaaagaatagcattaataagtctccagtccctgatcccatgaaaagaataagcaggaatggaaagaatgatggtataccaggccagctatcaactgcctccaaatgaactagccatgaacacctactggagcccttcactcccttctgcctcatctctgcattgatcctgatgctgccttggctgtgatttgttctgcatgcctgccctgcctccgatgtcttttttaaaaatatttatttatttattttatgtatatgagtactctctctgtatgcacatctgtgtgccagaagaggacattggatactattatatatggttgtgattgctgggaattaaacttgggacctctggaagaacagccagtgctcttaactgctggaccatctttccagcccctccaaatgtcttttttatgattcatttttattttatatgacgaagtgtttggccagaagagggcatcagatccccaagaactggaattacacacggttgtgagacatcatgaggatatcaggaaccaaatctgggtccttggcaagagcagcacatactctcatgccatctctgcagtttttctatgggttttcttatctccatcccattttcaacagcaccagcagtttcacctaaataagtgatccagccaggtaagtctctaactcacaatcctattatggcttcctctggctttttaaatgaagccaaacctttggcactgtgtattgaagttgacctcattctatgatctcaaaagcttctctgaggttgacctgaatccagtccttatcatgtaggaggatggctatttgatttgggggtctcctccagtactgagaatagagctgcctgttaaccacatgctcagaacctggaagagactgcttagcagtgatgtcaagatcaaccattcactcattcacacagttcgcaaatctgaaagtcagccttccttcagaaagctctttatgtatggctatcctcaccatcctttctatttccatggccctaattgttgctggctgactaatgctattttactaccacatttgcagtgcccacaaaacatttatactattctgccttttctaagcttctattgtgcccaattatctgcatcccaaattagaacttcatactagaggtccttgagactggtatataaaaataaaacaaataataagttggcaatacattttaagacatggtagaaataaagcatacaacatagagcctggcaagtgcttagtaagtgcttgcaataggagtgtttgatgatgatgttggcatagagatggtggtagtgatgctgttgttgctgatagagaaggagatagtgtttgggatgattaggttgggggagatagcattaatgatggtgataacagtgataataataatgaatggaatggttttgaaaatagttatgattagttggcactgtcaattatgacatattggatataatattagtgatgctgctgctgctaccaatatttctgctgctggtggtggtagaagtgatagtgatggtggtaatgattgtggtgaagatggtattggagagttatggtgacggagttggcactcgtgataatggtgataattaatggtgaaattatcttagcaatggtgattgtgatggtaagtactggagttggtggtggtgatggtgctcatgtcagtgtgtgtgtggggggggtagtatacatagtgttgatgatggagagctccattggcaataatgtggtaatgacagtggtgtttgtggaagtaataatggtaaaggtagatatggtgttcttgatggttaactcccaacaagggctgcaggaagtagggcagttgctcactctgcatattatcttcagaaatgacttaaggtagcatacattctgatttcagcacagaagggtattgtggtgtcctatacgcttagaaaaatgccaagaaatataaatggaacaaaaatctcaagcttaccaccctaggccctgtccgtggtcctgaaagaaaacagcagccaaaggctggtgggcaagtgagtcttttttttttttttttaatcctatttcatttaatatttgcaaccagatgtagaattcattgataaaaatttaataaaaaagttaaggagaaatggatacatttctagacttaaatagaaatcagaactcctgagttctagagattgcaaaggaggaaaaaaagaaagatttgttcaaacagatattggtaacagacatagtttgaattaggaattgggtttccaatcccttactattgtgcttttaagtcaaactgtattacacacacacacactttataatggttcatggagctaacatggatcacttgggaaaacactggttcttgcatggacagaatgcattcacctcacccaattcataggtacaattctaaggccaagtacagtgatattaggaagtaggacctaaggaaaatgtctgggtcacaaggaggtagcctcatggatggacttagtgaccttatataagacatggcaaagaagacataacaagaaggcattcggccctcaccaggcattaattttgtctgcaccatggtctttggtttcccagatttccaaaccacaagaagtaaatatttgttgtttaccattgtccagtctatagagtttttgttatagtagatcaaatggacttaagacaatttccttctgctgactcatataataaaccacacatctatctcatactctgagtttgttctctaattcactgcaaagaaatggcagagattgtctactaaaagtgagactctaggattgtaaccctaacatctcacatctaatcctggttctgtcactaataagaatatgactgtgggcaagttccttcacctcttttttgctcaaatgcattcctatgcaacaatagtaaaaaaaattaatattctacttatgtagtttttttaacacatcaaataagataatgtacctttggcccaaggagatggctcatgagagaaggtgtatgactgacaaacctgtgtttgatccccaggactcaataatggaagaagagaacctacttctacacataatggaagaagagaatagtcctctgacctacacatgtacacactgatgcatgttcacatgaacaattaaacacacacacacacacacacacacagtcacacaacagattaacagaaagtactgccacatagtgtaaccctgagtagggacatttatgatgataatgattattattaatcatgcctccatatccaagcttctatatctgcagttttaggaactatagaacaaaaccacaggaaaaaatatgaaagagcagttgcagatgtgtttgtaataaacacatacagacacttttcttacatacttcataaatagtacagcatcacaagttttacaaagtgcttacattatctcaaatactataagtcacagagaaagatgtgtataggtactgtacaaaacatgttattttatataagtgtaagctgaataaatccttcccttcctgtcttcatcagggtttgtcttcttgtacaaaacatcatgaccaagaagcaagttggggaggaaagggtttattcagcttacacttccacattgttgttcatctccaaaggaagtcaagactggaactcatcacagggtaggaacctggaggaaggaggtgatgcagaggccaagaaaggtgctgcttactggattgcctcccctaggttgctcagtgtactttcttatagaacccagggccagcagcccagggatagcaccacctacattgggccctcccacccttgaccactaattgagaaaatgccttacagctggatctcatggaggcatttcctcaagggaggctcctttctctgtgatacctccagcttgtgtcaagttgacacacacaaaaccagtcattactactgatcccttgtcaacttaacacataaacacatcactattaagcctcaacccttactttcttattcatccccaagatctaaataactttaaaagtcccacagtctttacaaatttttacatattaaaatttcaatccctttaaaatagccaatctcttttgaaattcaaagtctttttacaattcaaagtctcttaactgtgggctccactaaaatactttttcacttcaagaaggaaaaatagctgggcaaacagtcacaatcaaaagcaaaatcaaactctaactgtccagtgtctgggatccactcacaatcttctgggctcctccaagggcttgggtcacttctccagctttgccctttgtagcacagacgttgtcttctaggctccagctgcctgtactccactgctgctgctgtccttggtggtcatctcatggtactggcatcaccaaaacactgctgtcttccgctgtaactggactgcactttcacaatagcctttcaaaggctcttttcatggtgctaagcctcaacatctctgcatgactccttcagttctgggccttcacctgccactaaggctgcaccttcaccaatggcctcttctggtctctcacagtgccaagaatcagctgctaacccttcatgtttcaaaaccaatatcacctgggtgactcttatacaagacaagtctggctgccaacatgaggtacagccatggctgcctctggaacacagcttctctgtactctcaggaaacacttcccagaagatttcaccttagtgatgctagtctcttcttaaccactgctaatttcttaactctagctaaccagtatcaattgccccagtaatgcaaatgtttagcttaagtacttatggtatcttgttaatcacagctgattcttcaacaacagctaacccaaaccttcacattcaaaacagcaatagccctgattacagtctttaatcttccctctgaaagttcacaagccaggccttcattgtttgcaatgttctcaacatgatcttccaagctcctacagaacatcctacagagctctaaagttccttccataggcctccccaaaacatggtcaggttgtcaaaggaataccccactccaagtactagtttttcttaatcagggtttgtattcctgaacaaaaccatgaccaagaagcaagttggggaatgtaatggctatttctggctgtcaacttgactatatctggaatgaactacaatccagaattagagggctcacctgtgatccagatcttgaggctgaaagacacaagtttctgacctatatcttgacatggagatcttgaggcataatggccctgaaaaacttaggcctggggaaggcagtacatgcctttaatcccaggagacaaaggcaagggttctctgagttcaaggtcagcctgggccaaagcaagtcccagctcctggtgtggtggtacacacctttaatctgggacacaccttctgctggaggccttcataaggacattggaagaagaaagattcattcttctttacctgcttgcatttacttgccagcacatctgttggtacctacttctacaaaagaccagctgaaacaattagccttgtggtactgagcaactactagattcttgggactttccattcacagctgaccattgttaggtgttttggactacagactgtaagtcatcacaataaatttttgagaaccctaactaataaagggattttaacatgaggggatatgggcctctgcagaggtcctggagcttcctcccacaaacatacagaagttgcctgacactagctgtctttattgccccaagtcaggattaacaaagaaactggtttccctccttccctagtgcacctggatggcctcctttctccttctttctaatatttagctcctcccactctcttctcaaaagcaaaagctgtggaaactttgtttacacaccaactcagtcaagaaaaatggaaaagaactcagcatttcttcaaatgggtgaaagtagatatcacacaggccacaatgcctctaaaaactgtggcatgccctgtgacttccatctatatcatatcagagtagttctaaatcttccttggacagactcacctcccccctccagctgcctcaccatccctctgtcagcctctgtggattacaggagattcagagctctcaaagttgaatggattaccatgctagagctagggctggagacacctttgacaaatgtgggctgtcagccaggacccaaaaactcttaggagtcagcaagtgcaaatggccttcttatcctaagctttcctagacctcgctgatcacctttcttccttcagtcttctaagcctccttcaacagcaagaagccagaaatatccctattttacagaaaatgtatctgtgggaactgttgtgacttaaaactcacacagccaacagctaatgtcaagtctgtgataggcagctggctcttaaggcagtaggggtcagtgggcaaggcgaatgccaagaatgtcaccaaatctcaatcctgccacctgctatcttcatgactttgggaaaatgactctaacaaggaggacttgggtcccacacctttcatctggaatatcctttatctcaggattcttgagagtgaacagcaatgtagcacaaagatggaggaggatgctggcaccatcagccctattgtcagctcagtcagtcccattctctcttcaatatactatgtcacatggaatctaaactaagggaggcagcaacacacactggcttcacccagactccctgcgacttgctgtccttgaccagcacaaccttgcgccggaacctcagagagctcacttagcacatgtgatttccctggaggacttttaatcccatgctggcctggatcaacccctttggcactttcccagacctctaaacctgactggcaagaagtctgagcatgaggaatggagttcataataacaagcaataacccactcacctttatgtctgatctatacaacactgctccttgatatatggtatcttggcaatagtgggtcaatgagacatgtcgatttccataagtaatatgtccatttccataaacaaccatccctgccttggctagatagaacctatgtagatgaagtgatactgaagagggaggcagtgaaaggcatttcataattattgatgctcatagcaccttaattctcatttttacttagcaaataggagtgaaaagacagataaactgtgccctctctcagattcccctggatagtgctttgaggccttaaagaaatatgtttcagattgtgtgatcatttggcttaccctaactgccagtgtctttcattcaatagataagcaagatagatctacaattaattaaatggtgctgtccactaagatgagattcactcacatctacaaatactgacagtaccaggcattctccaagatcatatacccatgatgagaaatgggctctgctgtcaaggaagaagagctcaatgtggcagaaagattatagagacggttataaaactgtcgtgagctaggtagctggagctgcaaaagagcctacgaggagcactttccctaaatgtgggatctgaagatgagatttgagagttcagtaaggaggagagggaagaggacatgagttgtcatgcatcagagaagccaatgggccaaaccccatttgtcaccaagctaagggatgtgaaacaatctaaatctgccctcaatgcaacagctcccaccctcacccaacattatccttggcttggccaaaagctgaggcagagccagctgctgcaccttctgccaacagcatggtgccaggtgaggtattctgcccaggaggcactgagaatttgatgtcccttgctagctcagctctgaaacctcctccccacctgttgctgtgacattagttggtgtcacctgtgtccctaagtggcagaatgggaagttttgccatctgcctacccaccctctcaggcgtggggcacagggggggctggaggagctgggaggcttgacgaacagacgagcagagctcatttgcccatgtccatgggtgtgacagcaaggaagtaaggagggctgaaagaagagaaacagaaaatgtaaaagaagaaaatcagcaggctcagaagaaagccatttaatacagcctgattctaacttctaaaaatccaaactaatgcaaggagattcaagactcatttaacaataaacctgtgaggtggggcagatggctcaatagataacgtgcttgttgcacaagaaagtgggacccacataaaaagcaaagtacctgtaattccatagctgggagtatgagataggagggcccatggggctttcaagccagctggtatagacaatttccaaactttgttttcaggaacaatcattgcctcaagaatgaaggtggaaagtaacagaggaaggcatctgacacaacaggcagacagacagacacagagtcagagacacaaatgcagacacagacatacagatagagcacaagccctcaagttggatgtgatgatgcagagatctcaagtgatgcttggtccaacccaccaagtatcttttccaccccaatttcttctctacattctcttaggtatctaggaaaaataaaaccctgtcccagcactgatgagaaatctggacctgtgcccacaagcaataaaatagaattcttctgatctcaaaaggaaagtatattcaggccccgggcaaccccagggacttagagttgttctcaacccttgcatgcatctgattcacctgaagagaattttgagagtaaagatgccacaggcatacactctcagattgagatttcattgggctagcaaggatttgagcctctcaaaggctccctagatgatgctaatgtgtatctaagactgagagctgttaggctatgccaagaagtctggggcagagaaagaaaaaggatagtctctcagctctagatgccattaactgcagtgccaagtatcacacctcaaccccagttcccatagtatcagtgattaagcagtgggaaagacacagctaaacttggtgtataggtgttaaagtcagtgttctcataggctaaataaagtttacaactggaaaaacaagaaactcagactatgtcaagtttgagtcccaaaatccactggtactctccatctccattatcccaaccttagctccacgtcagaaaccagagtggaagtgaaacagtgaagacaaactggctgaaaggatgtggaagagagctgacaagaagcagtaacaggctgaggatagacagaaaagcatctttcttaaatacttcctgggagccttggcaagggatctttttattgaaagagcacgtggaaggaggtatagcaaagctggccttgtctggcaccatgacaacaatgtagtgataatacaggtaccttagacaacaacagtcatcacctggcttactcatcaatgaaagctggaaagaaggctagagggtaggagatagagaattaaaaggatggtttatggaaagatatgctctttatatgtggcaacttatttttttaaaaagtctcaggctatttttttttctttttcaaaggaaagaaagaaaatctggctctattggaacagaaatcagtcttgcctgacagtatttaaattgaatgtctgtgagcctggcccagaaattttagtgaaagtagaagctattaaaaaaaagtcaatgcaaaagattagaatttagaatgctattctaataatacccaattctactcgatttcaaatggctgtcattttttaagctccaccaatctgaagacacttgatggagagtgttcagagcttggtgatgaaaaggctggatgtccaggttcatctcagcagatgcacccagagtagatattggttgctttttcatgaattactaagaagatctggctgggagaggccactctgagactgcttcttcctatctatagaacaggaacaggcctttctggaaattagtaggaaagagatcatttaagctccatattgggcaagaatatatcatatacacactacctatgctaggccatacttctgttacatcactgattaacaagctatctccttctacaagcttctccacttgcttttctaattcagagggccagttaacaagcatttaaacgactcaatgataagatagtgtcttcacaggatgtttcacaaccctgaggcaagtcattggtcactttcctagacctaccaccttgggaagcttggcttttgttccatatatctgacagtctggctagcatataaggactgggactctaataaatagctgccattctcctatccaaaatactccttgcagtaggggtgttaacttcagttggagccaaccaataagtatttaccagacagtatgataaggtacaaatggtgaaatcattggagtatttcagagagaaaggcaagagaaaaaaataattgcaagtgaatcttcagaaattgatttgctgtcttcactcatcaccattgtcactgtcactctcagtgttgctagcaagcactttccactcttcacattccgaacacaggaaggctatatttccctgctccctttgatattaggttcaatcatgtaacctatctaggccaatgatgtgtgttcgattatattgctgtggtaaaaaacacgactaaaatcaacttagtggaggaaagggtttatttcagcttatatttccaggtaataattcatcactgatagaagttggggcaggaattcaaggaacaaacccagagcagaatccaaggaagaaggcagcctaatgacttactcaacaactcatgctcttagctttcttatatagcctagtcttacctgcctagggatggtaccacccacagtgagctaggcactccctcctcagtcatcatcaagacaatctttcatagatgtggcccataggccaatctgattgagacattttttttttcagttgaggttcccttcttcccaatttactttaggttgttccaggttggcaattcaaacagatgtggcatgtgtcacactttagctgtgaaccattcttcatgctttcttcccctacttcagcggtaatggagacacatgttaaaatgaaggctttagagataggaaatgtagagtccagatgccctagttcccatatatcctgagcagtgtgtgaagcaagagcaggaaatagagcttcgttgtaatgactaccgaggttgggggttcttttcctactggagtgcatccttgttgctctgggcacatcagtaagagctgcagcaaaatgtctgtaagggatggcaaacaatccagaagagcctcaggaaggaaaaccaaacaagaattctatctccttttggtcacagactgcactttgctccaaaacttgtctccattccactccaaaaatggactccctgtgttggagaccatagattcctaccttttgtgtctctgtctcctgttcaaacctgtttagaatgcctttgtgcctgatagaaatgatgtttagttaactcagcctgtatctttagctcaacaacaccttagaaatggaaccctaatcaactagcctgcagtgtctctcagctctgcagtgagagtcatctttatcatccaaagtcccctccagccacacagcctctgcctctgtcatgcttcttacttgggctgcctctccttcagaaccagttctcctcccaccaggagtaccactgtgaacttcaccctgacgcatcccataccacgtgccctgaatatggcccataataaaaacaatgtatgttccttgttccagaaaaagcaggtctctttcagaaaagtgtattctcaaaccttgatggcctccattgtgacagagggcccaggtctgatacagaaaatgaggtgatgcatgtgaagttcctatctatgtacctggcacatagtaggtactcaaaatatgtgacaaccctccaaacttaaaggatagatccagctcttccctccccaggcaaaatgaccctttgtccctgactcgttctacataggagcaatgtctcctctaaactggaaaacacatttcataccttttatgtacaagtacagacacacagcatgctagattctgcataaaaggagtgcaatacttaatgcacttgtgatattgaaatgtcagtagggagcatggttagaggaaaaatgtgtttaccaagaccccatatgtgggccataatgaaacgagctgaaagacactggtctaaagatatcaccaatccaaacacagctagtctttctgggcctcttcatctgagtctcttattgccattccttacatctcttctctcaattgtattccaaatcagtaaaatatttcagaaaaatctgttaattagacatatttccctcctctatacccttgtcagactctgtctttgctgatatatgcaggtggctatagggaaaataagcactcaggagctaacagactggtcttgattttcaagacatgacatgtggaactagttcatatcatttccagcaacaccaggatggtagtgagtatactgcctcccccatattctcataccaggtcaactcagaatggtcaagaaatacctgtaattaccaaaagaattaattgcttctccttcaagtaagggttagaagtgagtctgggcctacaatgatttgttggaatatagtagacactacagtctgcctcctctgtaggattcccaagttgtgttgtggatagccctggggctaattatattagatgttaattccgtactcgtgtgagtggcttcgaacaaggaatgagttagcactcaggtgatttcctgtaaacctgcttcccaccttaatttgtaaaataaaagagagctgatggttgggcagataaaagtgaaggtggagctgaaggtgaggagaaagaagaaggagaaaatggaagaggaagaggacagagaggaggaggaagaagaggaagaagaagaaaagcagagcagaagcacatggctcggagaaagttctaaggggtctcatagatggggaagatggtagtgtagcagtagatctgcccaatctaggtgcacagcatgtattcatattaattgagtcctgttttcattgccagggcttatttgggttggagataccacaacaaagctgtccttcctaaagacttgaagactcaataatcacatggcagcctctcttgcagctagaaatatggaaggtcatacatagatttgtccagaagtatgagagacaaggaagacaaaatagcttggtctgatattgcccttcccctcttgtttccacctctaaaacgttgtgaagctgcctatctctcaaagagttgagaagatctagagatgccacctttaacatgctagcgtagcagctctgccttctccttgtgagggaaaaaatgttctcccttaattgtagctaaaagtctcttaactaacactgaattcatgagtgagaggcatagagactgcttgtgtctctcagtatctagggtatatgtggcccatagatagtttgccaaacttcaggccccaggatcaatgcccctttgcaatgggctgagtatagcatcaaatggacccaggttctagcctgacttcctacaaagctgcatgaccttatgtaaactttgcttttctaaatatacatcattttttttactacaacgtgaagttgaccgtaatactttcgccataggagtattgcaaacattaatgacaagtccagggttgatgacgaaatcaatgtcatcctccagcctttgtacttattagtggtcatgatggctctttaatttccctttacaaatctgtgtcttgagtttgccttttctatttcccgtttgtttgtttgttttcctaaaagctttccagttccctgacctctctagctcttctcttctccctttctgttttttatctctcatgtgtgcttctgtctgcccctttcaccatcctgcctcatccctattgagactcattgtggaggcacaaagcaattcccttagagcacagtaccaaatccccagaaacagcaggccctgccctctttggaaacaagggctcttgctatagccactaggttctatggctgtgagtcagaggccacttcaacctttaacttcaaccctcaaggtactcacagtgagtgtgggacattcttccaaaatatgtcatgcccttgaaggtttccaaagggcagacaggtcctggagcttgtgcctgactcagcctctaaatctgaaatcagatcaaagtgccagggcctttcagcacctcactgtccctctgtgctgagggtcttagcatactgccactcgtactgccactgagaattaactatgggcagggaataagttgactttaaaaataaaacagcattagacaagtagcaagtcctatgctttaccattttctctgtagagactattggcttagtttccagagaggcatcacagaatcctgtcgactctaagaaagccctgcctgagtgaaatgtcaagactcagatgtgcccagacctgcacaggtctggcatgacagtaatggggaccagagagggcaaggtcacatcctgtggtggagagaggaggtcctagtggaaaggaggaagtcagaaagagatctactggtctcttacagctgtggcccttcccaacaggactcatagcaagtgctaaatgcacaggtaaaagttgcaggatgcccaggacctacctacctcctagccttttccagggtactttaccaaatgccattgtgttgtgtttagaaggtatccatcttgcctgctgtccagatggaaagcaaggcttttacctcaaggccgagactcaaatcatggatactcctcccctctctaagttcctgccatacgagagaggcagcatcccaataaaagaaaatggctaataatcaagcaacctctttgtggaccaagcttccctgaacactcagtgggctgtgtcactgagatcctcacaggtaccctaagctttagtcctctctcctctcacgtcacaaaaagtccacagggatgatgggatatgttcaatgtcacacagctattaaatggagaagatactattgaactctggtgtctccccctttcctcaaaacagtaacattgttgtcagaaaaaattttactaattatcaaaatacatagcaattagtattctagtcgctgtgctaagtattttgcatataatagctcactaattcttctgtgcctgtagggtaactattagtagtactcctgttctatgaatgggtagaagggccaagggatgcacaatctagtactgttatgatctaagatgggaagtgtgtaaccccaggactctcttctgcatagcagtcatggcctttgccctttcagggtcagctcaacaccactggtcattttctttgagcctgtacaggctgctatcactatgaagagtcagttcaagttcacctccaggcctcgatgtgtatgccaccacccgaatgttttttctcaggaaaaaaaaattaaaaaaaataaataaataaaccataaaagctgctcttatcagaggccaaggctgcttgcaaactacagaggtgacatgaggtaaattcatttccctcctgtcaaaagagactcaacaacaaggctataatcagaagttaatgtgtgtgcctgtgattgcaccatcacaggggtggaacataattgaacgagttctccgtgcttggaggagcacagcaatgccccatcactggcaagtgtcactcatctggtcagcccatcttggtttttaatacacttatgaaaatcttgccaaaaggctatgggaaggacagaagcctgagggacagggcctcctcaggcctcggaaaacttgtacctcaaagaaagaccttgtttccacatagcctggccactgtctttacggcctctcctctaggctcagtgctttatgattcctgaccctacatacaaagcctggtatattccatataatccccaggctactttagctgagtagtaagtccagatcctgaggtcatggatgacccaaacaagggataggctttctttctcagaagttagtaactgcactctctttgttttgttttattttgttttgttttgttttgtttttttggtttttgagacagagtttctctgtatagccctggctgtcctggaactcactttgtagaccaggctggcctcgaactcagaaatctgcctgcctctgcctcccgagtgctggaattaaaggcgtgagccaccacacctggcgatactgcactcttatcataaactaggcaccttactgagaattataaaatgtaaagagatttatttttctgaggtcacacaggtagtaagttctatttgaacctgattttacagttcatcttcttaagtagtccttccaattatcctgcctagatgagatgacacaactgtaccttggagcatggaggaaggaatgggaggagccaagtgtcttgctagccaatggcattcatcccctatgtgcttctgtttgtgtgtgtgtgtgtgtgtgtgtgtgtgtgtgtgtgtgtgtgtgtgtagtatggggagggggcaaggggggcagtgtaacaaggtcttggaaagccctgattattcaaacacttcctatgtagctgaagatggctttgagctcctgatcctcctgactctacctcttagtgtaaggatttcaggcttgtgccaccttgcccagcttatgtgcttttgaggactgaatctagggctgtattcatggtaggcaagcactctgccatctgagctatggtcccagccccaatcactttcttttcctattttcctcaatatctttcttgccagatactgttctagaaactgaggatactgggtggaacatagatcatgcataaagctaccaaaaagacattttcaaaaaattgcaaatatgttccagaaaacaaaactgaagcaagaggcaccatggcaggaaaagggtatgaaagttatttttaaaagtggaaaaataatttgaaaactgttcaggagcaaacctggttaagactaaattttttcgttcaaagacttctgattatatatatatatatatatatatatatatatagagagagagagagagagagagagagagagagacctataggagaagagagtgatgaggtcagaatcaagatccttaaagatacaaaggaaggaagctctgctaccttgtacaatctaaacaccagagcaccctacacagagatcccatcatcatctcagactgatgcatgtctctggggttcccacatcctgtctaaaggttggaaatgggacatattcaggaaaactggatcattctgtgagcctcactgctttgagcacaaatccaaaaggcacaataatggagacagcagagacggtgaactttcctttcctaggagaggaaccgagccaggctgagtagaaagtcagccacctactaacagggaactcttccaaactaatgacccttaatttcaattcaattcagaggtgagcggatcaggtgaaggaagagaagtgaagaggattaataaatatatcaaggacatttggtcctgaaaacttacaaagatgaattcatttgtgagacataatgattcactaccagtagaagcaattatcttgaagtttatttggcctcaggatcaatttttatttaactgctcatctctttcctggaaatccaaggagtcggtctctccctgactgggtctctgtctctctctctctctctctgaccaccctgccttccttctcctcctcttcctcttcctcttcctctctttcttcctttttccactgtacattggtaaattccaatgacttgttcatttctcattttccaacagaactgccccctcccttcatcctctctacagagtactggtcctcacccacagtcacttatttcctaccatcctttgtcactgtcaaagcacttgttattgacttaactttacatactgattcatatgctttggggagacctggctcttgtactgagaacattggatgagtaaacacaaagtaccaacataccacccctcactcccagccccacaccagaccaatggcagccaatgaactgatgacgtaaaggagtcagtgggcaaaagacactgaaagtcagctcacgtgcctcccaatctgcatgagtcctcacagcaacctccctttatggcagctaatatttccactttacatatgaggaaaccgaagtgcagagtctaattaaggaccttgctcaaagatgcacagatagtaaataacactggcaggatttgaaaccagataacctgattctagaatcctactgttctgacttctgtatttaggaagtaagtgttgactgaggaaattgatgagtgacaatggatgtttgtgggttcttgttttgcttctggggatttaggacatgaccccaaacttttacaataggaccgcaccctatcccatcagccatgcccacagtaggacctgttgaaaggtgagcactcagagccatacatcactttccaactctgcctccatgacttcaaactatgcattagaatcttcatgagaaaggccaaaccgaagactctgaaggaggagtttctgacttagtgggtctaggtcatctggcttagcttctttccaccaagaaactgaatcccagtaacaacatgaatcagaggcttcatgccagtgtctacccctcagcccaacagacaaaggcaaaccaaatttcccaaagaaccgatgataggtcatagaatggaagagaggcaaagaacaaagtcttctttctacttggccagtagaatggagataagccaagggggtgttaagtgagatatcatcgcaggtcattggtacttaaataccctgctctgcaatgctctgttcccaactgtcattgctctgacttggactcactgaaggcagctctatattcacagcttaaacaacatgtgccacacagtcagcattcagtaaataattcccagtgaatggataaggtatccccatcccctacttggttctactttttcaaccacctcctcctccatgacttcctggtgacatctgactccatacacagacacacctgtggacccactgggcacgttcctggactgccgacatcagatgtacgctacaatctcccagggcagggatgttttctatgacactggggcaagaaaggcaaagtgggggtgcaaaggaaaaacagtggaagctgtagaacagtagagtgctaaccagcttttcttattgaatctgttacttcacagactcagggcagctccaggtgatgctgctccactgagcaacttccagagcagtcatgcaagagtcaagtgtgcttgcaccaccgtgaaacaaaaccatgccggctacttagcacatccaaatcaattccccctcagctcttacccttcactctgaaagtcaatttagatgagagaagcatgttggttactaatcttggactctccttccctcccttcttattaaagtgccttgcagctgtacttccggtcatttgttgtgttcttgtcccccagtctgaagggcatctcatttggtaatggttaactagaattctctggagaattcagatgaggtttgcttgtatcctgctacactcatctctcctgcaatcggatgggaaccctccactcaactggagaatggtgggatgcctccttacagtctcttgcaaaaatgtctcttctaatcaccttgactgttaaatagaggaacagacccagccaactgtgtccaaagacatgggaaaccatctgtgacagagttaacacccctaaaaaatccagaactagatgtgtgctgtattctcttggaagaggaaggttagcctcaggctcaaatgaaagcatcacccggcatagatatgatgaaaatgtccatcacaagggcgctgctgctcatggaaagtggtgatgtatgcatactacaaggaccttagcatggaactgtaaagaggagtaatacacaaaggtatttctataggtcacccctgccagggtttgagtctcaatgccacaaccacattgtaggctttctgaccttgaatgagccacttattctcacagagcctatttctccctctgaaaaatcaagagtgcccatctggtgctggtgtaaggatcacatgagatcgtagatggaaactacccccagataaacgtaacaaactgtcgttgtttctgacacttgccatgcactaaataaatgtgaggccttttacttgaacctggaatatattgcagcattatctggccaggggctacagtaaatggatattgttgctcatatttcacaacaaactgaagttcagaagagataatgatctgtacaaaggcacaggattgggaagctagggaagtagattgggatttgaactcaggcctccctgacctacagtaggagaaagaatgttggaggaacctcctaccagagctgcggttaggattcagtctttgggtcccagtgtcaggagctgcttcactgacagctctgcaaagaagattcaggaccttgggctctgagccagcatcctggggctgagttctaaatgtgatgatgtgtgagtccagctgttgcctctgctgctcaggtatgcctcccctcccacctctggaaattgaggagttggaacagtaatgtaacactattgagagactgagtgaaccatgctgctttgggaaccttcgtccacttcttgaggggaagtcagtaaacatgcctggcaggctgctaagagctttcaacaaatgatacccggtgatactgctatcaaaaccagccagcgcacagagaagttatttcagttccgaaactacaccaccgagtatgattaaaacatctttcctcatgatgatataatatagatgcattttagtggccccttttagagatgaagaagccgagacatgtgatgactgggttacttgtgcaaggccacaagatcctgaaaacttacaggcttgtttacagatcagcccaggtaggcacatgtctgcacataccttgcagttttactaggaaccactggaacaaacaggaaacaaacaaacctctggaacttgtgggaccttcaaaacatgaatgcaaatggaaaaaaaatcacaaggatgtggtttgtagccttctatgtactttgaggggagcagcatacccttcagtatgattttagaaatagcatgtccctttactctatacagaaacacctgtcatcacttcttagaagtactaaacacaggtaagacaagagaaacaggaggaatacgtagccattgccttctgtctatgggccagaccaatacaagtgtgcctgtctgctggccacatgctaaacagaattccaagaggtcctggaaaggcagagggccaggaaactcaggctgacacagatctggcaagctgggtaagagccaggttaataggcctttgaatgcaagtatagcatctagttgggacgatgggtactcgcctgtgagaaatgacgctttcatatctcttacgccagcatgctcctgaaatgtagttctgatacccttagcagatgagtatacagaagaacatactgaatattccagtagggatctgacaaaccagggccaaatccatcagttatcaaacttcccaagtactcccaggaatggccacagatagacaagttagcattctgttctgtggatgggctgccactattctttggagcacatctctgcaatgctggctgtattcaaaacagcggtaggattctagacaatacttgcccatactttccttgcctctcagcaaatctaaaatctgaggctaaatttattgaagctaaatactaaaaccggaaatcttttcaaaacattaagatggtattggccttagaaaatgagctccttcactctgcaatcacttcctaatgcagtcctgagatgctctcatctatggtctgaatggtgtgcctccagcttagatactagcatctcatcacccatgtgactgcattaggagacaaggttttgtagaagcaatggggccaaaggtacagagtccctgtgaatgagatggggctctaaaggcctactttgccctccttcaccctgacaaaataagttatcatctaagaatcagaaataaaggccttaccagaaatggaagcttccagaaccttgaccttggactcccagcaccttcagatctggaataagtttctcttgttcataagttgcccagcctgtggtatctcgtatcagcagtcacattgaaccaacactccttatctacccatgtgggcataggatgatgtaaggaccattcttatggtatacctaaatatgctgggagccagcatgttgcattcaaacctgtaggtgagttcacaggaaagctagggctagaaaatgaaatagtcccttttctcctcgtcctttttccccataagaatatgatccacagttctttcacattagggaacaatagagaaatttttagccaaggttacaaggaagactcagctttggttccctggtttcagttcagattaaggccacaatggagcacagcagccaccatctctgagatgagaaggtagtcttttcaacttgcagggcctaagatcaacatctgggaaaattggctactgctaatttttaggaggtttaattttcaagtgagtcatacattgtatctgcccatcactcaggcctgaaaacaaaggcacccagaataaaacatgtaatagacacaagaatgaatgaggctgcaaaagacaactattcatctttgtcaaagaaacaaatgcatctgctctatgatgcctgcagctgatacctctagtcatggtgagagtggttgaatgattagatggaccttaagccttgaagctgggctggatagggacggagaggtacttgaagctaagcaagagcatttaggataggctggaaactctcacgcacacctttagcacacagtccaagaaggaagctcacatatgctcaagagagcccatctagcagtcagtgcttgctaattctaattttaaccccccagaaacctacccagaagtcaagtcagtttctattaatgcaccagggtggtagagatagatcacacagcgaagctcttgccttgcaggcatggggacctcagttcaattactccagaatacacatgtttttgttctgtttgcttgtttgtttgaagctgggcatagtagcttgcagtactaatctcaactctagggatacagagacaggcagatccctagaacttactttcttgcctacatggaaaatgacagatgagtcagagactctttctcaaaaataagttggacagcatctgaggagtatgagctgaggttgtcctttgtcccatacacacatgaaggtgtacacacattggcacatacacatatacaaaagaaatatactctgagctaacgagtatattacgagtcttgaaatgaccctactcaagattccaaaccctcctgcgttggtgatcttccacaagtccctttccctgcattcctgtcattacagcattttcttgaactggattcaacagcactggcgctattctctcctcctcgtctgtctccttcatgccagggacagatagcctcattagcatgctcacagagtcactgtgaggctctcagagtcatacctgacgattgtcaggactcagtgtgatgacgctctggggatgaagggattgctcattggtgactcaagggctgactcagctgatgggggcggcctgtgggggtgggacattagtccagcaggctgggcttcaccctccctcccttcaaccacagcttcttagctgtccctgctctatctatctagttaacatgtcacgtgaaccaagattctgaatgactgaaaataactccagaaaccaccaagaagaggcttctggaagattttattcaagtggttgtaaaaaaaaaaaatgtaagtcatggttacatttactcctgagatacattgagagttttcttggtggtgatgctaggggaaaaaaaaaaaaaaacaactcattttcatgagatcaactcacatagagatgaggaaaagccaaaggacacaaaaccaacatgaccctatagcaagttgtgattcttaggaggccttagtacactcaactaccataatgtttgggggaaattatcttcttgttctgagactctagcctttggaagaatctagacactctgccagactccagcctgctggtaagccagccatagataatgcagaacaccatgtcccctggtacttgttagcagttctgagcactgtcgtgcaaacacatcatcccttccatgacccaggctcagtcctctgatctcagagctctccaggcaggtaggatgcttccctcttttcatcagtctatccagccagccagtgccattcctgtgtttcagccagtgccattcctgtgtttcctctcttccaaaactaagaaaattaagaaaccttgtctgagaatgtgaactcaactctgcaaaaagacttaatgagtcactttcaaaaataggtctagagggtccccaagagagacacaggcctcttgcaatattcatgcagccatgttcatctcctcggatctattatcactgagtaatctattgacatttaacaatgaaacaatagcaaacaatagcccccggctatccaaaacaagtctattcttccaataatgtctactctgtgttttgtgtgtgtgtgtgtgtgtgtgtgtgtgtgttttgtttttttttttttttttggttttttttttgtttttgttttttttttgttttttttttgttttttttttttttggagctgaatgactagaccaagttatgtatagtggatttgtccaccagagtggtccacaggcagaaaatgttaaattcaggttgggtaggattacttcaaagtgtttgacaggtgctgacttctcaggcactagattctagtataaaattcttccatccagactttctcacttcacccaagacagtcaacaatgagggaaaacatgcattgtgctctcaatgggtggtgtgcatattaggaagaaaattactcattgacattctctatgatgactttttcatcttttcattgaatgttgatgatagatcaggaaagaagctatttctcctggtctaaaggtggattgatgatgggaggggaaacacagcagaaaaagtttaaaaaaggctcttggtggtctgtgatactatgaatcatacactgtggatgctttccaactgattcctggcttgaccaccattctccattaatggaaatgtttcccacaaaggcaatcacacgtagctagtgaaaataagtagtgcaaataaggactagaacttttaactcggtgtgtgtgtgtgtgtgtgtgtgtgtgtgtgtgtgtgtgtgtgtgtgttcctcatgtgtgtgggcacatgtgttacaggagcatggacacatgtatctctagtgtcattcttcaagaactgtccacattggtttttatgtttgttcctttgcttgcttgcttgcttgcttgcttagttgttagtttttgatacaaggtctctcataattctggagctaactcattacgctgggcgggttggccagtgagccctgaggatctgcctttctccacctcctgagacctgagctataactacagatcacaaggcattggttttcttttttacaattagttctggcgatcaaattcaggttttcatgcttacctaccaatcactttacaggctgagatatgcaccctacccctaacatgttattttactaaaatacaaataacatgtcacatgtttttaacatcgctatattaaaaagtaaactaagcctaaagctcagaaccttaaagtctgatgtgtgctccttgatctaacaaagcctgttctttctgggtgagcactgcatatagctatgaatatgggggaaaatgatgtaccaagcttcttgctgctctagcaaaagctattcctgaacacccctctaggtactagtacagagcatccactgggaagaagagaaagaacttggagataaagaatcagccaaagatagagacatattagaagcaaaatagagctgcagccctgccaacaggttgttaattcagaatgcaacagcccttctgacatcattggaaagccaattgccaaacggggacatcagtctcttcacgtctgtggcaaacactcccttgaatgcaaaattacaacttggtgactatttgggatccagccctctatatttttcatgaagcttaaaggagattaatgggacaatcaagatattatggatgaaaaccacatgcatttcaaatgagactgtgacaaatagctgggaagcctccagaataggcaacagaaaccctgaactgggaaacactttaccactgcatgtatcctcatcctgcaatttacccctggacataaaacacagagaaagagcataaagcctttctctgagatccacagaacaggaaaggacccttgtcattaagcaattttaaggaccaaggggacagtgctggcaccaagcactacagaagcatataccgctctgttcagatgaatcccattattattaagcagttcaatcaacataataattattataatggctggcatttatcaagagtctgttatatgctagataatctatatgcaatgactcttaggttcttggcaacactccatggtgttatctgtttatccatacttactgagcttagtaaatagaaatgcaaatattttctacatattatgcaggagaataggaatgtgtgtgtgtgtgtgcagttacctatatcattatatatctaatcaaaatacaattatttgtagttagacattatacatatattgtggcagtctgaatgagaagtgtcctctacagtctcaggtatgtaaacacttggactccggttggaggtgctgttcaggaaactttaggagatgtggccttgttggaagaagtatgcctcactggaggagggatatgagattaaaagcctcatgccatttctagttttctatcagcttcacgcttcaggttggagaagtcagctctcagctttctaggcacgtcacaaatcctgccacttgctgccatgctgtccccaccattatggactttaaccctttggcatcagaagccaaaacacactgtttcttctataaattgtcttcattgtggtgttctaacacaacaacagtaacataactaatacatatttgccagctggtagaatgaggatgggcccatccagttttcacaaccttatgatgtggacagtgtctgattccaccatccactgatgaaacaactaaggacaaaagtagctgccatcctctacccacctagctaaggggaaggacaagagggacggcacatgttgaatgaatgattcagccttgctccatggtagagtggggcctgcatcaaggcctagattaccaacagaacagccagcatgcaagggttctttctccccatgagacattactgtttcttaataagtgatgatgccaggctgatagctacctccaatcacttgccttttcttggctaacatatctcaattgtatttcatacataacttgtcacaatagctaacagcctcagacacttttctcattatcaatggaaggcattttgcgaaggcattttggaaaacatttccttttttttttttttgccatcctatgactgaaaatgaatttagctaccctgctacagagaggggggtggtggtggccttataagtatcaaatcacctgtcttctttgaaggtacatctgaatgagtccaaggacagtcattgccacaacatttcagatcattctgtgttcctcatgccattatgctacaaactttatcacaaatcaacagagaagggatgttcctgggcaaagcaagagaccatggagagtgacaaaggtgggcttgccatggtgaaaaccagcaggtaaagtacagattgagcattacgatcagaagtcagtgacacccacctccttgacttcccgggaaggtgagactgcatgggtgtaaacatagaccttggtgaacatttctttaatgccttcctctcagtctggatgtcgtctcaggacctaccactcccttcttcatgctgctaataccccagattccatgtaaggatcctggcagagcaaggacaaccgagtctctcaatgatctctagcctatgggaataaggattgtttggttcaggggtggtcacatgacccgagccacttgggctggggttgctaggataaaaatggacatctttcctgctgggcattataatgaaagtatacaacagaagtgtgtgacctccacaacgtctgagccccacctccaccccaaaactccactatgtgatgaagacatcatagttttagagcagacaataaaaaggaaagaaatcagaccccgagaagatcctatctagccaacagagcaagcagtccctaagtctgttcaagtctatgcctctccattagataagatggtaaatccttttcccattgcagccagcttgttaggtttctattctttgagaaagaaagcacctgagccaacacaaatgtgagtccttggggccatccagctgaggagtgaagagacaaggtaagagtgatcgcacatgtccttaaacctaacagctctatctcagacaagactcatgcccttctccgttaaagaacgggctcttcccacaccgtatccacaagggaaacccctactcacctatcaaggcccagctcagatgtccttttcagtttcccacactagacttggggcaaaattaatcacttccttctgcttcattcccactgaaatgcattactcatttgcaagcacacatagctcaggagtagagaacatatctttttcatatccacatacatcaaaccacacatagaacatggatgctgaaggctctgcttggcatgaatttagacagccatatgccactcctacaaaataggcatgagtggactcttattaagacatggctttacatgtagtagtcaatcagctgcctggggcactagcaagcatatggcaataaacagttataggaatttcattgaaatttgtttaatgaaaaaataaaattaagttgataagacaatagatttaaaactcttaccaaagctgccagctcagtgatgacagcccccaaattaccatttagcctagaagacacacataatctcttaaatctatggttgggaaagaaattggtgtgggcttaaaacttgtctttgccttgatcataggatcaaatccatgttgtcaaattgggctctggaggccctttcaacattagcaacaggatggcaaaagaagcctgccaatacatgtattacaggaagggaaatagacaaaaaaaaatgttaatgtaaatgtgggtcacatcggggctggctcctcagattcctgtgaccaaactataacagagtagatgcttaactttagtgataggcatcaattgctgcttctagaaacaaaacttgaccttattctttgttctttatccctctagttcaggaatgttcccacctctgccctgagtgtaccagtccaggcttgctaatcccaggcagaccacaagatctatcatcctgaagccatctccattgaccctaaaatacgaatgcccgttgacctgaaccaatgaatgtcagttctaagacttggctaaagcagctgtatagaaaagagagctgttttctcaccaaggcttttcccatcaagaaagaaatggatatgctgttctattatggcacctcacaagcaaagagccagtgaacattagactaacacaggagaaagcagaggtgagtcataaaagagaggttggaaggaaccaattacatcgacagatgctacaggcgttggtcaagtcatctccattcacaagacaattcttgtttgctgacagccatttggcaagtttccaaagcctgctctttcctccagaattctaagtccaaatcccaccccacctctttaccttcagccaacttgcccatcttcatgttttatattcccatgccttaggtatataataaaatgtgtgcctgcttttcccattatcggtccattgtcagattatttcatagatggaaatcaccgctcatcaggatgggaagaatagatttacaacttccctacatccactctttgatccatcaccttcccttcaagttcttaacttaagcagcttcaaccctatcacttcattctatcagatgccggcagaattctcatatgaagctcactcagataagtctctcttgtggttaacatgtctcggttttgaacctgacactcacagacgtggagatttcttctgttagtgcgctcaagaaagggatgtcagagttaaggctaagagtcagaggtgtctgtctggctctgcttagataggacacactgagaaacagggatgatgaagttagccttagtgtcaaaatccactcatggatattccattcatcacttctcatctcttgttttcccctgcttccttgctagctgaataaaggcatgtttttaaagcaaacttcattgtttgtctagcaggattctctgctattttggaatatgtgagctactttaaaaattaacgttcccctgagatgtagtaatttaaattaagggaaaggctggtctttcttaaaagtcttgtttcctttattcaaattgatgttttgtagattccagagactgtcactcttatgacgactgctctcagttgcactgatgagtacagagtcccttcctggcctaaaagaaccagagaaggatgactcacagtatgatctggagaaatgcaaagagaacactgggagaatgcaaatgtcagcttctaaaagaaaaaagaggctctaaagcaaaagaaaacaaggtgaggcaggctggaaatcccagggacaccagtgacagaggcatggaagaatcagaaggagctaggagaaatctcagcccctgacagctttgcctacacaaaacatataatcccctttccctcattggcttacagatctggctccagcatcatttcctggctacagtctgtccagagcatgccaaacaggactactctcaacccagccttcttcaaagcaagtccatgaacactctcgggcttgtcggctgggattcatagagaattggtaataaatggtcaaaataagatgacatccaaaagaaggaacataatgcatcatataaattatttcaaagatttccctactggattaaaggactttatctctggttctcctttatcttctgaccctgacacatatattcttatcttcattgctccaagttttgcctttgaagtaacctcaggccatccatcttatgtaatagcgggagtctttaatactcaatgccatccatgtattctgtgtatgtacatactatttacccaagttctggttctcggagatggcaagggtcaaatgaggcattttcttttttctgtttttatttatttatttatttatttatttatttatttatttattgttgttttttttgagacagggtttctctgtgtggccctggatgtgctgaaactcactttgtagaccaggctggcctcgaactcagaaatctgcttgcctctacctcctaaggctgggattaaaggtgtgtgccaccactgcctggctgcactttcgagaatagacaaaaggagacttgttcacacccatgaggaggttttgtcctgcctgccaggtcttccccactgtgcttgggatcagtgttctagccttctcctagcccacagaggtatgggtacatgtcacccaaaaggtatcatagcctgtaatcccattgcttgcctcacctttgcttctcaaagcttggtattcttttagttcaagtcttcagaacacctcagcacagaaaggttgcttctgcaagagctggtaagaaaggttgtgcctggggaggaggcagtgggaatagttatactgagccatcctggcaatgacagcacagccgctgctttctgtgttcaaaccagtgctggttctttgaatgtggcatctgtcaaggctcagtaaggatgacagatgtctctctgctccaggaacaaacaacacagccctgtgggggtgacagaaacaagtgcagccaagccagagtggagaggtgccgatctccggaaataatcggaagaacagcgtaggagtccaagtctaccagacacctgctcccctgaagaaagcatgctctcattatgaaaccttagaattagaaggtgactccaggaatgagtgcgtgtgtatctgggtggcctcattcaacagtgaatgagctattcattcaagagatgcttgaggtatgtctagaaatgagagccccatccccacttcacataactgttcagttggcctacaattaatcccccttccatgagggatatcagcctgagatgaaggtgagccagtttaggaagtgtcatcatcctgagtcatctctaatcccgtgtgtcctgattagatcatacatatacatggagctcctatctacagagtgcctcacaggtaccttgtaggtgcttggtggacagctgatgaatgaacagaacaattgcaaggcaactaaaggggctgagaggcaaagacataaaaaaagagacacaacgacttagagtgaaatgacaagaataattagatatcaactacaaggacggtaataatctgatgaaagtacacaagagaaccgtttcattatgtatcctgaattatgcccctgatgtttgcactattttttggaactgactcaacatagaaaaaagaggcggctaccccaggcttagagaaaagcctgttgttgtcttggagaagaaagatgaaccagtagataggatgcaatgggataaatgatctgggaaaaaagcctgtgctaaaatggtagcagctttggagaagtaatgatgaccagaggaccttgcagaaagaaggagcctgggggattctgggagccattatttacaggtagtactcagtactgttcctcctttgggcccagatgcaaaggttagcagtgtggtttcccaacctcttccgctacagccaagctagcgaagtcacttttgctttggcccatgaactctccaagaagcagagacagccacatttagcagagtcttatgttgccttgagtgtagggagggacacttggagcagctaggaattcaagcatctttcacccaatccaaaaagttttcaatcatcctcacatgaggctcagttcccccatgtgtgatgatttgcatgtgcttgacccaaggagtggcactattagaaggtgtggacttgttggagtaggtgtgtcactgtgggtgtgggctttaggaacctcatcctagctgcctggaagtcagtgttctgctagcagccttcatatgaagatgtagaactctcagctcctcctgcatcatgcctgcctggacgcaccatactcccacagtgatgataatggataagccagccccaattaaatgttatctttataagcgttgctttggctatggtgtctgttcacagcagtagaaccctaactaaggcacaatgtgtatttcatgtatggccagaggaaaacacagtaagaaattgagtaccaccattttgattctagcatagcctggaaattaacaaaaaaatctggaaaacaaaacaaaacaaaaacaaagcagcatccagaatttctgcaagccacaggaggggttgaggaacgagggtcttggcccagtcaaagatctgggtctttcaccctcatgacagaacttgaatgatgcttggagcatctgaaagaaggaccctgggctcccaagttataagaaaggtgctttgccacacagagctgactttggaatcatcaggatgagaggtcaagctttaagtcactatccttatagctatttgaccctgggcagaacatttaacctctgtcagcatttgtgttcccatctcttttgtgatgctaacacttgttagtaagggaaactgactgaattgtatgcaatgatatctaagtttctgctggggagaacaggtgagtggaaactgttgcctattttaactactattagcatcaccttcattcttctcctcagcatcatcgaacatagctcacgccaagctcatcttcccaactctgaattctagtcctcctgccatagtaggcaagaatgagaatgtccatcttagcatggtctagaactagaagagtccccagtcaaggctgtgttcccctatgagtccttctttgctagaaggctattgtgccacttgcctggagttctgttggtcttccaataataaggctgctcctggatttgctgctattaagggtagatggagcaagagagctaaagatctacaagtacaaaagcaataagaaagatgctcctggctaactctactgctgcctcccactcccacagccatggcttcagagaggaggagcatgaatgtacctggatcttgttaagagtatctgatccaggtggacatgggagccccaccatccctatgtatctccatgtaactgtttattaaggccaaagtatagcctaggctgatgctgaactttaagaagcaggggtaacatactagcatgaacaaccacaggtaagctggcagcagtgtacccaggtacctactcaaccctgcaagcaagagccagagatgcagcttaggcaggtgacaaaatttctgaccaggcaaaccatggcccatttctctgttgccttggagctgtgcccatttgtagctgacccaggttcagtgtctccctcagcggactgccagcaatagaggctacccattagcacctaagccactactgcagcacactctactccctgaaggccctttgtctccattatttcactcagttcctagcaagctggggaagggaaggctatactgacacagcaccatgaaagagaagataggtcctgacgggccagaagccaactgtgactttcccacagcaccctcaagattaaagacatatactgggggagaatgagtcacttacactaccccatgtccacacacactaaggaagcagggatggacttaaacaaggaacaatgggatgggaatacttgcaatcaaatcttgggtttattttctgtctgcatgttcattcctttgggcaccaggtgtcaccactgtgagcctcagttgcctcatctgtgtaagagagcactattgggaaacatgggatgatagtgtaattaatgcctggaaaagagcaggctcttaatcaataagtgtaggaagttctacagagctgtctctgacctggctgtgtagcccatgaaacaagacttggaggatgtcttggtcattttatttatatatttaaatccattttgtctgtgcaagcttacccaaggatcctgtccaatggttagctcataaaaaggcatgcaatggtaaaatggacctcttgctctccggaaaccagctgctcacctacaaagggggcagtatgaagagaaatagcctccattgccctacaggccaaaccattgtactcagcaagctgaagtagcaagggggcacactcagcccttttaatgctcacaatctacctgccagtgcagaagagatgggatgcttaccaaacttaaacaacctctcaatggggacaaattcccaagaacaccatcgccctcagaccttgagataaacaacacaaaaccttattttcagtgagaggcaaaaatagcctattttcttaaaaagtctttttctgcaagtgacaaggtcagcttcctcagccctctccattaacctgcctggcacttccggttccttgatcttccgaccaattgtgcaaagaagtcatcaatctggaattctgacacagcagccattgttgaaatatctactccctggaattctcagtcacaaaggcagaagaaagagtacagagcttcagaagaccagagtctccaagcctcagagactcttaacatcaacaagctgtcccacctctaccacagaacctggagccagggagagccaaagacactaacagcccttgctgcctcatgctggcccttgggagagtgcataagctttccctgtgaacatggcatttgtattctaagtaatctttcttcaagtcaactccatcaggtcttaataaacaaaattactctattaccaccttccttaaaacccctcatgagtttccatgctggccatacaaaactgcaaattgcttcctctagcccaccaggctactggctgtatcttgatacagtcttccttgccttagttttgctcactgaaacctgtgcagctctcctcacataggagctagactctcactctttccctgtttctgcactgcccatttcccattgatctcagctcaaagttgcttcctaagacagactttcctgaccacaccctaaggcaagtcacccctatcctttcttagtttcccattcatttaaaaagactcctattcccatgctttttggttctgtgaggtcaggaacaagatcttattccatccaccagtttataacaatgcattgagttccacagatccccaactatctcgtctagaaacacaaaagagtttaacttctaatgcccgccttcattcagtcagttagacttcaaaggccaattttcaaggtttccccaaaccacaaataaagaagctactgtctggtgagcttgatgctagaatcagtacttagtaacatgaccgttttgtgtgcaagtccaagtgtcttagttactgttctattgctgtaataagacaccatgatcaagcaacttacagaagagtctatttggtactttatagtagtttcaggtgagttccatgaccatcgtggtgagaagcatagaagcaagcaggcaggtatggtgctaaagcagtagctgagagcttatatcttgatccacagcaagaagcagagagaacgtggaatggaggaggcttttgaaacctcaaagtctactccagtgacacatgtcctccaacaagttcatacctctcagcctttcataaacaattttatcaaatgggaaccaagtattcaaagcctataggagccattcttatcaaaccaccacaatgtgtgtgcgcatatttgtgtacaaatgtacccttgtgtgcatgtgaatgtggcagccagaaggcagactttagtactatccacccacctgtttggttttttttttttttttttttttttttttgagacagggctcattaagtccattggcttaggacacactaatcaccttaggatggctagccacaaagctctaaggttccacttatctatgctttctaaagtctggggttgcaagtatctgccagtgcacgtgaatttctttctttctttctttctttctttctttccttcttcttcttcttcttcttcttcttcttcttcttcttcttcttcttcttcttcttcttcttcttctccttctccttctccttctccttctccttctccttctccttctccttctccttctccttctccttctccttctccttctccttctccttctccttctccttctccttctccttctccttctccttctccttctccttctccttcttcttcttcttcttcttcttcttcttcttcttctagatgttccttgtatttgtattagcaactaagctatcttctggttctcaatatgatgattgtttttaatgagtgaatcctgattccaggaagccatgttaaccttcctcagtcatacaatcagtgagtagcaaaacctcaattagaagctcaaactcattgcaacttgctatagcctaaacccagcctgaagggaggaacaagacttcactatgttggtctcctgcatggcattctccctatacccagcagagtggattgggtagaccaaaaggctgaaatggcctgtttacctgcctctgctaaaatggggtttttacttggtagcagttgctgaaatcacttgggctatatagtcaccaggagctggactagaacgtaaacctgctttcagagctttctcctcctcccatggagccaccacaaatctaacctgcttggggaagaaaaggaaacaaagggcttttattttctgtgtcgttttaatgaaggattgactggggctttctgcaggtaagagagcactgttagagagagattgctaagaaaagtgaggggcaagagccatctgcagagagggaacaactaaggtgacccaaagaagctgaaggcagagataactgggccaaatggtagcgaggactcaacctcagggtccagctcttaacctgaggaatgtggacacctgtgactgtcccaaaccattttaaggtaggcaatggcatctctctaacttgaagcaccccagaaaaccttccagcaattgcccagagatggttttattgacttgttcagtcactacaaggtaggtgacaacttcagcagaactgaagcccagatgttctaaagctgaagattctccttccgctcagggaaagaggacttttggagtggtaacagcatggcttactgcaggttgcccaatagacactgtcccttcactgtatatttgtgcccatgttagatggccacattaactaactttccttctttgatctccactgtatctatctctattcactttgttatacatccagcctggtgtgtgaactttccagatgagtactgagtccctgtcccctccctgtgcttgttctatgacagatggttcaggccattcacctaacttcccatgggaatcttgctgagcccaaattttaaaactcaattccctctctcttcttggatcactaagcggtctaaccttaacgtccaatgtatctttaatatacttcctacagatttggaagtagggaaaagattctatctcggtctcacataagtatgaaaattataaaaagaatgataaataagggtttagagaatagaatcaactcagacagactgtggtgaggtgaataatttagtgtgtcctccttattcagctgcagttagcttcaaggaggtacattgtgagtcgttgggtactgggcacatgagatttaaatctattgctataaatgacttggcagggatgaatacactctttaaaaggtacttgtacccctcactttggctatcagactgtagagacaatcaatggacaccaataaaatagactgtctccagggagatcactcgcggaggagagaaagtataaagcctgtgccagacaaagaggaaagctttcacagaggagatccacagcttgttagaccaccttacagaagagacggtggtggatcagtggtgggaaggaccacactttaactggatattgcttgggcatagtgactcttactctctacttaagccttcacttcatttcaagacccccaaagttggggcttggcagggatcactgaatctctgtctgtcccaatgtcgacatattgaccaaatccccttttccagcttttcagtacctggatatggtggttttccctgacttcctgaggacaggtgaatgagtagagcagcctgtcttggtcgggctaaagatgtgagcccctgccccccacaagtctgataacactgctgtttcattaccgggactaattgtctctactatgtcatataaactgcaaaacgctctaggagattgatgtgatttcacgacagtgatggcatggttataggcgatggtgctgggatggtgaagacactgatatcggaacaaacagcagggatggtggcagcagaagtgacggtgtgacatagttaataccactgtagttctgttcttcacattctcatccttaggtaggacatggaccagattttctgtgtagaatggaatgcatcttctgaaataagttcagaggccctgacattgatttggactcctcaaaagcaacatgtctcatctctaaagtgggggttataatgacccccatctataaggctgtgtgagatacataaactaaattctgtggccctaagcctgagaaaatacacaaggattcttataaaaaactgaaaaccagtatctggaacaaaagtgggaaaagaagggaatatggctgttgcctgaaacatatggctaacataggtaggccctgtctctggagtcctgaatgcaacttagttgtggtgcccttcacagccagggcaaacagaaacggaaacccagcctgcatatggccaggtagccacaggtaaccacattagggcttctatctcccctgaaggaagtaatgaaatcaagaggcacagagtgagtacttgataggccctttcctagattttagaaacagttctagaaagatctcacctcctcccaaatcctcttttctctatattactgcttcttatctttctaatgtctattggaattctgtaggttggggacaggtataccaagcacatttctgccaggtgaaagttcatgcctgtaaccccagcactcaggagactgaggcaggaggatcactatgagttaaaggccagcctgaactatgtggtgagatcatagcttgagctatatagtgagaccccatctggaaataaaacaaagtaaaataaacacagccctggggtcccaattcagtgttctagttgataggactgtgggtggagtccaaaacctttgactttcgagtaaggtcccccattttatgaaccatttgttctataccagctgacagataaatcaagagcttgcccaagaaagaactatcagcaacaaaggaatctatgggactggattttgagagagcactacttcccagagtgggcaacgggacaattttgagtggttgtcaggcagggacaaggacagcttcactgggagagcatctttcatgctggcttttgactaagaagtaacttacttccctgtgcggatggatgggaagaggtactccagactgcaagcaaaggacggtacatgtaccactgtggagtatggtccaagagcaggaaaactggaggcaaatagcttttctacatacagtcctttgtaatatgcatatgactgcctctcacgtatcctgtctgtttactctcttaagagtcaccttcacagaataatgtttcagttttgatgaagtcttgttggcccatctatctttcatgcaccatcattttggcattgtacctaaggttttcttcgaagatttttgttctttatatctacaactatggttcaggttgaaaaaaattttatataaagtatgaagtttacactgaatcttgtttttgtttctgattggaggtccaactctttcaagaccacttggtaaatactatccctttccacttggtcggtgttatacttcaaatagtgaatggctgtatttgttatgggtttagaatctgagttcgctactgtgttccaatgatctgtgtttctactcttcagccaatctcacactatcataattactatacctttataatgagccttaaaatcaggttgtctgattcctttaaacagattctttttcaagaacatgtttgtgattttagttgcttttcaaaaaatgttttaagtgttggcgtgtttatatcttcaaaagtcctactgagggatctggggatatggcttggtcattaatagcaattgttgctcttgcaagggacctaggttcacttctagcacccatgtgacatcataccattctaaattccaattccagggcaactgatgtcttcttctggtctcttcaggtactaagcatgtacctcatggtacatatatatgcatgtagtcaaacactcatccatataaagaaattcttcaagtcctacttatattttgatggggattatattaaatctatagagaagcttaagataattggcgtgtttagtatgatgagttttcaagtacacaagtatgacatgtcttgccacttatatgtaccttcagaattagcatcttaatggtttgggaagccttctctagagtggataatctacactagagatttgtgggtagatctacaaaatacagaaattcatatgccagacaaagacctataagtcaagaccttctcagactaagctcttaatgtaaactatatattggggcatatttgttaaaaaattgttcatgtatgtgtgcatatgctgcatgtgtatatgtatgtgtctggtgtatatgcatgtgtattatttgtgtgtgcttgcatgtgtgaatgtaaatgtcagaggagaagctcaggcattggttaaaccttgtttaaagctgtatcgatttgctcttcatcactgccagcctacttgacctgtgagcctctggagattctcctgtctctgcctcccatcctatcaaaggagcatgggattggagtgtgctactacacacaacttcacatgggttcttgggattagaactcagatccttgtatttgtgtgacaaatattttactcacttagcctgggtggggttttttgtttgtttttggggggttttgtttggttttttttttttttttgctttttttttcccctacattttccagctattaacctctgttcagctccatataaaagatagagtctaggaacctgtggttctgttcccatgtttattcattaaaccaatctggttaattccccaagtttgtttcttctcaatgctatgtactcattagcatccttcaaggataggggtccccttcctgcaaagcctcatggagcaattctggtggacagatttgccaaactgtctctgatggctcaaacattatttgtacctcagacctccttattctgcctgatgaaggaatcaaacaacatcagaagcccatggtttggctgcctcccatcatcttggaaggctctctgacagtcagagatagtaaaaaacagagaagagaaagaacacatatgaacacatggggagcagctaatcaaaaagatctgtgaccccaaaaaccttttgatgggaacagggcatctttacttctatttccacctctctgcactactaagacagaacacagctgcacagtcgagagggtatgccccctcctatctcaacgaaccatcaaagttccccttgtttctttctgtggttccttagaattgttaaatgtatgtcttggctacagcaagatggggcatgacatatttgcaaccaaaatatgagccggttgaatgttgtctgaagatagctgcttctgttatcttttaatggattttttgggggtaaagagttgctgatgtagataaaatagatataaaatttaatgcttcaagcattggatgtgcaccagccacaagcaggctaaaaatagacttaactacatcaataatacttctctttgaagctttgggccatttgagatggggattgagaacactcagaaagaataggaaggcaaagaatgctgtaaacagcaaatgctacatgtgaagcatccagaccaggacctcgaagacaggctgattgtatggcctcttctatagacatctatgaacctgtttactatacaaagctcatctacatttgatgaaaacatactcttcataccactgctactgccagtctgcacctgaggcacccccaattcctggctcttgttgggaggtcagcacgcaaaaggcctttagaatcatagaatctcaatatagataaggcctcattggcagaagccaagtgtgctgttgctgggtgagtcagagaagccctgggatttctctgtcttgttcttctccaggaaggtgatggcctatataaggttgcatgcataagatgaactcagcatgggtcagtgtggtggcaggatcttctggaaagcagctcagaatcttgttccaacccaagtctggccaatgaccatctctgaatttgaccttgaagaagagtcatagtattgtgtgctttacagggcaacttaagggagtgactaaaacacacacacacacagtacctgatgcaaagagagtgcctccgagagcacctgtgacagatgtccccacctctaggctttctagaactctcgtcacagtctcacttatgaagacaatgaatcactcaaataaggatatctgggttaagggttaagtagccctgtgctgctcacaagcaagccagcactgcctgctcttctttactgacactgaggaaaagaaactggaattacactggttatactgagccagaggccctggctcctggacctttattttccttcctgtttgtcctggccttgaggtttttggccagggtgagctctccaaagcacatctgactcctggctaccacaccacatagctctgcttccattgttcctggcttcttatccagtttcccagattcacactgctcctcaagcaccttactttgtaacactaaggaccttcagtgactgcattagctataaggagccacaggttgggatcccagaagaagataagaggcctgtctctgaactcatagattgtttttgactattgacaacgtgcaaaataccaggagacttcattaaaatgaaaatgtctggcattcctgagagaaaaaatacaaccaactggccaaatagccatagttaaccagatctccatggcacctgttcccacagtttcaaagaccattgttttgctggtcaaccttgactaggcctcttactgcaagtctttcctggtcccgattcacaccactaggaaatcaaggtctcagcaggactcagacaaactccatcacccaacccatggtacctcttcgtgtgtttactgcagtaaagctcgcggcttccaggtgctaccaagaaccaggtcctacctacagcccctccatgctttttgatctacccgatgccatccaagtgcttgttccttctccagaaatctctcctctctaagcatgcgacctaaagctctgcttcccccaaaggctcaaactattaaggactccaagtaatttagataagggcaaaggcgtaaatgctctctaagtttctcacaagtgcagtgtaggactgttccacctgctttttggacagcaaaaaaacacagactacgttttcactctgagtcagatgtcctggctccctcactttcgtttccctcttgtttgttctggcctcaaaattcttggccagagtgagctctgctcagtataatatgtgacccctggccacagtaccacatggccataccttacacagctcttctatgaccaggctctgtgtcctcagccaaactgccaatctccctaggacattgtcaggtgcttacacttatttgccttcccagaggaaggctgggaacttgtcacacagaaggttctaggaaccggtgaactgtttggtcagtgactactatccatacattcactcataaaagggctgggctgttaccaacctctccatctctttcctgctcctcagtctggtctaggttccagctcctgataccatgacagatggaccagcacggctttctgtcatctcaggcacttcctgcattctcccaggctaatcacagaaggtgacatgtgatagaaaactcaacatttgtactctcaatgcaaagcattttactccttgctccccacactctacccaggcagtttactgagctcagaactcctttcttctcaggcctgtgcccttccttgagtcctttcatatccctctactttgccaagctccccatcccctaacccccttccttctctgacctcttccttctctttgcttttacctgtcaaatggcagcgcaactgtttgtcaaggtttatctttctcctgcatgtcaagctcctctgtgtccaagactgtgcgatcttcttccgtggccctgcccagttctaagtcaccctgacatagttatatcacaaagctcatttctccagtgaggaacagaagtgaggtcagtagacctctgtgcccagcaggagagcaaaaaggaaccatggggcaattccccgtgggaagacttggtgtcaccatcagattaagacaaggaaaggcagtgtgccctgttaatgtcacaggtggaacaagatttaccaagccacccagagaactctctaggggaaagaacctccagctcattacatattatgagtgaaaatgcccagattttgaagaataaatgttaacactgggttcatgaagtagaaacacaaaagatccatttccacagaaaatgtcatctcaaagtttatatctgtattcgcaccataagacatcagcttgcttttttgcctaatctaccaatttcctccaacgctttatctcaagtgactaggaaccccaccttgccatcccattgcaataagctaagggcactatctgacgctgcccattctatacttgcatcagtcacgtttccaatgttttgatttttgtgccttgacacccagcctgctgccaaatctgaatgtgggcaaatccctctcccctgctgtaaaaagagctcgctcaaaaacaagctttggtgagattgtaaaagccctaggaatctctaactttaaggcagaatgtgaaattaatttccacatactactgaacgtcaccttgaatgattttcaaaaacaactaacactcacaaagctttagacatacaagcatgcacaattaattctcttaacagtgtatgaggctgttgcttccagccctaattactgacgagtgaggaaggctgaagccatgttttttagccaggtccacaccccactcctcccttcccgtgtttccttccatctgacttttcacttttatgcttctctatttttttaagccatccacttaacaaaagacaagatggtgtctgtcttcccactagattgctctcatggacagagatggcctttagaagaggaacctacagatcacagttggtggcttaaaaagtcctggtggaagagtctccattctgagctcacccttgttgattcaagctggactatttatagatgaatcaacaaacctcctcagcagacagaaggagccacagccaaaagccttgcagtggaggagggagacacacacaatgaccatagtggaaagccactgggaagatatgagaagtactcttgatgataggacacagaaacggggaccaatgggcctctgtttatgtcagcaactaattcagtatttctagtttctctcttctacgtactttctttctttctttttcaaaaacaatttttattagatattttcttcatttacatttcaaacgctatcttgaaagtcccctattcccttccctcctccccccgccccaccccctgccctgctccccaacccacccacgcccacttcctggccctggcattccctagtactggggcatataatctttgcaagaccaagggcctttcctccctttctttctcaccaccaaaccttgacaatttatgtagcagagatcaactgttctccaggtacaactaaggtccatcctaccctctcaaaaggtagtattgcaagtaaggagaaggttcccaccgtctctagccccagcttccctttctcagcccacagatctgagttaatctaagctagtctgggtttactctaaagtagttgccagaagatgttacatcaaaagcctggcaaatcccaaatatttaacaactcaaataatccttccatccatcagtttggtaattctatccaccaaaaaataaataacaataaaatacaaagctattagagtctcctttttgagctgccagtctcatataaacatgccatggccatttacagcttgcagctcgctcctctctaaacatttacacatttctccagctcgtaacaaatcctccgccatgtgattaagtggcaggtcacaagggtgggatggcagcaagagtttgagttcaaagccatctttggatgtttcccaaatttggcttcattggtttcaatgccaccctcccacttagtgaatccagtgattactggtactgtgggctctggcatcatgggccatagcatgctgagccatggcatcttgggtcacacatagtctgtctacacactgtgtccttttataggtctgagtcagaaggaacacagacccgtaaaggcatagagatgaggccatattacactgagctctatgggtagctgctgggggtctccatgagccctgagctcatgagcttggcgggtgccagcaaatctcagactcagatccccagggaggcagcttacatggtatcttttagggaaaggacgtgcttaaatatggcttccccaggttcacagtcctaaaccacacacatgcaacagccctgccctttaagagtacacattctcagcctcctaggggacttcggtggtatttacagagtgtagcaattaggataaaactatgtccaacataggagagctaagaaaggtcatgaaaaaaagaaggcaggtgggctggggaagtagtgaggactctgtggaggatggagagagatacagcacttgtagaaaccgctggggcaaagaacagaaggggaaactagtgatgggcaagggaagcaagggaaggctgggggactctaacgaaccctccatcacccctgctctaccctcaatgccacagactattctaaacttgggaaaacaaagtacctttagaatgggatgtgagtgtgggtcctaaggtcttcctagctagttttatggtccctgggcatagtttaacatggcagagtctcacctacttccttaggaaagcagaatgggtacagggactcactggcaactgcagatctgatatctgcctgggttgattgacatgataccttgctacagagttctgcatgagactctggggtgccagggtctgagccacagctctgcaggcacctttcagaaagggtacactgcctaagacattgacgaaaccctagtatgggcaaagacatttccaaggaagcagtggtggggctcagttacagagagatgtgcaataggggccacactctttggggggcagtctacctcctactgttgattgacaataagataacattcagtgtcaggtgatgtgtgactctgctgccagactctttaaaagaggtcccacgttctctagggttggtagaggttttcctaaccctgcttcacacttggcctctgtgtccctcacatccttccctctcccccttggagtagtagcaaggatctctagtaaacatccactctcagctctgctcagaggctgcctttgaaacgtcacctgcaacacatctggtcttatctgtgtactgaacacgtgtatcaaataagaaacctactgttaattgcaaatatttagatcagtaacctgtctcgtcttctgcgtcttcaagatgttccttctcctaacatggcagaaagtggggtaagcaaagggtcatgtggcagtgctttgaccagagggcagcctgaatccaaccctgggaacacagacaccttttatctgtcttcctaccgaatctggaacattctaagtagaggtcaggctctgtatacttttcttcatcacaaatgctccatgactattatctccatgcatagcaaggagagtcagccctgggcagggggacacatggctgtgaatccttccaagagaagactctgtggtagaacagcattatctccacatagctcaggagccaaaggtagctgggtgtcttaggtacaaacaaatgatgtcaaatatcacatggggaattctttgaatagccatctccagagcacgtggtccctaccaaaatcagaagagccagaaactttttttttttagctagaaacatctggagagaaggaaggctaatgaggtctacccaagtctgcccagagtacattccagatcagcttgctcctgagctcatcccatgcctgaacctgctgaacctccagaggttctgattcgcattaccctgaccttcagctactcaggggacaacacttcccacctcacctcaagccttctctcttagcacaggccttgagatgatggccatccacatctaggcagggacagctcccttcccatgaaagacaaagagctatctagggatgagctcttttagttggctcacaaaaggaagtggagggcctttgagaaatctttgttgaatgcttgctcccacctaaagaggactttggagtttttcaggaaggaagcagtggcatgaactgacaggcccttcctgggaagtagagacaagctccttgctcaggtgttgaagtgctcaaggtcttccagaactcctggcgtgggacactggctgggaagggagcttctgtgggtggactcctatcctttattcaaagtagctagagttttatgattttgcccagaaattcagactctaagggaataaaattcatcacttcagaagttttggctcttggggaagatccacatgctatggagtcagaccactaagctgtgtcagactcaactattctgatgctaaggtcccttttgcatagagaacataggaatggctagcacttagtttacttgagagagagacaaggcaaagccctcacagaagtttattcctttcctagtttgcaaagcaccagaaacaggagctgtttttagaggtgcataagcccttttagcataaagaacaaaagatgagccgctttctctaagcagacagaggcagaggggcttcaggtccctaggcatttaaagcacttaagacttgaaaaaaaataagcccaccgcctgccagtgttttacatattccttcacaaggctcactctgagccacacaacccacgcagttcagggcagcaccaagccagcaagtcatgggaggaaaatgctcttcctatatggctcctgtgcatccttccataaggaatactgtgcatccagggttgatgtcctctcaggactccacctccaaagacataagtccttgcctgccagctctgaagacaactaccttaacaagtggctgagacaggggtgctgtatgtaaatgcaaggcacaattatcatcaccattaaccttcccatctacagccactgcttggcagtaaggatgtaatttcaggacaggaccattattcatcatgagatcatttgtgccatgttgtaagagacagctcttctcttcattctttgattcaagttaacagtcttattccatggcctctgaatgtatatacatttttattgttcaattacaaactccaggatgagatactctgacatccttggtaattgtctggtttctaatcagaagtccctggctcagggaggaattaaatatttcatctatgtggggaatagcaaggttttctttgacgggatagagaagagtatacatttaatgatttctctgttaggttaaatagcagataaccaagaatggcaatagaccaaacatggggcagcaggaattctagaccttcccaccgcttcaagaaacattgtccagtgggcaatcagaaggtttttaactaagcaaaatgatggcttggtgtcagcagactttcaagtcattacctgttttaacttgaagtctaaaatagtcctctatccagtaagtacagaagagctcacttacatgaacagtttcaaagcactaacaggtatggagaggaaagaggaaaaaaataaaggaaaagaaaataagtcagacatggtgatgtatgcatgttgtccacagttttgggaaatggaggcaggaagatcaggatttcaaggccagcccttgctacttagcaagtgtgagaccagcctgggttatatgaaaccctgtctcagaagatctaacatgccaacacaggcatgtacacacacatgcacataggtgtggtcatgctgagaagtctgtagataagtatgaggaaaagggagcagaagacacagagaaaggcatgtagagaagctgtaatgagtaaaccatgcatgcacatgtgaaggaaaacacacaacagaaaaagagccatgaggaaactctcctgaaggatgttcagattttgaaagcttatcagtaaaagtccctgtggagacttttcatctccaactgtagagcacgactggccaactgcctccttaatgaggtcaaatcttgttgaggctgtgtccagctcatggctggtggtgcctcgcctgtgtctcatcttgtaatgctgggccatttttaacaggaagcatccagtgcccacttggtctagcattgccaccaggatcgtcagtactaaggcaagtaggctaatcacccacactggctgcctcagctgtagatacagtagactggagagggacatgggaccttctctccctgtagtgcagggactacagggacagctcagtggttaaaacatttgcctggcaagcatgaactctagagtttggattcctcagaatccacttaagtgatgggtaggcatagcagcctatatataattgcagccaaaaaataaaataaaataaaataaaataaaataaaataaaataaaataaaataagaggagagacagcgaatccctggatcaagctagccagcaagattgggcaaggtggtgagttctgggtttgattgagagaccacaactcacagaacaaagtaagtgaacaattgaacatgattccagacattaacctcaggtctacacatacatacacacatttacactggcacacacacataaacacagacatacatcaacatacataaaagcacaaatgcacatatatatggcacatatatgggaaatggaaaatgagggtaaaacttgccatccctatttagtactccagtaaacatgatcagcagttagctcctagttacagacagtgactcagaggagaagacgggaatatgtacacaaatcaaataacagatctggagaatggtgtattgtcctccgacatacttttaatgtgtgcactggaggcatgtcacctgctctccctagctctgtgtccttctctttagagcgcagtagaatcacaggtgtccctgtggcaccttgtagcaccaagcttcgattcctctcaacaactgatgtgaagtgaatagcttgttcagatctaatgatgacatgaaaacaaatcacacgagaactgcattgcccgtggttctgaataagccctccgtgtgtgcccttgggtcagaataacactggtggaagtcacaaattcatcacaaatgttgactgtgaaaggacttttaatccaggacaaccccattccctgggttattctccaaatcctctcctgacagacactaactcctaaaaataggtcttaaagtggggctctgagttcgagaccaataggcaacctgattgcaaatgccttctgttctggagctgggtgagtatggtggctggctcgatttcagtcaattcccactattctgaggtggcagccagagaagggttttctctttacagaccattttccccatttattctcttccacaaaactgcctcaatgttgaggaggaaatgttgatgtcagctgggacatcaacaggaaacccatatgccaagggtcttcacttatgtccaaccaaatgttctctgtggggtgattgctccacatctgagccagaggcattgtgaaaggcaggttagagacatttggaagacttcaagaatgaccactggtccccagagcagtcccacgtgaccactgatcttggttcatgtgtgttaaacatgaatacatttttcctgggtgctttacacatgttaacatacaaacagccactgacagctccatgaagcagctgctactgttagtcccattttacaggtgaagcaactgagactcagaaaaggagctggttcaaggccacagagcctatgactgaggcagaatagctgggctttgtattcaatcatgaatgctatgaaccagtgctctcaaaagaaacacaaggcaagccatgaagcccatgtttgtgattgtgtgtgtgtgtgtgtgtgtgtgtctgtctgtctgtctgtctcttggtttgtctatcatacattttcctgcagggcacttatttttacattttattgatgattcatttataattatagacagatatttaatatttaactccaggtaggataagtggtcaaactgtgtccaccggcacaaacacacattaacctccttgtggattttcctataggacagtggttcgcaaccttcctaatgctatgatcctttaagacagttcatgttatagtgaccccccaactataaaattatttgttgctacttcataactgtaatttggccactattatgaattgtgatataaaatctgatattcaggatatctgaatatcacaccaaaggggtggcggcccacaggttgagaactactgctatagggcatattggtatctgcttctggtagatctactccccagcttccttcttcctagcacactgactttgttcagggatgcaagtgatggaggaaagggtcctaggtaaacctcagttactcaagtctacctcagtgcccctttttatttgtcagaaatggactaaggaccaagctggtgacccagttctgctggtgagctatatgtcaaggtatgctggaggcttctagacatgttatccaggcttctaaaggcagactggaagaggtggttcctttcctgagagacttttatatattttataatatatatgtacatacatgtatgtgcatatatatgtacatgtttatatacatgtatatttccctgaggtaggatatgcataaaatgtcattaaaatcatatagttcattgctctaatcattactccatctacctaagagacacacatcttttaaaaataaaaagaaactagactaagcatgctagttaaaaaataaataaatcaaacagaagagaagataacatgaagatagaaaaaggacattcagagatacaagggaagagttggaatgggtatgatccagatatattgcatacatgtatgaaattattaaagaataaaagatatttttaataatttaaaaagaaaaagaaaaaaattataataatatggtttacctaactaacctaacttaaatgtgatcattttaagaaaaaacccatatcaaatcagatatgtgctatttcacagtcatgctaaatttcctaggtccaggtcatcttaatttagaccaccattcctcagatgctcagagtcaccctgggagagtaacccaggtttctctggttcctgtctatggtcagctcatggacatccccagagaacagcaacgcacacatgactgtgcagacctgtgcgtcagtatcagctctccagccagtttgtgactcaatgcaggagccaagatgatgtctgactctaaaggttctaaaacggcatctccagcacccttgagatcaccaccactgcgctgacagatgaaatgggatctaacggagggagaatattttctagccaaacagaacttgtgcctccaccaccacctggggaggtgggtagtctagctcaaaactgggggggggggggggctgtgggtctagctcaaaactgagactgatcccagaggtggaagtagagatggcacctacatagttgctggggcactggcagattgcgccaataataaacaaacacacacctacgtgcaaagaaggaagcatgcatgcagggttgagcaagcagttgccatggaaaccagctagcctcactctagttttttttccctggcaccttgatcattcagtggctgatggagtccagtggaggagcattgtgtctgtccctatgaaaccttccaaatggacccattatgatgaaagctgatcaaagaggaaaggatgacgtagcttttctattcacagttgcatccacattttatcctggaaatgactcaaaaggagaagacgataaaactagctttgccatagaaggaaacggctgaggggggattaaataatggcagcagaggggtgaggtggaggcatctggacatggtcatagaaggaaatagctggcctaagtgtccactacagaaaatgccccactagataagtggttatgacctcaggctcttactcaacctgatatgaaaacttttctttatataacaaatgcctggtttgattgcttccctacatatcctgtatctttcactcctcccaatctacacatacatacacacacacacacacacacacacacacacacacccctctatacattcatatatacagactacacatacacacatgcatacacaccacatacacattcactatacacacattactcacaccatactcacacacctgtacacacagaccatacacatacacaaaaacacatatacacaacacacccaacacatacacacatgtacacacccatatacacaacacacaactggcgcacacacacatatacacaccatatgtacatgcacacataccatatacatcatacacatcgcacacataatgtacactacacccacacatacacacttatacagagagagagagagagagagagagagagaaggggaggagaatgatcccaagggagcactctttcactgagtgacatctctaacattctccttattatgacacagggtctcaccaagttgtccaaattggccatgaatttgtattcccctacctcagcctctcgtatagttaggacagcaggcctgtggcactgggtctggttcttccactcattaataggtggaaagtgcatgaagcagaaggaggaatcaatgacagcccatcctaggatcccagtcctgaggattattggatgcttgatcttccctaggatgctaaacctctgtgccttggcatccttaccatgtgcgaggttgtgggaacagacttacagactaaacagttgctgtcactacgcttgtattcttacatccttgtgcttaacactggttatagtggaaaaactagatttctttgcactatgattgtcagcaactgccaggcagaagtcttggtctctcttcccccatctcccatataagacaaagggaattataaaacaaacaacatgtttcctattctcaaggaacctacaacttactatatttgattaacaaacaaattatataataccttgtctgtgccagctactgttctaagtactttacaaatattagggaatttaatcttcataatactcctgtcaagtagttactcttgttttctgtccctggaccaacgagtacatggcagagccaaggtcagaaagtctggctcaacagcctgtgggccaaacatgtgtgcaggtgaattatagacaagactgtagatttcaggaggggaagaaatcaatgccattctatcctaggatcccggtcctgaggtctattgaacacatggtcttccctaggatattaaaaactccctgtgccttggcttcctcacctgtaacatagttttgaagatgaggtcagatttgaacccacaaagtatatgggggggtgttagaaagagggtgtgtgttcatcatttgtataaagaatctgagctttagaccacacaaagccaattgggagacctaaacgaagttggatttggggaaatatcgctggtcatgacacacaaaatgagcagctgatactaagtgggccgatgaggcacatgacacacaatatggtagggtgagtaaagcaagaagtccaggggttcagccaggactgtaagggagggaacattgaaggcaaacctataggactttgctacagctaggagctgagaggttagcaccagactctgccaatcacaaagagcagaagcaagctctggggagaaataatggccacccagagtggcacaggggcaggctcactgcagctgtggagtctctgagcactcacactgtatgcagaagcaggcatctttcgtagctgtcctcactagcagctcatgcgagtcagatctgagaatcttaggcacctttaaatgtaagagtcgctccaccaccgccacccgctgtgtggaactataggcagttctattgcccataggctggataattcacaaccctagactctaagccaacctggatcttccaattaatgggcattttattccaacccccattatactggaaagagaagagcaagtactgagattgcatggcagttatcatccaagaatgtgatcagtcatccttctcgcaaattcctccaatggcctgaaattctctattccatcccagttttgcataagtccccggggaaggctttatctgacatcaccaggagatgaatgccagggtgagggcacagcaggtagactcataaaaccagcaaagggaacttggctttcatggaagcggaagcttgcctggttatttatctttcatatctgaagccttggaattccattttcatcttgatggggataataaactcttagcaaacttttatggctccccagatgaaaccgaggactctgcccctgcttccttcctgcaaactcaggcagactctgaaattcaagtcagaccagaaactgcttttggtcagaggcaaaacgtatttatctttgtaggcacagccattaagatgtgagtatgaatagctgacaagaaagagcatgaagggggtgcgggggaaacaggaagaaataggaggtcctggctatgaaggaaggagaccatgacgtcatcagcccccacaagctttttatggtactgggggagtggggcacagggaaggcagctgtagagatgagagaatggaccccaggagtgggctgggagaactttatagtaggagggccgagactggctcacgctgggtgctaaaagaatttggggagtggacacagcacactggaaaactgcatttctgtttttctgccgaagcaatgtggctatgaaatccgccccctctgctcctccaaacactaaaaagaaatctccagatggaaaaatctgaagtcaggctgcagtatgaaaagaaatttttaagagaaaaggaaaagcaaaaggctcacacaggaagctgacaagcttcctggttctctgagagatctaccctacagatctgagttatcagcatactacacatgatcaggagacaggttctagtcagcaccctgcctgggacgaactgcatgacttcaggcaaacctcagtttaatcattaaggaaatgcaagtgacatggtctcaaatagctaaggcagacacagccatgctggccaggccaccttctagtcttctctcatggcagaacttactcatgagtcacattctttagggcagagccttggcagctctttattacagagctgtggatctttggcaaagctttctatagaggcaccacctgaatggacccaggaaatgaaaagtccctggattagatctctttcaatccttaaatacaagagcaagaaaacagtctgtgtcctaaacaccctcaactaagtcctaagtcctaccccatcttgttgctgctgttttgtatttttactgtgtttgtttgtttgtttccttctcttttggctttctttccaagacttagcaatcacaatagagtggaaaaaatatagcataaagcctcttgccttgactcaaagctgggagttcaaatgtgaccttgtgtcttttcccctctgtatattagtttacatctcaaagtctgttcaattccacccccaaggctggtgtccagtctaagaatctcatagaggtagagaattcagtccctactttgagatcagggcatagatgacagcctaaggaagttcaaagacagttaattagtaccctcagttcttttgaaaattattaaagagtccagaattagaaattcagatttcctccagactccggagaacaaacacctctcctctaaatggcttaatgtgtctgtttaatgtacacaaaattatcttgcaggaagtgggggctgtttctcctgtcacttcacatttccagactatactacctttggcaaaaggaggaggaatccaagtctgggaaaattaaattccacagcagaaattattaggaccagaggctgtagcagacacaaacctagatgaaagagaaataaattcttaccccccaccccccactccagttccaccttcatctctccatcttagtccagggcgaaagaaaaagaagcttttataaatttttgagtgtcttgctgagttttgtctacaaggtctattcaatagtatagccatgagcctcagtgtgcagctcccttcaggccaggggactatggaaactggcttcctgtgctcaaactctcagggggaaaaacctgagaaggtgaactgacaaagagtaatgcttcatcactgaggaccagggaaggacaagccttcctcccaagaatgtggacatcctttgcttaggatcatgttaattaaattggaaacacttgaaatagtccactgagggcgtgtggcagttgtttttcttcagctcatctaggaagttaactcgaagcttcatttgggaaacgactgcaatctgaatgtcatggatcacccacagcgttgggtaccctcacataactttgggaggtagcctgcgtagggtttcattttttgtttggtagccccctgagtctgctaccttactccacattaacggatcctcactccttcctgcctctggcagtcattcttttaagtaaacatgccacttatgaaacattcatacatgcaaagatagagaagttcctgtctctgaaacagaaaaaaaaaaatgaccttcaaaaactacccaggtggtagagagggacatctgtcatctggggtctcctaaagcaaaggctggtggaaggacatcccttcaaatcattgtaggtgagtgggactgtcacacttcacccagagtcatagtgagcatcccttagagaaggctgactccatgaagatggctcagtaaggggatctagcacagattcccacaagcacatgttttgaatacatggtcctcatctaggatgctgctttgggaagttgtagaacttcaggagttgaagcctcgtgggaagaagtggatccttgtggggcttagccttatgggttataacctagccccttctggcccacactctctgtttctccatccatttgagctgggaacagccagcctcatgcactggctgccacagctgtgaggagccaccgacttccctaggcttttcctgctacagtagacaaattctggtttctgaaacctttaagtcacttctttctagggattttattatagcaataaataaataaataaataaataaataaataaataaataaatattaaataaataatatctaatgcaggctccaaggctgaaacatctataaagaaaccaactccttggaaggtataggtccttctcctgtggcatcctccccccccccccgcccccgtcaaccccatggccactcccttctagagagatgatccccttctttgtatgtttgtggctatgtggaagagattcagacagggaaaagatcaaaggaggtgagtgaaaagcagtgacgcccccccccccccaggcctgtaagccatgagaagaagacttgagaccattcactaaccttcatggaaggccaggaagagacttcccagatctacctacatcctcccaatgggaccaacagccaagaaaaagacgagcgtgcagctctcccagcgctgagcacagggtcaagtgccttccatgtctaaggaaggcgagttcccatgagcctttctggctgtaagtaagtagggggatgctggagcccagagcctggggagcctgagaaggaacagactgctctaaaacacctgacacttatcattttacccatggagactctgaggtcctgacttgctcaaggtcactcaagaaggttactgcagaggcgggattaggacgtggctttatgttcaccattagttcttttaacaggagagttttgtacctgtgtggattgatctcaaactgggcctggagttccggggagggaggggggaggggggcgcgcacacacacacacacacacacacacacacacacacacactggagcaagcagggaaatatgcttttgtggaggctagaggacaggctcaagtgtcatctctcaggcacactttgtttcttgttttgtttaggatggagccgcccagagcagggattattaagtatgtaccatggcacatggcttttctatgttggtcccagagcttacattggggtcactgtcgttatgaggcaagcgcttgaccaagcgatctgcctctgcagatcggcaatctaaaccttctggaaaactctgaggtggctaagaaactaagttacccagatcataaaatcatggtagcttccctaacagctacttaaagcgtcagctttccttttgccaggggttgtcctctaggcagggacagaaacccagatagatcgttctctgcgtgtccagtccgtaaaaccagttcagcatagactcttcaataaatccatcacacccagacctttctccagaagctcggaggatggtcaagatggctctctggggtcttccaaactccatgcagagacagacagatctctgggctccttagtcatcagttctagactacttgatgaactctgggcccctgagagggagacaccatctcaaacaaaacaaagttcacaggccaacagatctagcagggtttgaggacagccagaaaccaggcaactgttgtcctttgaaataccctctttctgtgacctggcctctgtttcatggcattattgttgtaagtgcagacaactatggcgattgtttttttttttgtttgtttgtttggttggttttttttttttctccttcctggtgagctatcctctactttccttaggaaagttgctctagccatagtcacaaaatatgtggggtgggggacattaaacaggaaaagagagggctgacacaatgggcaagaagagagtttcttgaacctctcagctcgtctactggatcctggacttctatgcctgtggaagagccggtgtgactagtccatttactgtctggattaaccatctcttctaaacaagaaaggcccagtggtatgcttgcctagggcggaggcacatagatggaaggatccttggaagtcccaggttaaatgaaaacccatgtccccgcagttttacacactgtgacccaagctaccacccagagattgctggcttcatcttcccgggctgtccatatcagcacatggctaatttcattaactgaaattaactagatgggcaaaacagagccctgctgcgtaagaggcttgggtgcatttaattaagtttatgagtgttctgattcctcaagacagacaggcaagaaacaactgccaagccttctttctctctctacccaaacttgaaagaacaattcttataataaaaaacattctgaggccaaatggtagcttctgggtggtatcatttccctaaaattgtcttttctggaagatgcctttttctggaacctgactctctaaatggggctcctagtcctccagattggagtgtttagggcccacaggcacgagtccgtctgcctcctcctaaacatagcctcgcaaactaaactcggaagcatcagcttgcatgtggtccctagtgtgagcgacttcatcgccaccgtcgtctctatttttgagtctctctactaaactttctcgcagctggaatggaggttctaaaggcagtcacagcccactaagagattttttttttttcctcacaagtagccacatctaaacctctgagggctcgagaagcaaggaggagaatcactgcatgccctgactgaaaagctccgaaccgcctattccattctaagcctccagggggcaccaactcttactggtctggaaggaaggaaaagaggcaggagggcagtaaggcagaaggccgcttatatgttagtcatataaacatatttatgcaccccttgggatccagcagcagggactcgcaggatgtgagactagaattagaaatgctgaggtcccaggtctgctcgagggactccccacagcatccaagcatcccgtttttttcagtttgcatctgttgtcctgtgcagagtttctgtaagaaacaagaggtatctggtgcctgtaatgggggctcatttccaatagttgtccagaggacatgcctcacatgcatacttttacacattcatgtacatactatgttcacccatatcttctgcaaagtgccacacctttccatgtcttttcaatgggtctgtggccaccaaaatggctgttacacacacttcacatatggtgctgttgacatgcccactgaaatcagccacatactctgtcaggctcactctgtctcgagggaaaactgggcatggagaccatactgaatgcatttgaccctctttccttgagacttatctgttatcctggtaaaggttttcctgtgacacacatgcccacaaggacagctccagggagctgagtacaaccccacctctggcccttgcacagctcagggaggctagatatgaagtgagaatttcctggccagcttgacaacgatgagtcaggctggcacgagccagtccagtctcaggaagaccagaccctggatggacctgaatgaagggtgtgcacaggacaaacactgactgactagacccacactagacccacatgagggatggctagctatacccagaactgcccagcagccttgctcagtgtttagagaactctctctctctctgtctctctgtctctctgtatctctctctctctctctctctctctctctctctctctctctctctctctctctctctctccctctctctctctctctctctctctctctctctctctgtggaaaaaaattttgttttaccctctcccctcccctccctgccttcatggctctccgtgacagccactataacattgtgcctgggctgacaggtaacacaaaccatgggagccaatgtttattgagcactagccacacaagaggcagttttctggcatgcattcaagaacttatcaccacaacaggaagacccagagtctggcattctccccaccagcaagatgaagaaattgtggcttcagaagatgaagctattggcccagaatgaaagccccgaggagaggttagacagggatggtagcctggctgcagcttcagccacaacacacacagaggccctctgtattccaaggaccataccgcagcagctccttgccaggaatacagaatatttgttgttacagagtgttccatctcacctcctggtatgttctgatgacctagccagtgattcaagctgctgaaaagaggtcccagtcagacccttcttgaaggacagaactcctagcttgcagcccaacagaggttaaacagggcgggaagggacattccattataatataccaataaatatatgggaactagttccagagaggtggtcaggcaaatggttgagataaaagcaaaagtaggtactacccctatccaggccccattctcttggacatccaaaggcataggagttaccataccatgaacaatgtttggggacactgtggtgttcagcatgaaactcttgggccagaaggatctttctttctccagagctgtctgatttctaagtctgtccttccttttcccatctgctctgggaaggccagaggagccatcctgccagctagtaaaattagcagctgggcttttttacggggcacactggggagctgggtacactgagtaccagtttacaggccagcagccagggtgggctgagaccccgccttatagacagacctgaatcaggatggtcctcacacaaggattcagtgagagggaaggacagtgctgtggatctgtggatgtcggggatgaagggccttgggtagcagactgcaggagggtagccatgagagaaagtgcaaggggtgactttgctatgatgatctcagaagcagactgtgtccagcccctaggctgaacctgctaaaagaacaaacaacagagaacttgctagcagcctggggccactcagcccagcttctatcgcttcctagtctctacttaagactcaattgagcttacggaagcaatataggtgcattgttcagagactgcaaaaatattacatcctatctattaccttgtgcagtgggcagcttagaaaattctttgggaagaatttcaccagtttcaagggagggtggcaaacttttttaccatgggaccagacagtaactgtttttaggctggtgagagtttgggactctatggatgctccttgtatccttactgtactgtgttacaaaagtagccacagctgcaatataaatgaacttgcatggcttttatgacaattaaattttgagggcaatgaaatttgaattttgtatactttccatgtgttacaaaatattttgttttagatttttctaaagtaatttgaaaatacgaaaaacgatcttttgctcctaagccataccaacagagcagtgaaccactctggcccacatgcatcagatggttgggtaggttcagcggcgtcactcctgtgctatgggaaaaggattccatagggaaataaggactgaagctgccctggccagtgaaacggttccgtgggtaaaggggcttgccaccaagtctgaccacccgtgttcaatcccagggacccaaatggtaacagaaagtagaaaactaactctaacaagttgtttgttgactttattgtgtgacgtgccctgcccccagaatattatatgtgaataaatatatctttttaaattaaaaaaaaaaaaggactagaagtttgtgtgagtacagaagctttttacgctcctgctccagatgcctctgtaagcatccataggctggcatgcatgggcaatccccacgatcagctaggaaatgaagtctgttcaagttcccagaggatcatttttatcccaaagcatctcttgcattcaatggcacttaattaaagcagtgaggattcagcttggccaattgttggtagttatgtcagaagacagttgtgagcatctctagcaacaggcagctcgcaacctgaggtaggagcctgatcagtgcaaccgctcctgtgacatactcttccatctgaataaatggtactgggtcacaaataacaagtgtcataactctggtgcctcttctatcaaagtcaaaacagttacttaaccatataaaaatataacatatcatctatgatttcctgactaacaccaacatactcacacaggataaaataaagaggcataatttaaatcctattggtgaattactatgtgagtcgtttgactcaacccccctcccttaagggtgttcatgccaataaaacctgttggcttccaatgggacagaagagaagcagcaatacatcactacccataatacaactgccaaagattcctattctttctgctctatagagtaactgttgatgctgcgacagttttatgtagcattgcccaaaatatgaaaggataaagaatggatgtggggaagagggaagaaaatggacatgtgtgctgtgtgcaaatttgctaccgtgtttcactgataagggctatgatacacacaagagacacagcccacatcagcgccacccccaaccccccccatggtaagtaatgaatgacagtaacacatgtcacaaagaagattcatggtgcccatgtgcacccctcctcaggttcactgatcaagtgccatgttcaaacagttcagcaggcacagcacagctactttaccccattaacccaatgcagtggcttctgcttgaaaggcatgctgagcatgtatgtttctcttgagcccctgaagataagaataaaatggcctgggttgggtatataatgtgtcaaatgatacccatgtgacctatttagaatgaacagtaaagggtgagactggcattttgtttctccatacattgataaagcctcccctagacgtgaaagcaaatagcaaatgttttcagttggtggaattatatttgcatgtttcctggagcaacgttcaagtgcagtagcataagcaagtgggaaaatgaactaacatgaacaatgctaatggctttatctttgcccagggagccagttactgtgttggggaaatcagttctttaagagaatcacaaaccatggcatctgtcatcgatttgacagaaagtccaggcaatgcagtcatggctcaaaccttgtggtaaagctactattagccacaagacaggtttcttagagtgacagttgctccgagaacaatggagatgaatgtaactattcagaaatggaatgtttgtggagattgggggagggggcaatttgtttgtatgtttgtttgtgtgtgtctacatctttcttccttgtaaatggattctccactactattactcttattctataagattcttaccttttgattgctttataaagtaagagaataaactgctacttatgaaacaaagcacatgggtccatcacctgcttctgtcaataaagttttattggaatacacattccaaacagtgtagatgtttgtgactactttcaaatcaaaatggcagatgaagtagttaacatggagtctgtatagttcacaaagcctaacaatgtttacaacaggaatatttgccaaccttgaactaaaatattttcattgattttagctttgtgagtttataatttacaaactaacaaacaaaagctggcccatgtgtttcttgccccctgtcttgagataccacttcagccttcaagggtttaatctggctcacaaaaatgtacgaaacacctaacagcacacacacacacacacacacacacacacacacacacacacacacacacaaattaggaaataattaaggaactcaagacagagaaggaaagagaatggaaaagagaaaagtaggagaaatgagcccacataaaatccaaactttggcttctctgtgtaggtcagtcaaccttggctcacaacagccaccaaatattaccccttttccaacttaaaataatcatggtgctagctgacaaatccatgatttctagtgaaagcagcttatttaatttctccgggagtgtgtgcctgaagtaaattaggtgaaatataggcaacgtgatcctcagcaacgcccaagtatttgagaagaatcctaaagacatcttccttcatattgaagtcttactgagtgtaggccaactccatatcctaaaatggaacttctcagcgattcttccaacatgttccagaattctaaaataagcatgtactgttctacgattgtccatcagcatctgtgggagactgcttccaagactccctgtgggtatcaaatctaaagatgtacatgtcccttatataaatggtgtagtacttgcagaaagcctacgcgcatcctcccgtaggcttgaaactatccctagattacttgcaatacttaacacagtgtaaatgtgatggtaatagctgctccactatgttcattagggatgacaaaaattaaaagaaagaaagaaagaaagaaagaaagaaagaaagaaagagagagagagagagagagagagagagaggggggggggaaagaaaagaaaagaaaagaaaagaaaaggaagaaaaagaggacatacacattcaatgagttgcaattttgccccaatatttttgataggtgattgattgaatacattgatgatggacctgcagacagagagacacaattttactttcacagtcattaatttggaggctagggaggtagctaagtggttaagagctagtatgcagtaggcataaggacctgagttctaatccctaacacaccttggtagaaagtcaggcatggctccatatttcaaccctgacagggtggagtgggagcagatacaggcatatcacaagagccccagtcaagccagcctagcccaaatgttcagttctcagttcagagagtccctttctcacaatgcaatgtggaagacgacactgggtgccctgctttggtctttatatccagctgcacaggtacataagcctacatactcataaccatatcacacacacacagacacacacaccactttgtttctttattaaaacttttaaagaaaatattctttaatttaaaaaatgaaacaaaggaagagactaccttgtctgcatggcatcactctgttaacctatggtttaggcccgtgtttcagaggagagctccacccatcagcctctctggtttttgtttaggaagcttgatcctaaggagagagactgagacctgaaaccttggagtcaaagaactgaccattttggtgctgaggcccagctgaatactgccgaccacctgccattcctgggatggaactagacaattatctatttaatccaacagtatgcgtaactcacatttggttttgtttgtttgtttttgctcactgttttgtgcctgtatggagtacacagccagagctgttaagaaattaccatttatcaaatgaatgtggtacttagcaagatcagttgttacagataatctaggctacttagctaatccttccccagctagaccttacctaccatattccaaccttaatagtctcacctgcaagctcctaagcatgcatcaaagaaaacagattgaaaactggggaagggaaacggtcccactgtcacagggataaacatctggacagctcaaaacaaacacagtgttgggctcagatcatgcagggcagctttgtcctgtgtgctggtaaaatctgtgttctgtacaaagccaggctctgcattctcctcaaagtcttctgagacactgctctgtgctgcagggatccatcccttcaaggggatccagcactttggcaggactttcttcaaggagaccagagatcagctaacaccttggacagccctaagcaagaaggattgggttgaagctgcttctacctgtgagggttaagatggtcaagactggggtctcagacctggctggctctaggacagtaatattagatcatcgcactcagagcaacattgggtagagacttagaaacggcattgtccttacctaggcagtcataatccagaaggaacactgagctgagcctctgaggtccatatatctacctagctggctctgccactaacagctgctttgctttctcttttccaaacaaaatccctccctgagccatgctttttctcagttgtcaaggagagatagattctttggtaagattagcttacttccttgtgatgagcctccatgttagctgtaattgtcaacttgccacaacactaaatcacttgggaagagacttgatgacagattgtctgctgtgggttggccagtggacatgtctctaggaaactgtcttcattaagttaaatgatgtgggaagacctgtccactgtgggcagcaccattccctaggcaggggctcccaaatgtcttaagggagaaacctagctgagtacaaataagcaaccaaatgggcatgatgcatttgttctttatctagtcttgacatctcctgaagttcctgccaccttaactttcccacagtgtgaactgtaacctggaattataagctgatagaaaccccttctcccctaagttgcttttttgtctgggtgtttaatcatggcaacaggaatgaaactagaacaccctgcaacccaacaactatgtaggatatgtgagtgaatacaatggcatggcccatggcaaggaacaaggctgacacagtacagggctcacaagatgccttccataacatagttgatagtacatcattagccatgttgatgcgtttgggtagtgcttggccttatgctccccaaccgtacaacatcactcctatctctacctccctgaacttgtgacctacctacacttcaaatcttgtcttccctagcatgctatcactaaggtagcagctcactaccctaagttgtctcaggagctctccctctgagtagccacctccacccaggtggctatacggcagacaaccacagtaccccactgtcaaaatctccttgtcctagaaactctgcccaaattcattagcttggtattctcaggccagacaagctgtctccaggcaaccttccaggccttctttaaactcaatgccttggccttcttggcccttggcctcattggaccaatctccagagtccaatgatgtaccatgtgctgctcatacaacttgctttccttgaagacatcatttcctcccttcggctttcaagatgctcatctacttttgaaaggggaaactaaagagtgagcaagctttctgtcttaggcacttctcctagctgaccgctgaccaaccaaaaagtccccccttccctctggtcagaaattttgttgtttgtttctaaagcaagatattgatgtgtagcacaggctttctttacacttgtgattctcctaccccagcctcccaagtcctaggatgcacatcacatttagcctttctccagatttcttggtactcatcattgaacctgggacctggtgcatgctaagcaagaactctactgctaatgtccgtgcttatttcccacctcatcagacaagaggattggacaagtgcaactatgacatcattccctccctgccaccctgtgtctgccgtggctgtggtgacatacattacactggcaaactatcatcatgtgctgcatgggctcacatagaagatgactctgaaatgggcctgctccttccctatttcagacctaagcaggtttgtctcagagccctccaaggctcctttcctgtggtggactgcccccacaatctctgtgacagggagggtaaaacaggctgaggataataatagatgtcacactagcaataatgtagtactagtagtggtaatggatataactactgcccatcccataataaagtacctacagtgggaaggagaaactggaacatcagccatgagaagcttacccatggggtggagggacattcaatttgggaattccaattgactgtctcaatttttccagctcatgtctgtcatgtctgctggatactttgtacaccagtttgatgatacttggatatctatacactgtgtgctagttccccttttactttggcttatgttcttaaacttgctcattcaaaattcaaagtatggctatcatatatcattctcattactatacagagcagccaccatatatgtggaaggcatggctttgcccctgttgcacaagcatatgcagacccagaacccaacctcggttgtctctagggcaaagtctattcagatctctgtgtggaagagcaacagaaactacctatagaattagatgaggggataaatgacagtcccgtcccgtcccgttccccccccccccccactccagcagcaagccacatgcaaatcctcatcagatcctctcttggttcacaaaggtcctaactgtcctctgttttcccccttgtagcaactgatctggccagtttctctgtcctcaaaagtgccaatgtccacctcccctcttttgaagtcagccttcagctagtgccaatttaactctttggcctaagctcaaagaaggttccttggatcccagggtcctgctctcccaccagataatttggctgagttcctcatgcagggcatggagtaccttccccactccctccagcaggcacctatcctaaacactgacagtaaggatttgagtgagactctcctccccttcttcatttgcattcaccttcttgctgaagaagcagtttctggggaactagacatagtaccccaggtcccagcttgatctttgatccagtagctgatgaggtccctgcttattctaaatgccagccaattaactcttggctgaacccctacctcaagcccaagaaggtgacctgcacagaacatatttcaaagtcctggggataagttacctggctgcatcagcgggaaactcctgacccagagaaaacccaaggaagccaccaaccagggctgaaataggaaaggaagccacctaggctaggtcatgggcctggcagggataagtgacatccccacctgcccatttcttctccattctttgcactgaaacactgataacctcagtagccctttggccccagcaagcctgccttagtcacgattcttaacccaaaacaggggctcacaaggcaaactggtgaggccaagtttgctataagtagataagagaggcaaggtgtgcctgtgtgaaccctaactgtggagggcctaagtgacagaatcagaaacagggcacctaagaaatataagaacacagcatgcatacacacacacacacacacacacacacacacacacacacacacacacacacgcacacgcgcacacacacacacacacaaacatacactatactatacacacatacaacatatcccctacacaaagatacactataccacacacacacacacacacacacacacacacacacacctataccccacacatacatacacacacacacaccttgcacatacacattgtaccccaatacacacatacatcacacatacacactgtatcccacccccaatacatacacacatgcacaccagaagctgttcaggagctcgctcacacactacagaataggacaatgaacccaagcaagttcttcaagtcactagaggacagcagtaggaacttgtataaaccaacacacacatgagcgtgtgcctaaacgcacacatatattctcctctcttcctctccctctctctttctttatgtgtttctgtgtctgtttctctgtttctgtctctctgtctctgtctatgtgtgtctatgtgtatctgtgtcactctatctctgagtctctgtctctgtgtccctgtctctctctgtgcctctgtgtctctgtgtctctgtctctctctctcataagtggtataggtagacttttgagccctggactgacaaactttgggcatggttttggtttatgttgctataccccactctttatcctgagatcatacaggtatggtgtgtgcatgagagattttgtgcccacatgtgtacatctgttttactgactgagaaagttcggtgtaacctgcaagcaggttgtgagtgcacaatgctggcctactgtctgcagatggccctacactgcaggcttagatatgtgtgaagataaccatgctgatctgagagctccgtggagcactggccactcaccccaggtgacctggagaaaaatcagagcatcatcacctctcacaagcaaaccccctttgcagatacaagaccacctcatataggaggggccagggactcaccaggactctgccagtcagtgtctgggcggatatcatcacccctgcccagtccttcacagatgtcatccagccgacctcggctgccaccacctcctctttttcgtccactggcttgagagtaccatctgcctggctggagccattgtttatcttctgggcctcctggcaacagagagaaccagagttgagacataggaaacagctggatttaaatcagatccttacccataaagaatccaaacccaaagggtttcccagatgagggaatgtggcataaagatacagaggtggggaaggagagatccctaaggattttattttttaaaaaccaagctgtggagattgcttaatgggtaaagcactttccatgcatgtgcaagaacataagactaagtcctccaaacctaggacaagctgggcatggtagagtacatcttaacttcagcactcccacagaaagatggagcactgagacggcaggatctccagatccctggaagctcacaggtcaactagcctggtagcatacacaacagagaccagccaaagagaggttctagctcaaacgaggtggacagagaagactgacacccaactggtctctgacctccacgtgcgtgctgtggctcccgaagaatcctttcgtaaatttccatttagaacggccttgggacagacaggaggctgcactgttctttgaccacttcacatgcctgcctcaggtcacagagaagctaagtcacaatcctcacaaagtctctgcacgagtcaccctgccttcctagtgccagccttcctccatttactaatgccccacctttccctcggcatctatgccattccaaagggactcaggatggcctctcgatgatctagcaatgatgcagacagataggtcattcattctatcccttagtgcttggactagggagagtcagatgacctctgccaagccaataagacttaagtatggtccacttgctggaacagtcagggaaactgaacccttccctgaaaggaagacaacatggatcactaatgtcatcatctgaatgccttcatccagcggtgtctaaagtccggttctttgagttacaagaggcaataagtttccccttgcagacttgaaatatgcttaaagtacagagccttcagatatccagagcccgtgtgaagctggtacacatttgcacacagtgccgaatctagggtgctctcatcctttggtactcaaggcttgcttctgcctctgtttccttatgtttttcacccaggcactctcagtgtctcaaccactaccctctgaaaaacattaactctcttctcccaatgtcactgttttgtttcactgttctccatagctcttgaaccctctatctacagtccataattcactaatttatttcatttacatcccctgctgcaacactgctgtacctgacacagtcctaaacacaaagctagcatagtaaatatgaaggaaattgggcatggtgacccacacctgtactctcaggaggctgcagcaagaggatcatccacaagtttaaagtcagcttggaccacagagcccaagcaaataaaacaaaataaaacaaaaataacaacaacaaccccaagaaatctaaactttggatgaatggctacaaagaattctgagtatctgctctttgtcacctccagagccctgggtttggggatacaaagtaaaatatagaatgctcagtcaaatttaaattccaggtaagcaaatatctctataaatatgtccaaaatacatgggttatacatacactagagactcgtcactctaaaatcaaatttcaatagatcctactcaaacacccactgagattattaatgcagatggagatggaaaaagatgtcagcaaattatactcatcacttataatactggtattcattttcaaagagacaaacactggggatcattgtgctttggactaaagtgggactggggaggggaaccaaaggcagaggtggaaacctttgatgaggagaagggtgggcacagtgagaccagggaagtgggggaggggaggactgggtgagtcgttggtcttggggatgtccctgactcccgcttctctcctccagctgcccctggctctggtagagtaggactgagaagctggggctggaggactggatgagcatggcaggttactctccagtgctttaagcagcaggaactagaacaagcccagtgggagcctgagggaaggaggccttggggcccctctgatttgtgtgacatctgctgctcaagcctccgaggctggtgtcagtggtctgttaactctagtcctggtgctgaggctccaggaggactggcaggatgtgatctttgtcagccatggcagatgagttacatagtccaaacagaaacctagccctcctaccacttcagggaatgccctgtgagatggggacaggggcaaaactgccagctccccagaacgaaacagtgcccaaaggcacataacagcaactcagtaccaagtcccaaaatgtcccacctccacctcatatctgacattgacactggagtgcactggttctcaggctcaagctagcaccaaaatcaaaagcccaagtggtattcggctactcagagtgccagacctgctccagaacccacagttttatctgatgttcattcctgaggttgacttagagaaccacaggccttgtttatcccaaatagatgacagacttaaccccagcccgctcctagaatcctcttcagccagaatcacctgctactttcagagcaggccaatgaatggtgagggctaagggaaagatgtgctttcaacccaaacgtttttgagacagggtctcaggtaacctcaagtgccttaacttatatagacaaagacgaccttgaacttaagctcccctgcctctacctgctgagctctgaggttataggcacacaccaccactaccactttatgcagtactagaaatcaggcgcaggactttcctcacgctaggcaagcacacttaccaaatgagctacacataacaccagccaactggtctctggctgccacctctgagggccaatttcctgctgcttgaacctggtgtctcaaaggacagacacttttcagcatggaaaaggcccagaggcagggagtcccctgcagccaccatggttttaatgcatctataattcactgcacaagaggtatacggcgcatagcgtgctatttcaccaaccctcttacctattgttttacaaggcattcattattttaattgctttatgataggcaaggaaaaacacaaactaacagaagataatgcccttgttattatttgcttacactagatgttgtgagcgtaattaccacacgtgggaggcaggactgggggaggggccacagaagcagggagttgcagcaagccctgtgccagcctgccaggttagctgggggattctgtgcttagaaggcaaagtcccacacccctctactaatgttataattccacataccagagggaagggggtgggacctggagggttgagtggccctgctgggaacattgcaggaggtgagaggggaggtgagaggcattagggtaaatagagtttactagagcagtgatgatccccacctatgaagtcagaactggctttaacaattaggatgtaaaatttttctgtgcattcatctttcttaaatccagcagatacatgccatttcacagaccattttacagagtcagtaattgacagcaggtgtcacctgggacagcagagagcctaagggctcaaggtatgagcagagagcccacgaggacttgggtgtactctactccctttggtcatgttgactctgaacatttgcgtcctttgtgcagagtggggagaagcaccccactctgagaaggtgtgaaaggcacagcggttcaagcggtgttaagtgagaccccaattgtcacagcttcccaggaccactgggccctgggaaggccattggtctagagtaagcctccttaaagtgacaacagaacagaagacttctgcaggtcccagcaagactgtgggaccctatccagcacagctagggggaattcccacactaggcaggctaaaccaagtgatgtcttagatgcatcctggctctcggctccataggaccaatctctcctttccaaggagggacagggttgtacacagtgaggcagtttctgggtcctgggactttgtgtctccccttatcttctatggcagacatgctttgccctgaatggcaaagcacccatccaactcccccaaacttgccacttccctgaagaggactctaccactgacaagagaaggcaggatatcactgtgtgaacttctcccttaccaagagagatactcgctgcaacctttggactacactgctccatcctcaggaggaccaaccaccagacatggaaacagacacaaagatgcttagaggaggagacagaagcatacagaagaggcagagaaacaagtgggagtggggcagtagtgctggcaaagctcccaccctgagtactgagtctgtgctacagcttccccatccccgtcaccagtgtccaccttgggaggagtcccagtaaagagtccctcagctttctttcagaggcccctgagttctatctatcccaagccccgcccacccactcatctcaactaggcacagctgtatggtggacttgcatctagcctaagtgctgcagtctgagggtaaagaaagtctttagagaaagtaggcatgggaagctgagagacacctaaaagcagaatggtctcagtcccctccggtaggatgtggggctgctttggactgtctgcagcagctgactatgatttgcctcatgctctaacagacatgtggttttaccagctgcagataatttctgtgattgtgtgaattttggaattctgggaatgtttcagagggtatataaatactagggtccctgagagtgtggttgttggccatttagggaggttgaatgttgtttgttagcagccatagtcaaagaagaaacaaaagaattagatttagggctctctctctatctcatcctttttctcttctgtctggtgttgggtatgaaactgggaggggtataaagactggaaaaaagagcccacgtagtagcaaagaccagatacagcctcaagagtagttcaggcaatggtcatctggaaaggagaatataggcttttttgtttgtttgtttgtttgtttgtttgtttgttttaagctaatcataatcactttgtcactgtgcccaacacccttctgaaatatcccctctcttctctgaagacaagtcagtcctcacactgtcccacccattcctatatgtcaccagagggtctgaaacccactcctctcactgcagctgcattggattccccgtgctgccagaactgttcaggactacctctacatagaggctgttagcattggtagctccctcggccccagtatccacacactcgtctcctgggtgttgcctgagacactcatctgatccctgaccctttcctaaccaccctagtggacataccatccctgtctaggtaagatttttcatgtctatctggaaggctatgtactttcatcactgcagtggagctacacaggagagaccactgtcagctttacagcttaaatactgcagactccagtaagtacaaattcattttaatggcgtagaggaagaaagaggagggctgggaaggaggatggtggggggggctatggagaggagcaaagaaggggaagaagagggaaggagacagaggggaaagagacaggaaggaggaaggagaaaagagaagaagtgaagagaaggaaggaagagaacgaagaagagagggaaggggaacagagaagggaaagagggaggaaagagaatggggagaaggaaggaagaggggcagaatatgggaaggaaggaaggaaggaaggaaggaaggaaggaaagaaggaagaaaagaaggaagaaaagaagaaagggagaacctaagaggaagagggaagggggaggggcatagaagagagctgcagtaaatgaacgtcagttcttggcaggcacaggatctggctaatattagtaaaaagcacagtaatgataatgacactggctgccattatgagcatgatcacagcagtcctatgaggtaggtgctaatgtcctcatttaccagatacagctgccccaagaaggcactgtcagaatttaaaccccactgtctgacagcaaaaggaggggggcacacaaatctgtcctgccatctcagggacagatggccataggacaggatgaatatgggggtgactgactctgccagggtctgggaacggtctgtcaccattccatgtgtgcagtgcagccacttctggcactacccgtacctcaggggactgtcctcaaggtccttacacctcgggaggttagttaaatcaaggtcagaggaacaccatcctttgtcctccaagaaccactccagaaacataaatcctacttcaaggagttgaatgtcaaactggaaatgaacatgggtggctgacaggatgtgcaaccttcctagtgagagctgagattcaccatgcaggagaagatctgactttatcccttgtccttcacatccccagaggctcagctcctctcttatcagggcttcggtgtgctaggcctttctttccctggttgggtcctgtatgccctaaggttgtgatcagaaaaaaaaaaaatcacttctccgtttccctctggaccatccaaggggctagatgcatctcccatcctgggaaactcatgctggagcctagagccttaggaccaagggacagatcaaacgaccaactctagagagcctttgtagaaggcaagaacaagaaactttcatctcttgggcctcatggccccactgtgctttcacattttccaggttaacatagtaagctgttttccctgagcctgcacacacagattcccctctgagttttactgttccttctgcttaaaccccttcccagccacactccatgcctttctctgtgcccctccccatctgtcaggctgagccaggcacctgcacacagatgcccccagctggacgtatggcacaaggagcttctgtcctgccagacagatggtgacagttggtgaaactggacctgtccttgggaagtccatagcccagtgtcaccctgactggtttctctgaacagaaacacctgggaatcaaggagtagtgagttaaacccatagttctgtgtcctaggagccccagtcttatgggggaccacagagaaccatgctgtggggacaggggagggaggcccaggccttgtggcactctgatcaacgcatctttgagctcttgcccaccatcaaggctctgtgccatttacacatcagtggttgtgactttaagggagggggagtctgtaatttccatatacccatttcggctttatttcacaagaatgaccatgacattctgcagcctacttgggctgaaaactctgaaatatcatgactcaaaatatccccccaagggaaggagatacctccatgcctccatacaaaccatcatgttggtcctgtgcccctagggctccccagatctacagtgggaagaactgtcctcctttcatgcccaccccactgccagaaatagaagaagaaagcccaccacagcctctagcacatcctgggtgggaggactgcagaacatgggcattcccccaggtactagtaatcctgcatattagggcattaggcagattaccaaaagcagctcaagcataatgtgggtgctgccagctgggatgttcgtggccagagttctatgaatggacagctgagaggaggcagccatgggagactcccggagagaattagagcagaggatccctcaggtcccagccagagctggtgaggaagggcagcagaattcatttctgcccttgggaaacccacctatgcatcctctccctggctgcttagaatgttcctcagaacggctgcagagaaacccattctcattaatgcctgggacattggatgaggccatcccaaatgaccagctggtgttcttgcaaactattgggcaacagatccaggaatggggaccttgtctacagatttggaacacagaagcttaaaaataagctcagacaaagcctactgttctggagttagaatgccaccagggtataccagttgtccctgccacagttcacatgcttcaggaattttcagccattgctatccaggtataccagagattctttctccaaagcacctgtttgaacaattgcacttcagaagtctttgtggtagaaaaaaaggtagagaaaggccaagtgacctttaacaaaagctctgggcctcacattctcacatatgtcatttccctcactggggtcatgaagaagtggggcagggatccatccagttcttctcagagtccttgataagctactcctagtactcctagtactaaagagcatagggacagctagccctcagaaaattcttggccccctctatctcaatagcaggccaagttctccacttggttattttatatcagcacaagagactattctcatgagtagcccaactgatctttaaatctgatctagactaagtatagaggccaggttttctttctatcccatgattgcccatatggacacaatgtaccaagaatcagacaggtgttcacttcaagatgctggttattaatatcactgattgtctttcatgtgacagcttctaaaaatcaacatagtatggaacatagtatggaacctaaattagattgtagtcagacatgcatgaaaaggaatttggagaaatgtcctaagatagggactgccaagctgacccatgaagcatgagacatgttctcaaatgccaacctttgctacttccaattaataagtcatccctcaagctttagtaatgaatacatgtatctttgcagaattaggatgactgacccctttaataatactagtggaagcctagagttcactgttgggaccttggagatttggaagggttaaacaaatatatcttctatgaatcctgtgtcagggtatcttgggcaagtctaaggcagctggctgacctgcaaggaggcagacaccgaactgtcagtctgtagggcaaccccatgagcaccacccagatagaatggctcaaagctgactagaaaaaagaaccatcgagagtcccagtaggaagaccagctccaatatctgatcccagccggcaggtctgaggcaaagccagagcgtcagctggattagtaacagagacaattgtccaaatgctttgtgctatctctgtgaatgctgttaccaattaccaataccacagtgaaacactgctcttcccatattaaagatgagtacctgaggtgctaagtagtccctatgtagcccagtggccttacaaagctgccggaagctcatttccttcaaatcccttttccttataatttgcattttatgagcacttttcttgtctcaaggataccatgtaaccctacaaaacttgttttcttttctggaaaaaaaaaaaagattaaaatgactctcagagtcgccgtcctgtacagagagtgctaccaggcaccttggaacatttgtgacctttaggaatgaggagctgaacaccataggagatgcagatttgaaaaataaggtactcataagaaactgatgcagagaccccatggataaaaagtggctgaaagaggtgtacaacagccaggctatgtcagaattataaaaggcctgatccctggctccaccttactgaactgtgcaaccttgatcaagctatatcaacttatcttagtcttggtttcctcaatggcaaaccaggccaaatatttcctcaggtggtccctgtgagggtcaccataatataatgactataacagtaagaggatgagaagtctgtggagagcaactggcactctctcagtgccaaacaatgcacttgtgtgagcttggccatgctctgcccaccaagatgctagaatctattatattcaaagtaacacatctgatctctgtcaaattctccaagcaagaactcattgaaataaacaagaataggaaccactgaggtccacaggaaatctcaatgccatgggcttaagaaagaaatcaggaatcttcattgcttgtgttaaattcattttttttattcaagtatgaggggagaaaagacagattgtgaaaacatgggtgtgaatgtgggtgggatctggtatttatcaacttgacaagatctagaaacattaggggacaaaccactgtacccatgtttgaggaattatctagaataggctagctgaggtgggaagccttacccccagggtgagcaacagaattccctgggctagagccctacctacatcacgcaaacagaaggaagtgagctaaacatcagaatctgggtctctcttggtttcctcgctgcatgtgtaatgtgaccacccatttcctatacctgctgctatgccaaacctgtctgatgagttgtgctttagaactttgagccagaacaaatgtctccttccttaagttgattttggcaggtattctgtcagagacaaggaagctaaataacaaggaagagctgaaggtcctgaggatttgggggtcttacagccgttaaatgggtctgttcagtatcagaaaggccagtttcctcacatctaatgttctcttagctcttagacaattggtcagccagcctccagagagaagtcacagaaaagaacaaggagagggtcaagagtgaaaaagggagagaagaaagtgagcccagggacaccactgggatgaaggtcatcagggcctcaagggacctcacactgcattgtaaaagggtctgtaggttgactcttaggtgtagtggttctataggaacagcatgaaacacagagccacactgtccagaatgctgtctggaatggagaggccaacataactaaatgtagagggtcagtgaaagacagctgacactctctctggggaagagctgtccttttctctgacattgtgccatcacttcttggttgggtattaaattgccctttgaaggaaatgacaatgatggtggagttggcatttgacagtttctttgttgggcctttgcttgtcagaataagaagctggcagccttgtgaaattctgtgttttaaagtttaattgactctcccaggaaaagtctagacattgcttacatagtacagaccctcattctacagatggggaagtgaaggcacccagatgtcacactcacactcgtggagcccgggctgtgtctgtcacctgacatgaccagaaaagtctgaatctcatgaacatactcttggggatcagagcttgaactttcagtgatccctgcccatgggacagagggaagagatcacatggttcccactctactgggtcctcagtttccagcatcgggtgtccttgatgtaactactacaggaaataggcagagctaaccctgcctctctgtaagcactgcagttttccctgtggtcctatgccatcatttgagtcaccagtggtaaagtattcatcagctcacagcaagtatggggagtgacaaggagggactcctttacatagggagaaatacagagaaggaagagtaacccataagctatcgacaccaatgcccagtgtccaaagtgacacagagccttccacctgtttgctacttgctcttgtcctggcagttcctggtaataccttcttcactctgggaattggccatgatacaaaagctccatgagggttagctggggtctttccctaatctgttcaagttacatccttagggtcctgagctgtgtccctggagttcagcaggctccttgagagaatgactgagtgagtggacctgcctttgttcttttcctcattctttactcatattgtttggaatcttaaaatcttgccaagcatcccctgtccaaatctcaaaagcagaagtacttgaggcccagtctgcatgtcctctagccccagtgtggctgtgccctcccaaacgttgtgctaaactgctctgtctcaaatgacttgactgaacctagtccagctgacttccactccacacctttgtgtatttcgttcctctcctgggatactctctcttcatttcccacatcttcatccaccctgaccaaatcccagggacccaatgaagtcctccacctagatccatctctctgcagattcctctttcttctcccatctttcctccaatactaaacagggctagaaaatcttgttttcttattatatcttcatgttgtaatatttcaattctagaagctttcagagagaaagagagagagagagagagcactttggtgcagacacatgtgtgcaaacacatgtgcacatgcacacatggatgcttgtagcacaagcacatggctgtgaggattccccaacatgaagagggaaacagtgtcttccttaaccattttctaccatatatttttaaggcagggtctcacactgaagtatacttcatgttttctagtgagactggctggccaaggaagctcattgggtcccagaatatacctatctctgtctactagcactgggattacaggcatacacacccaggctatgtttgtgacatacatgccagggattcaaatgcaggactccgtgtttgtgcagcaatcgctcttatccaaagagctatttccctatctccctagctcctttccaaagtatatggcatgtagcaaaatgatgaagagccatgcattgatgaatttaggctgctcactcagtagacaccggagaggcaagcccagtccccagcagtgaacctctagttaactcaggctaacttccaggactcccagcacaacctacagctgtttgcttaactgccactcctttgcaactgtattggtcaatgcagacgctactacaggcatgatcagacaacacagggcctcagagaagaccatgcttcaccaggcacgtccatcacaacaagatgaattcccttgtttacaaaagcagtcatcccacctcaggaaaatcgccactgtgatttaggacctagtcaaatctgtgcctatagaactcaccggctgagcatttgtctgcattttccatttgctgaacttggatggggtctgaatagaggtcagaaacctgttctactttgcccatctatctgacttccttttgtttccatttgaaaacctaaagcctagcagggcaaagaggcatgatgaaacaaaaagatggcccagtcagtgaccaggcatatggaaggtagacagctactcctctaagcaaaccaaacttagccaagccaggccctggctgagatcagaaagttcagctacctaagactctgggtcctcactctaactgaatctaggctcctagcacagcagtcaaataggagattctggtgttactatgaaatttaaccattacttaatagctaggggagagacaacttgacttttatttctatggggatcagaaaacttctgttccttctagacaacctgcaatgagactaaacatagcctacagaacttaagctgtctccctgccagccccaggcccactgggctcctctgtggagcctgagatccctccaaccctggacactgaaagaagctaggcagctatgagagtgtcctttctctaggaaggcttttccaaaattatatcaggtttccttctaacccagcttgcctaacatggttgaggaatgtcttagaaactggtgtgattcagtctggctttggatgaagttttccacccagacagaacttgctgagcgtctgaaggcatcagtttgcaacactgggggcacttaaatcctttccttgtctccagaccttgattaggaagacaggcttgccaagtagtaggtccaaccctctgatgaagtcagagaaaatgggaagccagaaggtcttatcccacacacttatgtacagagaccttctcccgccagcctcgctgcttctctttgattttgagaacctgtggatctcgttgtatgtagtacacccactctgaatagccaaagagctactgttgaaagcaattttgtacctgaggcctaaaatggatcacatacacctttcctagaagacagtgaagagccctgtagatttctgtccctgtgaaagctgtcttcctgctcagatacagtgccttctacaaacataggttctaccccagaggaacctctccagaactgaatggaaatatagtctccaaaccatctgtaacttgtctaattaattgtgagttatttctaaactgttgtttgttcttccagatttctacctgaggacccacaaactcgagacaccaagaaaaggcgcatggtttattgtgacacggagtggttgtcagtgcttggatgaagagggcagggtggggaaggtttcagatctcagaagtctcttgccaccatctaacaactgcagagagacaagcccaacaggacagaggctgctgtctaaacactgccaggcatcacctgggcaggcatcccacaagcctcctgtttctatagcaacggctagtgttgtctctaagactgacagatgggaagaggtcttttctgtgagcaactcctgaagtcctatcactgggttacttctaaatctcagctttcctatctgtgcagctgtctctgtctgattatggcaaccaatatttcttagtcttctaacatcagacatgaggaatcagccaagaagaatgggtctgtacagaagcttctgagaatgccattaatatgactctcctttggccacaacctggggtttgttcttggaccctatatcctcaggatacccaaatcctcaaatgcttatgttctgttatagtttgtctcctcaaggtttgtctattggaagcctggtccccagtgtgctagatagcatttacaaaaggaaggagggagaaagttgttagattactcttggtctcaaggaaataaggctagttcccttaagagtgacatgaagcagaagagcaagcctgacccttgaacccttccatcttcctgtcttaccttgcaatctctggctcttccatttgctgccatcataataccatcctccatgttaggggtctaccaaggggaccccacaggagccaagcagatgctttggaatctctatgatgtgtggctgtataaatatgactccccccttagactcatatgtttgaatgcttggcccatagagagtggcactattaggaggtgtgcccttgttgaaagaaatgtgtcactgttggggcaggctttaatgtctcatgtgctcaagttatgcccagtgtggcttatagtctccttctgttgcctgtggataaagatatagaactctcaactccttcttcagcacaccatgttggcttgcatgctgccatgtttcctgctataataataatggactaaacctcagaaactgtaagccagccccaatgaaatgctttcctttttaagagttgccatggtcatggtgtctcttcacagcaataaaaacactaagataccatctttataaagctcctaggtctagaacagaaaatgaatgaatcattacatagaatgtcatagtacttgtgtgtaacccacacgatcttcctgaacactttggttcttctcttggctgtttaccatatctagtacaatacaaatgctaccccaataaaacaactacaagaaaaaaatctaaaatacacaccattttctttcaaatattttcagtctgtggttggttcaactcattgatacaaaaggccaactttcctgtatttttgacccagctgataacaacttagattttctcctaattattaactattttgtactttaaaaacattcctttctgtggatctgttttgcttcactattttcataaggctttaataaattaactagacaaactgctcttagggggacctatctccactgccaggatttatgaagtttctcctggcataggatggaaggctcagactacagataaccctgtatgctgaccctgtatagcaagggtaggaatgagaaaaccttggtgaaagtcattgatcctagaacagtcaggggctaggacaccagccagaaggggaaactgaaaggtcagagaggtaaaaaaaaaaaaaaaaaaaaaaaaaaaaagtcctgggctaggaccccagaggacttgtagaagtgacaaggtgtttttggctcctgctaagggcgatgcctataaacaatttcatggtaggaggatgtggttcatggtttgcacctgcctggggaggctgtgaaatgaaacaaggatgcacctggaatggtaaggggagagaagcattcgtgagtggacatttcctgccaccttggattaaagtgtcgagagcatgaaacactcaagtatcttggtcacatttctaaaccagatagagagcttcagggccactgaccaggctcatggcttccctagtttgaccctgcacccattgtgtgctgttactagtctccgtcattaagcacatgttgaattaattattatactcctcaccttatcaagttgtacacattcttcaaggcacagtttaaaggctgcctctaccagaaagccctccaagatatctggatcatagtcaatgtctcccagtggtgtttttcaacagtccccacaacccctgtcctgcctgtctgtgtaatctggtcccctgtcatcaactcatttatagtagagtcttatggctaaatccatcaatcaccagagaagaatgtcatgatcatgccctggagagtgtcaacacacaggaactatggcttcacagcaggtgtgcaacaagcagctggagtcgagagtgcagagccagagaccaggaaacaaggatctctggttgtcaggggcgtgtagaccaacagatgagggtcagaagcatcaggagcctgaatatatgcaatccgttctacctccctctgcaggtgactactcagcctgtacttgctccaggcctgtactcactcttcgtggtggcacaagagacttcgcagcattccatcccctcactcctgtgctacacgccttggtgatatccataattccctgggtgaagttcaggatctttagagtcctagcacagtttctgttcttgtgaaaaatactgtgttcaaaagctacacatggaagaaatggtttaggtccttttatgggttacggtctattatggagggaagtcaaggcactaatgtggaggcaggaatggaagcagaagccatggaacaccactccttattgcttgctgctatactgatgctcagctgtctttcttatatagcccaggcctattagcctaggaatggtaccactctcgatgggctgaaccttcctataccagctaccaatcaagaaaataacccacacacatgcccacaggctaatctgatggaggcaactcttccgctgagactcttttttttcctagatgtatcaagttgacaatgaagattggctattgcactcagacatgctctggagtaactgacattcgatggacatctgaccatgtcataaaaagactacttctggtctctctttctttaagcatcaggtacatttgaacttcctcccatgcctcttttctgtctcagatccttatgtagttttgcccttctccacccaggccagttaatgactttttcctagtctttaagacttttatctagaagacctatcttaacctctccacctactccagcatcaccaggagtcaatgaagcctcccaattgtatggtctccacacttctcacacttcctcaaagcatttgcaaacatgaggttaatcagcttctattactatagcaaaatatacacctgaaataatcagcttgaagggaggggaaaggttagttaagaccaagagattagagatttcagtccatggtcatttgaactgttgctttgggcctgtggtagcacaatacatcattgtgtgaggatgtggcagaggaggcctggttacctcatagcagtcaggaagaaaaagagaacaggaggtgctaaagcctcaatcttccagtcaggagatctctccagtatcccaactcctttctactaggctccacccctacaggatcctcatgtcccaatatcagcatgggctgggggccaagcctgcaacaccagagacatttcagatccaaactatagcagtacctctgtgcctccctgagacaaggaccagcccactgtaatgattcctgcaatggggcataaagctactgtttgctactaagcactatagggtcactactacagagatttaattctggcattgtacggtgaaagtggccctagatgatacataagcaaatgaatatggttgtatgcaggaactgaagcagacaccaagcagctcctcatagcttactcagtcttctttcttacccaacccagaaatacgtgcccacagtgggctggccccttttacactgatcactgattgtgaaaatgtccactagatttgcccataagctatgttcatggcgatattttctcaattgaggtttcctcttcccaaatgaccatggcttgtgtcaacttgacaaaattcaaaccagctcaaaccccaacatgtctacttcccctcattagcacaggaaaccctgatccacccctccaacatgttatctataatggtttgcgatgtatcccctcaaaagatgtgccttaatcttaacccacaaaacttacaaaggtgacttcattcagaaacagggtcttttgtggatggatgtaagcaagttcagatacaaagctactagaggaaacacacacacacacacacacaccgagagagagaggggagagagagaaagagagagatagagagagagagagagagagagagagagacccatatggtaacaaggacagaggtaggagttatacagccacaagccaaagaatacccaggaatgcccagggttttgcaatcagcagaaacagtggaaagacaggaagaagtatctctccagatatcccagaggcagtggctcatccataccttgtttccaaacttctggtttccagcattggaaggtaataagtttctgtgatttgagagccatcactctgtggtgtttccctgctgtaaccctaggcaacagaactctcctttgaaactgtaatgcacaccagtgccttttcctctgcaagagaccatgtgaatgataaagatacaatgggcttcaccctctgctcctctcatcagcaaagctaaccagtgagtgtttgcataggggtctctctctttggaaactagacatctaataatgggatgtcctgtagggttgtaccttgaggttgaacttagcaaaagttgtgttattattttggggtggggaggaaggcagagaggggagaagagggaaggagacagggagagggagggaatttagggatgaatgaacagattgatgaggtttggctgtctctcatcctgtgctccgaaagctacacttttatggggaacctccaggagaggatattcagtgacaaagacacggcttgtcctctgggtctgagctataaatgccatctctaattcacatggcaacagctaagcagtagatattttcacagcctgagcaccctggttttagtcacaaattatacccctctcctcctgggggggaaataaggggtgtaattttttattctcaaaaagattagagcagacagagctatgagcctggcaccttaagagggatccaaaataagagaatgtagacacagcttgtcagtgctgatgtagagtaaggagaccagtctcaaaactgaaggccacagaataaagaagtcagaccaatcaaatgccttcctccctcttctgcccacaccaacctagagctggctaccctcacacagctacacacagaacctcacacagaacctgaaagcttcctgctgtttcaatgatcccatactgcagcagggtataggactcctgggtacaacttccacatcaggacccatggaaaaatagagggggatctgatgcttcaagacagataggccagagccctcttccccttgtagctaagaatcctaaccctcatgcttcctgaagccagcatctatttcaaatgttcagtggctttagaagtacaaccttagtctttggccaacagtgtgaacttctgagacacaaacatcccagcctctgaggacagtactgaagattggctagctaggagactggcacaccacagtaaaatccacaggaaattgggtggccataccagctaattggaagaagaaggcagagggctcacaattctaagtcttggcttagctatagtgatcaaagcagcttgggtaaattagtgagacttcatctgaaaataaaaaaataaaaaaataaaaagtagcaaaaggtctgaggccgagttcagtggtagaacctttgcctagcatgtgtaaggccttacgttcaatgctcaactctggggttgtggttggggaaggtgggaataaagttatttttagtagagactcatgttcctgggtttgcacctgggcctcattttgtttgtttttgtattaaatttaatttgctgcacaaactagaacaggtccaaaccctctgaaagcttggtttttctgagctacaaaataggaataattataaatacatggtagtggctttaggaggattttgagagatttagatagttcagacacaggactactaatttgtaaagcactatgtgccaagactgagtctaagcaatgcacctgtaggagcccttctgtcctctttagcatttctgacatcttgtacagatgaggcctcaggagctcagataggtcaaggcacctgtacttcatcacactgtaaagaaacagagtgaagctcaggcaagtgggctctggagcctctggcctcactatagagatttgttcctttcctaaacgagctgctagagttacggaatgaatgcttgtgtttacttagtcattccgctgtgcatctcccaaaaaaccagggtgctcacagcaggctcacatacaaggaacacagtctctctctctctctgggagttgaagatccatcagggtaaataagacgagtgcttcaaagtgaatacaggcagtatgtgacattggcgaggaagacagaacatggtggggaacctgagaatgccaggagataagtgttagtggcaggcagatttaatgagggcggtggtatgtctgcaagccttgaaggatgggcatggttttgacagatgcacacagcacggctgagtctaaattagggcccctcattcttcttcctcatagcaacccatccatttcctctagcaggctcactgcacttttaatgccatggctatttgcagattgagttgtttaacagtgatctccctcctcagaccccaagctgggagaaagaacagtatggtactgtattctcttctggttcagtggggcctcactttaccctgggctagagagcacacagaccttgcctaggtgtctgagaacagaggatgatttttagtccccggtgtggaatcttttagtgaaatgccctagaaagtccagtaattctcatggcttttcctccacagtcaagggtctgcatacacctgaatctgttgggctgagcatcctggcaggataatacactgagttctgtttgtcatgacatctgtcgggacagagcctgaagttttgagtctgaagagggggaactgattgcagagcagagttaacagtagagcatcttcagaccacagccccagacagacagggctatctggctccatcagcaaatctctaggctagtttcgggtgttgtgcaagacagggacattcaaactctccttctgtccagaagggggaagagacagtagcaccctcccaccagtgcagaccaaagacaagctggggtggctggaacaaggtcatgggccccagagcctgggcctgctttgcctccccttcctttcatttccccatttgtaaagtaggcacaatatctgtcccatagagctggattgtggaacacacatggagggttcagtacagtatctagaacatactgctctccatataggaacaatggatactaattatgagaggacagacttcaggtagagtcatcttcaagagcttgatgttggtgttgtaaggctttctgctgaacactctgacaaaacttactggatatgtgtgtgtgtgtgtgtgtgtgtgtgtgtgacataaagaagagggttgcccacaatgctttatcctgagccctccttaaaatatcaatccatggaatcctcgtaagttcatgcaaaataaactatcactacacagtatcaatgaaggaggaaaattaggcatggagaggtggagaggtttgggaactgccttaggccacagagctggaagaggcacagctgagatttaatcccatgcagtctgtcctggagctcatgagggaagttccggaacatggcactgagtgtcatttttctggtctagatttcctgtcctagactcttccctttttcagcacagctggtctctgcctggaaagggaaagggatataaaaaggagggtccttgtctggaacacctctaaagccccacagcacctaccagaaccttgcagaggggctcctgtctctccttcctaatgggcctcatgccctgctgctccctctcaccttctctaacactgtcttcatcggggactagaagaccaagtaccacactcctttggaggaacatctgccatgagtccacctaccctccagggcatctaaacccactgccttgacataagtgaggaatgcatactgcatccacatgaaccaggatgtgggatggaagagaaaaggtggtacatatgtaatggaacattatttcttctacagagaagtaaaccctgctatttaaaatatggacagaactagaaggcagtgggggatgttacaggcaccaaaagacagtaagcatgtgatgtctctcatctgaggaggctcaagtccacaatctcagaggcacagagaatagaagagcagtaatcagagtctggagatgggggaatgaggggtgtggctggagactgttctacaggcctgaatttcagacaggtaaacagtatcagctctgaggttctattgcacaataaggtgatgatactgaatactgtattcagggtttccaaatacctagaaggttgtttttgagacagggtctctttgtgcagtcctagcttgtctggaacttgctaagtaaaccaggctactggctgcctcctgagtgctggtatttaaggtatatgttaccaatcctgatcctacctagaatactttcaatatccataccacaaagtaatgaaaaatgtatgaagtgatggatatgctaattaccctgactggattactacataatgaatacatatactgaaatgtcaccatgttccccataaatgcatacattgttcattgaacatcaaaagaaagcaaaattaaaaaaaaatgcatgtctatagggtccccagtgaaggagctagagaaaggacacaaagagcttaaggggtttgcagccccacaggaggaacagcaatatgaactaaccagtgctcccaaagctcccagggactaaaccaactatcaaagagtacacatggtgggactcatgggtctagctgcataggtagcagaggaaggccttgttgggcatcactgggaggggaggcctttggtcctgtgaaggctctatgcccagtgtaggggaataccagggccaggaagcgtggttggtgagcaggggaaggggggaggggatagagggttttcagaagggaaaccaggaaaggggataacatttgaaatgtaaataaagaaaatatcaaataaataaaattattccaaagtaacagcaaaaacaaaaagcatgtcttacatggcaacccatctatatcttctccatcagtaagtgcatgatgggattcatgggatattgcctagatctattctaagggatgtgctttgctatcttttatttttgtttattaacataggcttcaatgtcctaacttgatttcataatccatttaggggtgttgcttacagcttgaaaatttttcctaggggaattcagttctaatattcagctcaagcagtttccgagcacagtgcccagaaattcttcctagaggctgcctttgagtatgaagataccatcctgggtgggatagccactcatttccacccctctcaaacaccaaatcatgtttagagctctgggtttttgggaaatcagtgtcaactggatgccaagaagctctcatgagagacataaaatatagagcttagttatggcatccaaattggttcaaatccccattctgctacctcctgactcgtgcatccttggacagcactgtagccttccttaagggttacagagaaagggtgatgttcaaagtcgctgtagatagtggctgtgagggtcagctgagcccagagactgcatgcagctatgtaacacttaatctatgctggttgcttgcacaagagagcccacccttctcaccttctcatcccctctctttccatttccatagttaccaaacaactatggaagaaatagcaacacagaacatgaacacactcacaagagtctgagcccatgaaggcggagcccaagattttgccctctgtcaccatccatcacggaagctatttcccaggaagatgttttccaccacccgctccaatcttggaggatgagaaagtctgctgtgtgaatttctctcattcagccttctctgacaaagcccactgccctgcagatggtggatctcatttctgtgacaaaatgcctgacgaaagcaacttcaggaaaggaaggtttgcactggctgtcagtaaatgagcacagtccgccatggtagaaaatcacagtggcaggtagtcacactgcatctgcatccaggaagtagggcactgacctctggtgctcagcatccttactctaggacccaagcccaggaaattgtactacccccatctagggcaggtcttcttaccttagggaagctatctagaatttccctcacaagtgcatccagaggtttgtttcccggctgatagtagatgtcaaacatgaatatggtcattggaagttactgataaagaacaggttagtgaccgagcccccgtgggtcaattattccttgttctgcctttcaaggaaaaagcaaatcacccaacagatggctggcatcctaaaggatagcagagcctgatgagaatatgcccaggattgatgcagaggcatgaatgcagagagtgaccagccatcttggcttcctcgtggccccatggtaagaacaagcctctacctggagcagaatccgagagaggcaaattaagaatgaagccacagacaacacctgctgatttccttgaagctgtcctggcagagcccttctgcacatactgatccaggtcccacttgggtctctgcaggccagcctctgatgggatttccaccactgcctttggttagcttactggggaaaaaggcaccagcagaatcaccagagcctgggtacccacagtgttcatagagaccacctgggatctcaaaacttcatgaggatgagtaatccaagaggcagaatcttggaatctcaggttctgtctgcaggaacagttcttggcagacagagaaagctttgaaatccaagtttctcaggcaacagagcaaagtcaactcctagcttagcactggggtgagaacaaagacagggaaggggggtagggtagctcatggtcgcctcacctctctgtagcctccgggctggagaagtgccaggccatggtcactgagtatgtggacagatgggcatgtgggtcttaagccaggaatgttagaatatctgcaaggataagaccacatctctcttgccttctagagaagtgtgaatcagggacttcacaccagggtaagctaggtggtatatcaggttgtggagggtcaccaagctgcacggtgttagggtcataggtatggaggcagtggccgaggctaccttggccccgttttgtcagcctcggcacataggtgggttgaggagttgtatctctactatggatgtgtattggcattttctgggtttcactgctagatgacagttacaatgctaacttgcattcataacaactaaaatgtctctggtaattatcaaatgtcccctaggtaggaaagtcatcaccactttagacacccctagcccagcctcacaaccgcaaatgatcatgagaaggatgagttgaataatcatgggtataacagtacccagtcacctacacatgatttggtgacttctgcatatgttgcagttcagatgtgaaatgtccccatagactcacctgtttctacgcacagtacaaatgctgtgtggtgacatgttttggaagactgtggaacattttggaggaggaccctcgctggaagaactggatcactctggggatgattcttaaagttgtgtagcctagccccgcttcctgtcctgtctcactgcttcatgactacagaagcagtgtgtccagcatgtcatgatctatctgccatcccttctctgccatggtgtcctatcttcaagaatgagacaaaaataaaacctcttcttcctcaaacccctctgtcacatattttagtcataggaaagcaattaacatgttacatgaatatactaatggctttggaatgttctgtgtcatatccttgtttagcctcatattttataatagtttcccacaaagacccattcctaatatttgtttctatcatttctttctatctttcaaagatgataatgctccaaaggctatgttatggaatcttagatatgtaacataccaggccacccaacttcctcattgaccagtgaactcgcaacaagtaagacacactttaaaatcccattcatggatgtgtcgagaagctgtgcctagaactcccagtccagtctggcccactcctgttacacaaaagacttggatgtaacccacagcactcaagatgaaaaaaaaaaaataagtgtcctcccagagccactgcacaattctgtttagttctgtacccactgcttagtaaccaaagcattctacagattgccccagggaacacagaaagcaggcacctggcaaaggtagtatgagaaggtcttgcctatggtaccagcttaaggaggctttgagatcttatccactcacagttcatccttgcacaacttgcctgacgatctaagagcaactcccacgagccatcatctccttaaagatacagtacacctttgtgtcagcgctggcaattaagtctgaaggaagtaataaactgttggccaacaaaggccaaggcctcgtctgtcaacttgccttgattacaattcacaggttatcaataacacaacaaaggccccaatacctctgtgtcctcttcatttcttggatcatatcccaggctgcagagctgccttttacaatagcagctctgtgatctccggaagggccactgtccccctctgtgcttgtgccattgtgagagataagagaccgatttctaaatcaaaccagcttgtccagtgtctaccccaaaaacagcacatcagggtgcaggcttctgtcactccggcccagacagcacacagtgagtggttatttactatcctgatggtttcaggagccaacacatagcactgaagaagtcatagactggtttccatgctcagattgcaaaccagaatagtaacagcctgggaaggaaatgaaccaacagggtgatgttacttgattttgtacggggattggtatataatcaatcctccgcacctctagtatcctaagggtcttctgtgagccctggggagggacaacagtgtcccagggatttctatgatccccctttatctttccaagcagagagctctaaagctataagaagggcaaagggctggttggcacaactctcctggattacccgattgcagcgaggccacagaacagagagagccagaactagcaggtctctaagcagaagctgaatgctctgtggccagagagcagccatccgtagtaaatgcagcagcaaatggtagtgacttgcagcttctgtggagcctgcattgcaaggcaaacaaaggacaaaggacagaggactagatgctgctactgtgactctgggccaggggccagaaggttcaccctcacactcgcaggatgtcagactcaggactatgtccttgctcctccttctgttccccctctcctccctgcaccttcaggtgaccagtgttaggcaacaccaaaggacaggccagagggacttggtctccctgacgattgaaggcagtgaaccatactattgtattacactctttcacacagctaccttttactgacctgctctaggcactaggtagttgctactgtccaaaacaagagggccctcatccatgtgcttctgatgtgttatggtaccacccaacaatgagaaaacaggaaaggcaaagttagacatacatgatgtgtgcagaatgcagtgcccagtccaccatcagaaaactcagagtctggaattgatctggtctctgccccacagtcattttgacagtcacatccattcgggtacaattgaaaaatttaaaaaggtaaatgatcaacattttttttgaaatcagaaagtaaaatgcaaaagacttctattctagcctcagtagtagagctacagcatgacaaaggggataatacgggtatcaggaagaactgtggggaccaagagaggatcttggaagtttcaggtgactcagaggttagggaggcaaagcctcagaaaacctcttccagctccaagggggaagaacagcatcagggaacgcttagcttcctcttctcaagctgggctggtcagagcagaggctgtgagggattaggcagtggtcccagtgtctgctttaatttcatgcgctcagagtcatattaggctatacgatgtctccccccatacaaacctgccccatatgaactgtctcccaaggtggagtatgcctgccttggtgccgtgtgcctcaggttatcatgcactctggggcaaaatcttatgtggaaagaaaatgaaatctctagttaatggatccctaggcccaatctaagtgttaaataattatcccagtgaaacttttttaacaatgtgtctcagcctccaagttctccctttcttatcctgcacacagaactcctatgttaggcaccatgggactcaaacttccttcagcttcagtcataggagacaaggagctacccatatacccaagctagtccaagagccttgctgaccatgggaggactggacacatggccaggaatgaccagaaggcctgactctcagcttctggagaaagttccctcagtcagctagttttacgtgtcaacttgacacagactagagtcattttggaagagagaacctcaggtgagaaaacctgaacaattagcctgtagaccagcctgtggcatttgcttgatggggaaaagcctagctcatcactgtaggcagtgccaccacagggctggtgacctggggtgctataagaaagcaggctgagatggtcatgaggagcaggccattacatagcaccctccatgacctttgcatcagctgctgcctccaggttcctgccttgtttgagttcctgccctgacttccctcagtgatggactgtgatgtggaagtatgtaagctgaaataaacccttctctctctaagttgcttttgttgatggtgttttctcacagcaatagaaaccctgacaaatactccccttggaggaactgaccaataggaaatggactattactttgttgctttagggggaaaatgggctccagtggatgcctctctttctgaacagtgtgcaatagcaccagtggcaacaagaaatgagagatgcatgcacttgagtgacagctgccatcaagagcccctctccccaagcacctggacacccacccaccccaaggggaagcaggctaacatatgtgctgtgtgacaaatctcagcataagcccacactcagcttgtgaaaaggaagtttgtatctcttttatggacagtgatgttcctctttacccactacccagccccaaacacacacgtacacacacagacacacacagacatgcacgcacacacgcgcacacacacaccttgaagttcaggcctcattaatctctgccccacccctgaccttaacccctctcagcttctcaaggaatagacttttctcctcaatgaaaccttaggccctggacacaagtcattaaacacttgttcaataaatagaatcatggatgaagtacaggctcagtggaagagccgctactgagctgaaggacccagccacttgcgatatgccaccacggagcttcagaaaggagtctaagccagtaggggttgattcaatcaggaggacatagtgtctcctgagcacttcaaccatgcacatctcacagcttctatgtccaacaacttgtaccactaactacccatcctctctttgctgtagagaatacaatttactgaaactttctaacgctgccataggtgaagactgcactgatagcatgttttagaagggaaggagctgttggctagatgctcagtggatgaagaagtatgctgctgaacaaggtgccctgatcttggtccccaggacccacacatcctctgagccccatgtttatgcttttgttggggcatgcagatggccatacatatacacacatgcacacacacaacacaaaataaatacttttaattgtatttttttttcaaaatagaagataatcttcaaagacaaacacagcctaaaagaaaagtaggttggtagcttgtcactaccagctggcaaagggccattgctagagattggctctttgttctaagatgcaagagggtgctgggagttcaaacaagagtgaagaaaactgatactgtgtcgtgtccgctcttgaccagcaagaacaacacgaccaccagtccttctaacaacagtttattcagcaaacgtcagtcttcatctctctcgcttcaactttctccctcatctttttctttctcccatctttcactctctctgacccgggcctctcactcttatatactctcagccctcatccactcacggcaggccatgtcacctcaccaggcaagcagcttcagctaatcagggcagcaggggcatgtctccaccaaaatggattcgccagtatcctggtgcacctgcgcagctctcacgatggtcgtggcttattttcaggtgtatgaggaagtcaggtgcaagtcataagacttaagctgcagtccctggcgccttcttgggactgctgccacacccgctcctcacaatactggaaccaccttttcctcggtgttcaatctcctgtccctggatggaagctgacacacctgacagtgtgtgcttcaggaaaccaagaaccttaaacaaactctaatgtttccctaaacatccatatctatggcacaggttcatgacctcatgtcaaaacaaactgagcacacccacaaacggggaggctgcctatgggaatcagcttgccgaggacagacgagcccagggaggcttctatgagtaagctcgcaatcctataccctctgccctacagtgggaccaagaactgtaaaaacagagaggacctgaagccctggagacaaggccagatgtggagatgcatgccttaacgccagcatctgggaggcagaggaagacagatctctgtgagtctgaagccagcctgatctacatattgagttctaggagagtaaaaactatatagtaagaccttgtctctaaattaattaattaatagacaagctgggtgtgcagcacaagcaggaagatcgctggttagaggccaacctgagctagctagcaagactgcctccaaaagacaaacattaaaaagaagaaacaaacaaacaaacaaaacaaacaacaaaccccaatgattcagtcagtggcgccccataggtacagaacatatctgtattgcaaaacaatgaacccaagccccagcaggccctctgccctgcaagaggcttgcaggagcccatccccagcacagatcctcaaatcctgccttcacaaccagcacctggccccacctccccatccatacagacctctcatccacctccgcgatagccctggtacagctgagctagagcaaactcgctaggctaaacttgaggctttccaggttaaaagcctcatgttgggcctaaccattaacagggcacaaagattcttcacttacccaaaacaatgccttgtggtctgagctgacccaggacacttggatgtttgttaacaaattattaacgacttggcagcatctcagactttaaaggaaacttgctgggaaaggaagaaatcccagttctgcgccactgggttagcaggctgtctgttaagtgcccattcaattaatcctcccagcagggttaagtatctccgttctacagagcaaggaaaacagacacagagaagggagtgacccggctgaaggtcactcagccaccccagcagtcagaactggggctgcttacagcagcatatggcgtgaccttcccaggaagggccctgggccttctagcatcagcctgggctcaagtctgtcctccgggcacactgaactacagctgtttgccaaaatgagcatgcataaatgctgagacgaccacagctgtcctgtgccacagacagcccagtggggtgaccacagttcacagcgatttattttatgttttaggacggaaaggggggattcaaaggttctcattgcgaagaaatgataaaatgttttaaaaatggaaattctaattaccaagactaccgcccactgtctactcacagcggaatgccagtacgcagcatgccataaacctatgtaactcgtgtgtgtgtgtgtgtgtgtgtgtgtgtgtgtgtgtgtgtactcatctatcactctccatcttatttttggagacagtccatcactatacccagacttcactattttggctgactggcctttgagtcttggggacccactgcctctgatagttcccctgtgcttgagttcgagacctgagccattgtaactggcccgtacacaggtgctgagctcaaactcgggtcctcatgcttgcacggcaagcactttataccctgaaccatctccagagccccaaacacatataattcatatctatcagtatctatcagttaacacacacacacacacacacacacacacacacacacacacactaagtcctagaactccggaagtagagcttaattactgtgtgtcagaggcactaaaagaaagctgctttgaagaaccaggctagttggtgctgggattcttggccccttcctccccacttgcagccatagctttttttgtttggaggcaggggcaaagtgagatcacgttcatcttattctcagtatctgcttcccctgacccctgcctctgtagcttagaacctagcagatgctagctcggtcgccaagctgagttgggctgggtctggatggagcacatctgggtatcttgagagactacacttttgagaagccaggcccaagaatgagacaggaatgaataacaaaattgccatcgaaggctcctttgtcctcaaggacacagtgctcacagaatacagtgtgagtagttcccaccagggcatgagaaagttattcaagccaaaaaatacagtagctttctctccatgcctcaagcctagtgaataccctgcagtaagagcagggcctgggagggctgttagagaaggggagtctgatgtacatatgtagagtccatctaaccctcatgccagttgagaaagacacctgaggttttcagtagggattgtataagttggtacatgtgacattaagaaatccaacaaaaacaacatgacagtccacaaggttaggtccaggagaaaaaaatgttatgaatgctatttataatctttctgttgaccaaaaccacactgtgaagaaatgaaccatgtacaatagcatgaggctctcccagcccacccgcttccttccattagccaggcaccgaccctacacagccaccatatggcccaccagctatgcagccccgtcagtcctggaccgcctgagtggcttaattattgggtggctataaatagaagtgccggacaatagattatgttctgtctagaaaacaaagtcaaggtccccatttacccattttcccttcatttgagccactgaactccagatagctacagtaacccagatcttctgggtccctattcctggtttaagtggcagtgctcagtgttggggaccactcatgcttgttacactggggggagggaggcttcagagaaaagatcactcaggagtcttaaaaagtccatgtaccttaagggctcaagatctgccaagaaggtccaactttttgacaagtattgtggtctataaatgtgctaggcaatagtcctggttatcgagagtcacgggttctacatacttgattctaatcttttgcccaaggctcttatccctcaacaccagctatactgcctagtctatatctggcatcaccccattcctggactatagcagctgttccaagaagtaggtccctccacatattagctatgaaagctggagataccctgccccacccccagtgactgcaagaggaagcctgggcccacgggtgctctttccctcactgtcttggcctctgaaaagcatccccgtcagcttcatcatctccagaacaggttcaggatggcacatgggcatcctgttgtcccaaccctaggctgttctcccaacccacctcaatccctcaacaagggcacagctttggactcaaatgaggttcgtatggcttcctggcaatgagaccccaggaaactgtcctgcttgctcaacatctctgttcatctagtcaatagttatagttccctagcctcctgatatggcttgtgatcggtaccaagcatacatagcatagttcatttgctagggccagtccttgccagcatgcccatttcctgggatgacttactcagactcctgctttggggaaaggctcagttcggagactgacctgaagctcctcagaaataaatccttgaaggaagagcagcaaagggggaaaggaatggggggatggggtgccttctctctgtagaagctgcaggcagcagatgaagcacagtggaggtgaccaagcagccagatccctaaatagcaactaatcactgtgattggaattaataatgaagctgcacctgctagctgacttgaagctccccttaatttgccacctggcaactgtagtcactgtcttacccatggatctgtgggctgtaaataccaggatgtcatgcactgtgccttgcatggctgctatgttgagagacactggtgttcaaagactctagcccaaactctcagcactatgaatggtatccacagactgcccaggcatcctcacagcttagaaatcttatcccagtgggctctgggaacagctaggcagccttctgaggcagggggtgctccagcaaggaagtgcagaaacaaactcagaagtttctcccaccacgccatgacaagcagggtcagggcaagccctgctggatgaaaagggattccctgcctttcttgaggagtgagaaggagtgagaagcaccagcagtactgcacagatcagtttcagcacgacatgttcattaagagaaacatcatgtgtgtgtgtgtgtgtgtgtgtgtgtgtgtgtgtgcatgcatatgtgtatctttcaagtgtgtgcagatgtgcatgcacgtgtgcatatgcacgtgtgttaacctcgggtatcattgctccagatgtgtcccccttgtttgttttacattaggtttccccactgacacctggggctggctaagtctgctggagagcgagtcaggggatcttccagtctctgcttcactagcactgggattacgcgcctgacacaaggcccacatttttacagaggtgctagggattgaattcaggtcctaacgcttgcacagcaaacactttactggctgagtcatctccccagcctgtattaagagaagctctaccgcaaggcacttagggtaaaggaatagttactgcagcctttcagattttcttataggactcaccatcactgtgcatccaggggaaggtaatataggagaaacccaaagcctagcccacacccaggtacgagctgacagttagcagggagccacctggcttggtgactgttgatcttgaataacaggaaattctatcaccccaggaacctgcttactgtccacagatgtcacaggggacatcagtcaaggctcaggaaggccagcctgtgtggtcactctatccgtcctccttcgtcacatcccaaaatatcatggtgacagtaaaagcagggcctctgatgacacacagaggaaactgagctgcgtgtgacaggaactccagatgtggcccatgtctggcaagagacggtatgggttagagagcagaaggaacacaggctgtggaaatgaatgggaaccagtgaagggaacttctgatgtccagagaacctgaaaaaggaaccttggtatctgaccaggcagaacagccactgcctgtgacatgagaaccttgaagaattttcagagtccatctttcagacaagccagtctgtcatcacctgagtagctttgtgatccccagcaaagagacagatctagacgtcaattagcctctccaagcttaggaccagggatatgtcaccctaaagttcccttgcacacctctgaagggaaatgagtagctgggtagggttttaaaggccttggtcacctgccctaaaagctatcccacatatctccagaaggttccatgtcttagaagccagaatctatgagaagaagcagatgttaagcccagctctccaaggcaagttagccggaggacaacacgtgaaggtcactctaggtcatttggaaggctcatcacaggttgcttgagttttcttaaagggatggggacaacagacttcagagatcatctggaaggcaaactacttaaggtatcaaaggaagtgactctggccatgtctcagtgggccagcctcccaaccctgtcctctatgtgatgctttgtatgggggctcgcaagtctctgccctttcctacgtccacggccctgctcatctgctctgcccatcaggaagttttccttacccttttgcctctgtcatcttctgctgagccttgtcttcttcagggctcagatagaccacaggattctgcagcaaagtgttccatggacatgagcaggccatgttccctacccgaggatctgtggcccagtttcaagctgtcagtagacagcccctggcagttactttcttcagtgtcaggctcagctacagagaatgaccgacttcactcaaggtcatcttcctaggacagaatacctggcaagaagctgaagaagagtacaaaggcctagagactttagcgcccaaagatcaatgttactgggagaattcaccccaaggatacctctgggtacttttacttcttggatactgaccccaataaattcagaatgtgtttctagagaattgggtaagcaccaggtccagtcccttgttaaatgcacaggtgatgctgagctggcctttgataataagcacacggagatctcttttggtggagataaagtgacaagaaaccaaggacatggcaaccataagacccctgcctcgatggcattctgggaaccccaaagcatgaaagccacatggagagacacttcctctaggatgtctctgatcctaggatccagaacattgacttcctgatacctcattgtctaaagtaatagtagcctaaccttttattccttggaaggctgacttccgtgatatttcttcagtagcaaacaacactgctggacacagcatccaccaggacaccatgaccctattgtaaatactaaaaaggttatatacagagctgccattaaaacaagccaagcctcagggcaactaaaaagatgcttgcagatctgagaacagcagtcatagactaatgttctaagggaccacatgacaagtacacacagggatttatcttgtctgagtcatttgtttttccagagttcaaagttctcaggaatagcaatacaggatgtatctgtccccatggggctgccaaaaagctctctgtcaaagaggtaggaaaaacaggggtggatggctcactggtttacctagagcccataagctcccttaaccagaggtaggtcacaaaaccaaagcatgaagactttggctatgctagaagggatgctgtcgtttaggaacttgtgccctggtgctgccataggcttagatcttgaagcgatcttgcaaagaagagctagcatcatgaggaagataaccgtttcctagcacaattttaatctgagtctgaagacggcacagtatggcataggcaactgatcagtcattaccaatggggataatgcctcccaggggccaggctctcagtccacattcactttatcttgggacaaaaaaagcaagtgtgtttgcttctggaagaaggagcaggtaactaacccagagacacaaagagaagagcaacatctggatttgaactcgtgtctctctggttcctgcttgggctccagcccgggtttcttctgggaagaaaggaggtgtctccctttctcttgagtgccttcatattactcaaatgttttgtaacagcaggggcaggctttcctacacgattccaaaaagcttcaaaacaactgaaataattcagaggtaagagaaatatccctgttctacaggaaaaaaaaaatgtgtcacagcttgacagtatccacccacagcagtggagtttctatcctttgccatgagacctgcatttctagaaatctatcctgaaaaaagaagcagaggtggacaaaggagtgtgtgcccatgcatctctctctctctctctctctctctctctctctctctctctgtgtgtgtgtgtgtgtgtgagattgtccatgcatgcagtgtcttacttacttaataacattatgaaaacatgctctgaataacaaaataaaaaaacttcagagttcagcaacaacaacaacaacaaaaatgaagatggaatggatatccttgtggttgacagtgagtggaaggtagggtgctgatgctccttaaatgctttttgaaatagtagcaatgggatgtcaccacaggcttttatgtttcaaaataataaagcatgggctaagggggatggttcagtggataagaccaattgctatgcaaacataatgacctgcatttacattcccaatacctatttaaaaagccaagcaaggccaggctgatcctgggagctcaatagccaactagtcaaaccaaaagaagaaacttctagttcagagagagacagaccatgccttaaaggaataagacagagagattgaggaagacatctgacatcctcttctggctttcttatgcacaggtgcaactatgtacacgcatgtgtggatgtgtgtgcgtgtgtgcacatgtatcaagtagaagatgaacctgtgattcataaataaagtgatttcttacctaatgtgcatggagcttgagtaggagccccaaaaccaatgtaaataaatagatgtaacaaatgaactgagtactggtacagacgtatgctggaacatactcccctccccctgaagaatgtacaaaaagcagttaagtctgtaggctttgaaggctagggtgaggggagaaaatagaaaactttcactcactgtttataacattagtgatcatttgactatcacattagccaccttgttcttttaattaataagttctttaaagttttatataatatcgtccacttgtgttttcggaggaacttttgttacataatgaaacacacccaactatgattgctgtctgtagaatgacagatggcattggttttatatataaattttttgtattttcaaaggttcttacaataaacgcataactgtatcatcattaaaagtctcgatcaaactttaaactgctctgctagttaaaaaaaaagagtatcttcctctaataatcacatgggaaaatgagttctggttttcctggctatgtcttctctcagactcaccaaggatcatactggctcaagtccagagccacaagagccccatgcatcctctacacagggccagaaacaaacggacaaacaaaccacaacctacaacaaaaaccagtagacccaaccctgactggcttagctgggtttctagctgaagacacagtccctaagctctggccttatgaaacaaagtgagcctgacctagtggtcccaaaattaaaacaagcaacaacatcactctttcactctgagaatacgatggttggtgaacactgaacagataataaaatgagcctcaagcccctgcaggggatctgtccaccagggagatgtcatgacaatgtactgtagggtcaaagagatgactgtgccttggacactgactcccaaagagggacaatccaagcaagaggtatataggcagagagcaaactctgaccccaggaaaggaaaaaccagagccctgacctcaagattcagggagaaaggctgggcagctagggcactagaaggaaactcccttccagtgaagagcacagcagtgctttccagagtatctggcctatgacttgggtttgaagttgaggtacatccaatagaggacaggtgctcactgtactgtctaggcaatctgcaccgctggtggaccatatgcaccaggtatgagccctaccatttagtagggaaagctttcagacacagctagattagggcacttacattttaaaagacctatctacttatgtagttcaaaaccagagaaaatagatgtgcggatcataaaatatgcttgaaatttctatggctctcaccatcagaaaccaagtctaaaaagcattttccctaggagctcttggctctgattaagcttcttggtttgtgtctccttccctcacccccaactgtgctcatcaaagtgaagaggaagcaagcagcctgtatttgctcaatgatcttcacagccttagacatgagatggcatttcgggagacctctcaacgtccaacaaggccatgcccttctctcgcccataactgtccacaagaaggaaggcattgccatattccagacttcttgtcactttccctactcctgggcagtatcatccaagtcctttgtgaagctacaataagcttatgcttcagggtcatacctaaactgtgattggaaccctacattgggatgtaggatgaccaatcacaaggagagagatgcattgagtgggaacagttaggcagaggctgagaagatgagatgtgactaggatcccaccagagttcttttccagatgggctcaggggttaacttttgcaaaacttgattagaaaatgcaccaagtgcgttcatctaattgagcatgaaagacatattggagggtgatgaggaggcgaggtgacaatctatttataatcaacaaggttgtatccagcaactaggataattatatattttggaatgcagaggaaagttcctttgtaagtgggagttgaggaaccttgtcaagaaagcttgtatctgaccctattaagtaccagacttattagccttgtgcttcctttgaccagtggaggctgagaaatctctaatttccagtctaacagtgacacttctccagaagtgatcaaccttcttctgcttctgataatgctgacttagccccgatcctcattcgggaatggggaagcattgcatctttgtgtgttttttatgcattcatgtgtatacaagttcacatgagtgagcacctacacatgttacatatgaatctagaggccagaggtcagcctcaggtgtctttcatcagtagtgatccaccttgttttaagacagggaatttcaacaacctgaaacttgtcaagcaaggcaagctggttggccactgagccccaggaaccgccatgccttagcctcccttaggctgggtctacaagtgtatatcaccgcaaccgccatttttttatgtgaattctagggattgaggcaagatcctcatgcttacagagctacccttcacgtatttcatcccttcattttgctttcctggttcttatttaacttttgatgtcaggtctatgccaactgagatgctgatgaaaatgctggacaccggaacatcctttgaaaagtgggactcagaccttatctttgggaaggttctgtaatcccatccagagaacagaatgcagatgcctatgtgaaagaacaatagtgaaggcaaaagctcacccagggcaaagttggtccttggggacacctccctgctacacatcaagtcactcactgttacattttaagggaagtcatggtatggacccacacaccagtttatctagattccatagtaaatgtcaattttgcctttactgtgtgtaccctgaggtcaggctgaccccaatgaccattactcaggatccacaagtactgagcttagcaattcaatcacagtattttcaaggtaaggcctaagatcatttgaatgactatttcggagcccagattctcacacccactgagacaaaaccaggcacaaacatgtaaggctagaaagtcttctcctataagccaaagactctgcaaaggaaacagcaggggacacacccaacttcctacatcatacagtgcaaagcatcagactaaatacaatcagagcaaggttttaaaccctggggaattcaaacagagcaagccagcaatccctggacctgagcagagcaggttgcaccaatttctcaccgaaagatatcaaggccatagcacaaagagtcaaagaggtctttggcttcatcactactgagatgatagggtggagggattccaggagggttgaagagagtagggtttgcagggaggtgcaccagaaagtagagtggcctgggcaacaggccggaagttgacagcaggacccgagccttcagctaaatctcatcaccccaggcatgtgtcacaactaccaaaggcagagtagagtaaatgccagagctcacaatgggctttaaacagtctatgttccccctcaccagaatagaaacctccaaactcccaaggtaccaggccaaatcctcacactactgtagtctgcaaagggagctgaggtgaaggtgctctcttgccaccttaaaaacaaacaaacaaacaaacaaacaaacctagagaatcaaactgtaaaaagggcaaaccccagaggatcaaactgttcccacacagccgcacagcccaactgcagtgtcccaggacaaaatgctcaagaatatttataggaggactgaactattcagcgcccaaattggtaaaaccctcaatgtctggcatccaaccaaaaaccactagcgctcaaagaatcagaaagactctacgagagtgactgaaaaagatatgcaaaggcttctgctctcaaggttgagacaggatgatctgtgaatctgaagtcaccttgagcaagagtgaattacaggccaggctaggctaccaccagctaagactctgactcaataaatatttaaataaataaatgctccctaacccatgataccttttagaatatggctcaagtccctgcaacacagagcctctctagcactacaaatgtactttaaagcacttctccagctcccatgaagacattgtctctgtttgttgttgttgttgttctagtcaagagagatgctacccatctcactcatcttccaacacaatgcctagaactttataaatgttactacccatccttggccattttcactggtcttagttgagtgtgttttaacattccaaggcctctttttgtctacttcgttagaaaaactttagtcctcaaagttaaagctctgcctatcaaaatcagtttattagtgaccactacatataaatgtctcctccccaggtgttctttctcatcctgtggattagtgacttaattctttaattagaggataaccctcaaactgccatggtcaaagcctgtcatcactcttggatgatgttgctttttaaaggtcttattagacccaggatgatgcagagaagcaagaaccccatgggtaggcccaagcatctcaagaccgtttctcaatcatccatgtcaagtggacaggatcaaacacaatctgtccttctcaagaacacccaaaataattgtctagaccaatgaagtggcagcccccacaaacaccctatgaatgtctgcctatactccttccttatccctgtcatgatcatctgcagcccatgtagtctaaagccagtgattctcaaccttcttaacgctgtgagtctttagtacattacctcttgttgtggtgaccatgaaattatttttgttgctactttgaaattgcaattttagcactgttgtgaatcataatgtaaatatctgatatttacaccgcatatcttgggcaacccccatgaaaaggtcgttcaactcccaaaggagtcacgacctatggggtaagaaccactgccctggagactgagagtagcacaccagcttcagtttcctttgcttcatcacgccatcttttgtttaaacagaacattattccttgggtatccggacattgctttgtaggcaaccacacataccttcagggcatcacagcatcctggaaggaggtacaggcagatgccattagccctggctcagaggtgagaactggggcctctatgtgagtgggagtaagagtgtcaagtcccatggcaaatgaaagctgaagccaccacttgaacttgggactcctcgaagcaagaatctcggccagctcttactcactataatggcaacattaaactcgcctctgtggtaagtgcacctacttcccccactggaaaggcaccttttgcaatcccatttagtgagttcctacaaaagccatggggttttacctggatcggcacctctcctcccagccgaggtgacgggggcatcaggcagcacaagctgccacactaattccctcctgctaccatcacaagctcccttcaaggacatttccatgaagcctgattgtgcagaaggctcatcccctgtgaaataacaggctaggaagtgcctgcccctgggccagagcagaggagcagaatggacccctcccccttcgctgctgtggcactgggtagaaactgggtcagcgagaaccagcccattcatttaatccaagctccccctctcattcagcttttagtcttcggagctttcagtccaaggaagcactatttcctctggaaaataaacaaaataaattaagcccatgctctttgatctggggcttttgtgtggctgatggactgaacagaagcaatctgctgtcttcccgggcaccttagaaacagtgcaggaattccgatatggcttcaggaggcagaaagccagctcccagccacctgcttagtgccacagttgaatggagcatgacttacgggaagggtctttgccacccactcactcaccaaggcaagacacctgcatgaaccaaaacaagggaagtcagactgtcaatgcctgcaatgcagttctcaggcagtttcagctacatctgtctggttttttgttttgttttgttttattttgttttcctcattcccacctaacccaggcctttgtgtgggctgctggccccactgacaggctttctctcaggacctgaaaaagaaacatcattatcttctcattccatgcacaacttctgaggctctccctttttaaaggagtttgcagccctacccacgtcactctctgctgtcaatctatcctgcttatcttcttggcccaagggaccatcagaaagctcgtgttcacaaggctgctgtctcgttccctttccaatgctgtccctgacccccaaggacagataatatcttgatcagcactgtactcctagcaattagcaaacccccttacaaatccaagtacagagctcactgagaaagaaaactggagatcaggactgtttccagagccaaagctgcccgtagagacagggggatcccagcgtcttcctctacagccagtctagcctaattggcaagctccaggatcagggagagaccctatctcacaaagtaaggcagaaagagaatgaagaggactctgatgttgacccaagtcctctacacaaacggatacacaagtacttgcaaatgacacgtacacatgaacaagtatactgacaaataactaataaacccctaggaagcccaggatgttgggaggggcctgcaggtgtcatgaccctttgacaattaaccttgactgtcagctagactggattgagagacacctaggtaatcagtgaagaacccctctggctgtacctgtgtgggtacccctcacaattagatcctcggggctctggtgtaatggatagattaataatgtgatgtcatattgagagatggtgggacctagctggggtaggtcactggggtgtgtgcccttggagacagtttcttgccttggtttcctcctgttttgtgctctcttttctctgcttcctggccccccttgtgtgagctgccctgttccttcactccccaccaagtggcattcaaacctctgaaactgtgagcccagatccttctgtccttataacagcttctctctggtattccttcacatcgatgcaacgaacatagcagaacacagtccaccctcacccctgctgactcaataccaaaagaatagctctctaagggctccatgagcaccatcttaatgagctgtcagctgactctgtggacaagggagaggaatatgtgtgaggtccctgagcagctacagacctaactctctccctcatatgaagctgcagcctggggaaattggctgcagttcttactagagagctcatgctagctgccaggtgcctcctgctaaaaagaccagattatgaaaacaggacactctgtctctctccaggtaaagtgtggcaggaaagccagaccctgtgacatcaaagacatacactggatttcctgaagtatacaagggacttcttgtaccctggtagagagcagggtccccctatagtgatctggcttgtctatcattaatagtcccctctatgagttcccttgctcctccccatcattctttaaagcactcagggcaagcaccaagctggggtgcaggcaggatgctcatgcctgaagactgggaagcagaaaggttttagcagtttgccaaattcacacagagacagagctgaggtagaactcagacggtgcatggaaagatctcaattacccacctatggctggcacacatgggcaactacccatctatggcttgcagacatgggcaactacccacctatggcttgcacacacaggcaactgcccacctatggcttgcacacatgggaaactgcccacctatggcttgcacacacaggcaactgcccacctatggcttgcacacatgggaaactgcccacctatggcttgcacacacaggcaactgcccacctatggcttgcacacatgggaaactgcccacctatggcttgcacacacaggcaactgcccacctatggcttgcacacatgggaaactgcccacctatggcttgcacacacaggcaactgcccacctatggcttgcacacatgggaaactgcaagcctcagtactgatctggatgagctctctcagatgagtataagatgaaaatatcattataaactgaattatgaagtattgacattcagctatttttaggcttcaggaatggagatttcatatgatatgaatgagtagtttatttggatggctttcctaggcaagaaaggaaaagaggaaatgggaatggaaagcagaggaatccatacagggtgtgttaacagtcaggacatcgctgcaaatgaccaagactcaaccacactggggacctctgggggacaaggccaaataaaacacattactttaaaaatatccagtcctcagatctgttaagacatctcagagcataaaggtgcctcccaaaaacatgggaacctgagttctatccatacctgagacccatgtggtctgcttagagcatctatctatctctgcaagtcactgtctgaccagatagatagatagatagatagatagatagatagatagatagatagatagatagatcaatataggtataggtataggtataggtataggtataggtataggtataggtataggtataggtataggtataggtataggtatgctccactcaagccagggctacatagtgagaccctatctcaaggaaacacccaaatgataaattcagctcctcactcaccctagtcccactttcagatatagctgggatctaccacactggacagcacagcagagggatgtctctaccaaagttctgtgggcaagacagtgtaggatgaagttcttcagaactgcaccttcgggggtggggtagaatccgattcatttatattcccatagaggtctttcattggcaagggctgctcctggtcctgctcactagctcatcctggtggaggcagagcaccagcatgggagcccctgcctggaacaggaatggagggaactgcgggacatggggaggtggatgcttcggttatgagcactttggcacatgatagccgcttgtgtcaaagtccctatgggagcactatttccatcgctccttgtcaacaggaaatgtttctgaacataaagaatctctgctctctgatgcacagagagggaggacaaccagggcttctaagcatttgtgatctgcagcaggacacagaactatagctgtttggcaaccacaaacactgatccaaacgctaaattaggagctgcgcaaagcctttgggagcaatggcatttctgtgttgcctctaagaactgtctggaacttcactagcacagagggaccaagtatccccattaagcagcctgagccatgttactgctgaaacaggcctttgagaaccaccaccctggtcacaaacctggcaatgacaaggacaccttgtgaggaccagcactcatgcgtggcttccattcctgggcttgttcagcataacccggtgcccatagccttcacaggctctctggagtctgggagcctgagttcatagtcccatctcctttttcctgtgtggcttaactgtggtcttgggtacattacctgataccctgccccccccaaaaaaaatcttgtctgtaaatggacagaaaactagcacctgcccagtagtgctgtggtttatattcagttcatgtacataaagatcttacagcaaagatgacacggtttttcctaaacaggccagactgtaactatttttgagatcagtcacaatgtcttgatttttctatggtagtctcgaatagccatagacaatagataggagggaaatgggcattgttatagctttaatatgaaatgttccttcacagatcatgtgttgaacttatctcccagctacggcgctactttgggaagtcataggaagtatttaggatgtggcgcacaatcgggggaagtagaaccctttgaaaggtatatcttagccctggcctcttcttgggattcttctttgctcctggttgccaggaagtgattggcttttctcctccacgcccttccaccatgataatctgccccaccatggtccagaattatgtagccagttaaccaggactaaaacttctcgcactgtgagccaaggcaacctttctcttttgagctgttttctctggcatctagtagggatgaaaagttaaccaactcagacatacatgtttcaataaaactttatttatagatcaggcactgggggtcccctttgacatgaggaccaatagtctgctaactccttcccatgatgcctgttgtccactgagtgttgcatgaatgtttgttaaaagaataaagtatattgtgctagcctgcttcttgggctatatctgcattgcttcctttgccccttgctctggttagccttcaagcctttccagacccattctcaaccatattccagagcaccatgcgcgctctatgcttccctgccccactatttgtgaagtgatgtcttccatcagagaatctggctgctgttgtcaagagattattcagtgtcttcactgtaaagacaggagagccagattctgagaagtcaagtgaccatctcaaggtcacacagcaaggacaaaaacaagactagagcaggaatcctgatatttaattcagtgtagctttccgcatcacaaagcttccacactcggaaagagaggcactgatcaccgggcagtgggagctccctgcccactatttgtccattcccagggatatcccacccttagcttagctccttactgacctcctgcctcagcttttctgcaattgtcaagcacttttaaagcgtattttctacatagcataggcctgggtcactttcaaatctgttgtggattgtgaaggtcctggtgtgtgctgaatgaagctgagtatagtctgtgtgcattctgtgtgcatcctcttttcccgtccactgagtcctgaggaaacagaaatggcccagggggaacaagaggtcttattctgacctatagtcaagttctcctgggtgaattccagagaacctgtaggctggagatgtagtcccaccactgagggcacacttcacaatcctactccaaagtactttgctcacagattcataagacccagactcacagacatgcacatacatgtttttacatagttgtatgacaaatgtgcagctgcaaccacaaatgtgcacacacacacatacatgcacacagtcacacagtcatctaggcacacaaactcatataagcacaagcacacacatttacacaagcacacaggcaggcacatgtatgcactaacacataagtacatgcatatacacatgttcataacacataagcacatgcatgcataatagggcacaaacatgtatcatataaacataaatatgtgcacatgtacatgcatatgcacacagaagcatgtaaatacatatatgttcatatacatatatatatatatatacatatatgtgtgtgtgtgtgtgtgtaacaaactcatagagacccatgcatactattcatacatatacacacatatacagatacgcacacactcaattactgcctaatgcttttagcttttcccttgcagacagatacatcatgcttttctagaaagaaatataagggccccaaggaagaaactggatcctgcttactctccaaggccttgtaccacccacagcatcctagttggtatcatgagctcatctggtactcaaaactaaatcagcggggctgtcacctccttggccttaggtctatggaaagcatgtagttaagatgtctgggattccaagcaagtatcctgggcccttcccatgagggccttctcctgcacagcctagcttgggaacctcagtctcttggcagagggttgctcactaacacctctaccggaagtgggagaaccatgatgaaattcaaaccaagtcatttggccatttgcctggagctagagtcaaaaggtctcctgggctggcaagagcatggcaaaaactaccggctaatatggccctggcccagcatactgcatttctccacaaataaaaaccacaagcctggccctcacttctatctgagagtgacacaggtcatgctcctaacacccagcttcccttcagagcaccatcttgcccaacagtgaatcctatgtggccagaggagactcttaatttcactgactcccccaactcagcagagaggtgcgggccttcggaaacttgatgcatagcactgccgtgctacatcacctggttccataccatcctgggccccagtttctttcaaatgtacagaacagggtcaggggcaaggaggcaaactctccatcttcaacactgagaacacaacaccatggagagaagactccatctgacctgcttcccaagaggagggaccaggaaaggtacaccttacagaagcctgaggaagaatattctccggcagtgcttccccagtgagcacagaagagtcgctctgcaagttaagtaattgatagagcacactctaaaaatacaaactaggttagcactcagggtggttcactgctccagaagagttaattcaggcactcaactctccatggaaagggagctatgagcccacaacagcagactattgggctggggggcttcaccagaaaccagctgagctgtactgttgaaagatagagcagggtaaaagcgggagggagaaagtgggatacagatggaagaatatgtgaggttcaagttctaagaccctcaatcaagactacagcttcttgggctctaccgcagaccacctgaacatgcatttcccaagggcataaatgattctacttaaggttgaagaaacaaaatgaggagtccatacacaatactcgggtctcagtgaacatgcatgatggttccatctggaagaacaaagacctcaaggggagcgctagtcgagacagggcaaagcaccatgttataaagccagggccatctctatttgacatacaccaccacctccagggctcatggtctgatgtagccatgcatttaaaagcatcatccactccagatgcttcctagaggcctttactcagtgtgtgcatgtcagttttcatctgcattcatagactgtggccacaacattggcagggccagacttcataccaaatgagtacattccaatccctccctatcaactgcacttggacatgatggtaaggctgtctccaaagccaccatctacaatcaggttggctgcgcagagttcagtggatgtgaggttgaacacaattagtttctctttgggtggaggggggggtcacagccaccaggggataattcagcagggtcccaggcattagcatttagtttgacttaaccctcatccttacaacacaggagtaggactctctgatgctgcagtggaggtatgtggatatctagagctgctcgggtccataaagctcatcttctgcaccagagctttcatttgcccagaggggaagtcagcttaaagtactaaggcctctccatggtcttggttgttgcctgacaaggtcaaggcaacttgtcatgtatcagtagtcagaaataagactgtaagggagcccaggagcttcagaaaagctgctctaagtggcacagagacacagaagggccctggccaagttctacatccacgagagcctcactgaccttgaaataagccccgatcaggttagaaatgaagccacagagatatgctcatggaatggggaatagacggtccagaccatcgagtataatgttttctactgttattggtgctcatcctggacctccaggatagacacaaatcacattgtcagccagactggaaatggagactatcctctaaagattatactcctattgtctcaggttttgtttttgtttttttcacagaactcatttatttaatcatgtgaacaccagaaatggtcctgccatttgcgaaggtctgctttggcagttcctcctcttttaaccctttaagagtcagaagcgcctgtagtgagattggctgactcctaatcctaggtgacatctgacaaattgcttatcctctctgtgctgttatatcagtgccaaaaattcatgaggaagacacgcttctatacacaccatatctgccagaatgtggctgtctgcggagactggaacttcatggagatgtcagtaagtcagaatgtgcttggtagggtgggctctaatccaacatcactgatatccttagagaaagagaaatcaggacccagaattctccaggagagacctgcagcaaatgctccctcagaaggacccatctctgctaacactgacgcctttatcttggacttccaggctgtggaactggaaagtgtaagaaaatcagttatgccgtgtaatgcctcatccacagtgctgtgttatacaggcctagcagcaccccaaacctctacagtagccagccaccccatagggcaccctcttcacaaaactgggtgaaggtcaaccagcaggtaccaatacacattccctgtgatcttatttctaataaggaggcttcacctgcccgagtcttggcacatagtttcccttgctgtcctcattcacgaaggccactaatataatattatactacagcacagcactgagcaggatcatcaccaactccttcataagtccctcccctctctaccccttcaccctacatttctcagaaccaaagaatatgacttcctgtcttgcaagtactcactctgctcctagctgtaggacatgtcattgtgcctcatacctgatgtcttccaaagcccaataaagaccacccctcccacactcccccacccccaccatcactgccattgccgcatgtcatcaggttagcaacatcagatgtctccagaggcaactgaaggacctggactgttcatgtcttccaatccatggaaattagaagcctcccatagaagcttgggaaaggaagccttccctatgagttcctgtgagatgtgtaagctgatatccacttgggtggctccctggtcactctaggacaaggcagcctagtagtgacagcatcatacctgtgtctgaacaaagtactgactatgaaagttgacagaggggactccttagggaccaaaatgaacttagtagaggtcatgggaaagtcccagggccgtgtgaactgaggaacatctgcccaaagaacagctgggaacaggcctgtaaatggaggggcacaaagaccttcagaaggcaatgggatctggacacatcactctcaaacacagatgttggctaaactgaaaccccagtactttgctgcctcagcaagtaggagagcttgggcaaccatggctctttcccaaactgaatggctctggtgactacagttcaggtcatttataacccagaaaccaaagccactctgactcaggagagaattttaatttgttaatgcactttcctgatcatgggggtgggagaagaatgacaattcacaatggatttgatgccaaaaattggccacagaagccaggaagtagctaagggctctttactgtctgtatctatggcaaggaacagcacagcatccttttttaattttaatcagctaatagcaaagatccaagatgctgccaaaagtctgttggctcaccagccatgctaagcacaaaggcagcggttggggattcctcgcactcctggcacctggctcccagctctctgagtatcttttggagggaagcagaattggggcacaggcagatcttcactggcccccagctagagagaggcaggaaagaaaagcagataaaaatagccaatatggtaagggctacagcaatggaaatgtgtttgtgtttgccccatggatggctgtggatagctcataccaggccacaccttctgaagacaaaggaacctaggactcatgctactcaggattcagcagcaattctgattgaataaactggggaagtgatggcagaacagccattgaggttgttcacaaggcacgtcaaaggaaagatgtggcaacgccacccatggcgaagcttccgttgaaagaaacacaagtcctagaagagatggcacacaggaatgtgcatcgaaggctaccaccatgtcccaagcgccaaattactgagaaagagagtctgtgtcacttctggctgtaccatgatgctcctcggcactttgccggctctcacagggtcctctgtgaatagaaaagaaacactagttcccaagtcttattttagctgcaagcagggttagagagtaaaaagaaacctctccacactaatcctgatcatactgaacaaggcatttaatcgtgttcaaaagcctgtccatgggacccaccacctcgctggtgtctaacttgggaaactctcatcttatttgaagtggccaggtctctctggaattgccaccaaaagctatttcccaggagacatgatttttagatacttgctttgtccttaaacttggattctcctactttgtttctcaaaataatctaatcatggctatgccagctgcaagaggagggaacaccactgtgttggatgaggtgacaagagggcttgcctgcacagaggcacacccctggcttggctacaggcatatactacatactacacagcacacataactaaacaaccttcatctctaccctacatgtgtatgttacacacatataagctccacacacatactatgcctcctttacccacatctctctctctgtctctctctctgtctctctctgtctctctgtctctgtctctctctctctctctctcacacacacacacacacacacacacacacacacacacacacttagaaaccctagaaaccctacatataaaaaaatacatataccatacacgccaataccatacacgctcacatacacacacacacagttacacacactcacatacactcacacacacacacaattctgttctcttgtctttaggagactttagttaacacttgtctagaacgtatcctaggaaacacgttctagactccaattcccccacatctaaaacctaccctatctccttttgttctactgttgtttgatactgagacagacacaactatccagacaaagtcagcttcccagtggttcactatgaactggctactcactctagaatctcgagttggccacaggtctcatctaggttccccctcaggacagcaggggaggagagtagaacctgggggaccacaccatgaagacttgctcaggctctcacaatggtccaagagcactcccattcacggtggcctagatgccgtgtccactgagatctatgggattcatctttgctcaggatgcagtgcaagaccaacatgggctctgtgtagaaacttctcacgcttgggctgagcaaagcaagcttctcaaagtaaactcatttcccagcgaagcatacaccagagtatccagcttatctcctcgcctcgctgtggcctgactggggtcaccaggtaagtgaagtgccgctgctcacagcagggaggaaggaaaggaacacctgtccataagtacccagccatggtttttgggttctttttcaccctctctccccagtcagtgactgtttggttgatttcctttcaaatataaacaaactgtttccccaaaaaggctctcatagaagactgtcgacttcaaacaaccaagttccactcctacatggagcaacagctgtcagtagaacaaccaccagtgggcttgctggacccagaatgggacactcatatcaataaaaacacaggaggccgggcactcctgcaattccctcctaaactggaaggcctcttggctagactgtaaaggccaagggggccagtggctctgacctcaaggtcagaagagtttcgagcagttagatctgacctctatcttgctgagggtccagaaagtgacagtgatttgcttttcagtagaacctgacttctaagataggatgccagagtagaaaggagagctgggtgacccctcagtgggacactggggataagcactagatggtggcttagcatgacctttcaaattttttccaaccttgagagactctggttcaacagaaagaataagaaagccactggagacctccagtcacctgcctgctgggctcccctttgggtctaaaaataagatttccatatctctgatctaaattagctccttaataacgaatcgccatggctataaatatgtgtctttgagggccagctaatataattatcttaatcagctatactcactagaaggaccgccagctctcttcttggtcttgactaaacaggctgtgtctcctttctgacctcagcagtgctggtccttggaacagtcacacagatgaagatgggcctcacgagcttcatcttcaccctctaatggccctgtgattttcattttattctggtatctcacaatctctcctgatcactcaccaggaactccataagtggatagggttacaatttccattgtcataggtgaagcaagaccatgagcatcagatccagtagtgtgagagtatatgatgatctcggctgtgtttccacccaggaccccagaacaggtctgcatttgaaggcagggcccttagaaaaatgattgattcaaaggacgccaccgggtgtgtcttaatcctacacaaccagtatcattataagaagtctttcccacacataggggaaagattaggtgaagacagagaggacagtcacctgcaagccaaggagagagacctcacaaaacaccaactctgcctggacctggatcttgcccttccagcctccatgacaaaggtcatgcacactggtggcgtttgttaaggcgatccttgcaaactcacacggggcaggtgcatgtctcatcaggaggttttaacctctccctttctctctttcaaaggctgtaccttaatttgtgtgactctctgaggtgatttcagggaaaagaaggtctgaggtgggggggggaggcatagaggagaaaggtcattgcaccccagttaggagagctggtgggcttacacagttggcggtcatctcggccctcattacctcaccagttagctggaacctgaactaaatgacctctgcaagagtccctctgtcacaaatcttccacacttctagttctgagactttgaagactcagcaagggacagctgtgacacctgaaccaggatgggagacaccctgtggcagagggtgggacactgataggtcattgtgataggtcatgacagtttctaaaatctagtagcatcagttcctattcacactaccccgtgcctggtcatgtccctaaagcacatgtgtaaacggactcacagaaatgtcagagttatgtaacagtcaagcaaccttagccattatgagtagacaagaaggaagggtgggtgtctagcagcttttcaggactgacaccacatctggcagtgtccccaacaagcaggataagccttcagatgaaggtggagttggcagggtcctcataggtccatcacagatctgactgctaaactgctacactctgagagatactgcagcattggggcatcccaagggagggagtgacgacactgcaatgaaccccttctgatggtaccagggaagtctacagtgctctacagaggctcgtcactacgtaagcttaatactgtatattttacatgggatgttcaacaacactaccactaaggagtcccaatgcccattttgtagatgaagaagctaagggtgagggaagctaggcaaaataatgtagttgggtaagggggaaaaaatgaccctgtgaatcttaccttgacctagaacaaagatgtttaatatagtgttaccaaataatttgaaaaggaaagtcgtgtagtgagaattggcagaatcacaacacaatgacccagaacacaccacttgaacatttggtgggttgaaataatctccaaattgaaaccgctcttggcagtcacagatctgatgaccccagtatttagccaggaaactgaggcccaaaatgtcacttgctcgggggccacagcaagcctttggcaggctagggccaggatgttttctattcccagattactctgatttgtagttttgagttgaggagcttcctcatttacaaaatataaagccctgagatccaggtctcctggcagagctgggctgggctgcaaggagagacctccactcgcactcctgaacccggagcttcccattgtgcacaggaaacgggcctcctgctctggacaagaaatccagtgaacttactgctaccctcacaggatgagactgctgggagtcgctcaaaaggctggaattagaaattctaattattagaactctcaaatgaaccaaaggacaatgtataattagcacatgtcaaaaggccactcccaaaggcaatgcattgtaagccagaaaacaaagatagactcagaaaggggacagggagccatgcctgttcagcctccccatcctccttgcaggccgaaatgcaattcatccccactttgtaagccccattccttcctgctagtgcttgtctctgtcctgtgaccctgccctatgttggcccagtatgggagtctctgctctccaagtttcttcttcttgctacccagacaaaggccttctgcacagagatcccattactcaggacccaggcagctctaaatccagacgagaagctaggtagaggtaatcatgtctgctctcctaggatgtctgtaaggttataaagacttataatggccctttttggggggaagaaaccatctctagtggactaatgatattattagctgttgctctagtgcctgaagcccgatggatgaatcttctcctgacctgtgggccactgataccttttcaagaatttcttagctgttagagattgaaatagtcaaagatacagaatcaactaagccacagacccaccctctagtaactcacaggggatcaaagttagcagatcctttaccgtctcaagaagagctttgtgctgtatggcaggtgtcctacaggccaacgtgtctgaccttgacatctatgacccatcgcagagaccattctcagcctctgcatcatcacatatcttgactcagcctctactgagaccatcccaacactgtagatcccataaatggcacaatagaaaacattcaatcaaacataacaggctttctgtgaaggacagatgacataatacatcatcatcgcatgacccagtggacactttgttggctgcaagctggaagggcacctgtgttctttatacaggtgaaccttactttaatggcatccagctctttggacaagcatgtaggaaaggcagtttatcatgcttatgcttgccaaagaatcttctagaaagtaacctgtttttccccacaccatgatacatagccaaaataacatctcctgtgcctacaatggcaagcaaatggactctgatgtatgataagtactgctaaagcaatgtgttaaaaaagaataaatatagggctcacatcctggctcagtcagaaggagagatgaatgaaggatctctgttatgagcaaggaatggtagaatgacccttggtcatttgtgacctaggcaggtgacattcccacactcatcttaaacccccttggtgataagagtgagatatatttaccaatcccatgacccataccccttctgtttaaaacactacaattaagttgtttcacgcaggaaagcccgacatacccctagcaagaaagtgctatttttgggaaaatgagctgtccctcagtccctgttgatgtgtgtcaggtggtctcaagcatgctgtttatgatctgtgaacaacaatatgaaagtctgggtccatcatccaaggctcacagttgctgcacactattatacagaactaccgagctaagtatgttccttcacatagcaaatgccctgcaaccgtaaatcctatgacatttttaacaagtcttctctacttcctgcctttatatctgctcaggacaatatgttctctgaacttaattaaagcataatataagaagagttcctttattcgtccaagtagtaactgtattttaaaaagcgcacgcctttaatcccagcactcaggaggcagaggcgggcggatttctgagttcaaggacagcctggtctacaaagtaagttccaggacagtcagggctatacagagaaaccctgtctcagaaaaaaaaatgttaagtctcacttggcaaatcaggattcagtgaagaatctgtctctccttaattgctctgctcattgttttataaaactacaaggtgtccataccagttgtcagcaggcccaggctgtagtgaaccccagagaaggagagccgagtaaatgaacactctgatcctgactgagaggagagggagcagactgtgtccaagtccatgcgaaacctcctctgtgcccccggaagactgcaaaccaacagcctgggtgagtcacgagagcagagggatccttaagtaagtgatcctacggcttgtggttggaacgacagacgaggggtgggggtcagctacaaaacctcgcaagtttaaatgcagatggagaccagatgcacctgcccatcttcttactatgagccagggatgtttaacggagacaacagcatcgcaaaactgggcatgttaaatctcacctatgtacctttttgctcctttttgctatgtcagatggttttacatcccatgtctcaatgccaaggctgaatatcaacaagtattttccttagagttaaaaagcacatttccatacacactgaatacactcaggattgcaatgagcaaatggggtgatgtgtataactctggaaaaagatagtgcattaatactcataatagctccctctcccccccaaaaaaatacaaaccactaaaaggcaatgataaagaaaagggatgagtacctataactatattagcatttcaaaatagagtcccagtgacagggggaactgcttaccagaggacgtcaatagaaacagcagaacaccacactgtatgcactctaggatctcaacattacaaagaaaatgacacagtaacaatgtggagagaaaaataaagcaaagcataaaaaacggtagatgtttctgctatgaacgggaaggattatttatttctgcttctttgcattcctgttgactgggcgtggttcccagtgtgcacacgggacctttggaaataatgggacagtcacacagcaaacagaaaagaatgtgaatggacatcggccatccttgttaatgttcataaagagacagatcacttgcctctctgagtgtcattcagctggtcacagagatgtgaagcatgaacacaggcaaagggtctccggtgccaaggaccagcccagtactaggtaaatagcaggtctgtaataaaatgcacttagggaaggatcaggggccagccaatcttcctcttcgtaaagcctcacccttaccttacccagcatcttagtatcttagagtatctatatctgtgataaaaacacatgataggcgacttggggaggaaagttccacatcacagtctatgacagaagaaaggttggaacctggaggcaggaactgaggcagaggctacagagggctgcattctgacttgttcccttatggcctatgcagcctgctttcttatagcacccaagcccaaggacaccaccatgcataatggcctgggccctccccagctcaattatcagtcatgacaagacaccacagactggtttataggccaatctgacgcggtcattttctcaactggggttcccttttccaaaaggattctggtttgtgtcaagttgacataaaatgggtcagcaaagtgagtgaggcgggacatggctcagtctgtacctcaagagccccctgaaagactatttgaacccagcagacaacagtgataaactacggtcatgtccctgtcaggcaattcagtctgacctctgtatgtgcatattatgccattaaatccttgtcatccctgaggtggacaccgctgggcctgtttgagacaactagaaactaagactattcgaggtcaagacaagtagtgaaggtgtcaaatttgccccacccccaccccccatccataaggtgctccatggcctgtggccctcagctagtcactctttgttctggatctttgccatggacaaaagccactccatgcccctctgctgagctgttgctatctgacttgttccccaggggtcttgtattccatgctaggacatggttaaccttttacgtctacctctctctctctcttgcttccttcgactggagtgcccatgtcttagaattcctcaggtttcccacagagccacctagagatttcttaaatgcctgccagctcaggtcttggggacacttgctcattgattatctgataaagcagggtaaagagaacaatggtcttatgagcatcttggcctgaaaattaacacagaagctgcaaggacccactgaccttgccagctaagacactaatgtgtgtcccctgtgctgttagcattgtccccctttatgataagccactgactaataaacaagagggcattgagaaatcaggaagtatatcttacttcccactggacctggctacaggtccgagacaggaagagcctgaccacatcaactcccatctggctgcagggatcctatcccagttgctaatctgcagttgacggtctggcacagtgaaccaaggctcctacaggtaaaagcaagtcacagacctcttatatgaacatgctacatgcaggacctccaggaggtccagcagagccacataactccagctgagcccaaggcggccaggaggggcttgtgttttttatgaggcgactgaagcactgtgcgataaaggagacagtccactctctaggaacaaacaattcgacagaaacagctatggggagagcacatggtcttcatgatgacattctttaggtctgagcatgccccatgctacatatgggaaatagagtacaaacaacaatgtgggctaagtttttctggggctgctgcagatttcttagaggctctagaccaccacccaccctgtgaaggtcccctctcctagaccaccacccaccctgtaaaggtttcatctcctagcttccctgatgaccctgtctgcccacagttctccacttttttgcatttgtatgatgagcccataatacacatgtatgcaaatatacagtgctcttctgctaagagcacattttccttatgtgtaaggggtgacctgttgtacttcttatgtcccactaaagatgggacctaagagccttggattaataaacaaattaaggcacttgtcatttgtcattgggtcaggaaagaccaaagtgaagctcaactcaaccacaattctttggaaataagtcaacaataacattagcaattgcttaagaccttcttgctgccagatgccagtcatttggtgtcttttgcatgcactaatcatacagatgagctggcatcttccttattccttctatttcataggtttgagaataaagatcaggggcttacccgaggctgagaacagtggagttgggagctactgagacagagttttcaaaaccactaagggactatcggtcggagggctgccttgtttaatcataattccagaaaagtacaaaactcaaagtatcaagagcctcggaagcgaactgtgagcctagtaactctacaggacgcagaagctggggccaggcagaaggactgcctgagttgtcttttgctaaactgctggttagatggttctcattcttcacttttatttaatcaaagcaaagaattcataagaatctgcaagtagtcattcatcagacagatttaatatttgataaccccgcagtttaattttttatggctctagtgaatgaagaagagatctctcggggaggctgctaccctccctgggaaagaagagcagctggccaaggaatccagaagtgcaggcacgaggaggctctgcagcatgctgcctcttccctggggtgagacactgctgctgggataccaggctaaagtttacagtggatgtctcttacattcctaatggaaggcatgagagaaggtacgatttggggacagcaagctgaggttgtcaccgagcatggcgggagccaagccccacaagcaccccttcttcagaagaacacagccttctcttctcttgtctcttctcagccacctggccacaagaatatgctataaaacacaaatacagggggaaggactacctgcccttctgggaccactctcaagctcttcccatacccttccaatagcatacctcccagccaccaaaggtcatctttcttgcatatcatgagtttcttttgaggcctggaagtcaaccaagaataacttggaggccatgagtcccacccagccatgattctccactgcagaatctccagccctttcattagcctccaagttaaattataagaatttctgtctcttccacccccaaattcaacgattgacatgtatgacctactcccatgtgcatgtgtatgtttgtatgtctgtatacctgcctgcctctgtctttctttccctcctaccctccatctcccatttcctattctgtctaccatgataagccagtatatcccccctctcttcccctctctccctctatcccccatccctctctctccttcctactctgtctaccatggtacagctggtatctaagaatctgatcaacatccacccagacagtttgggtgtagaaggagctatagaggaaactctcacgccagcagtcagcatgcatttcagctttaatgtctttttaatcacctggaaatggaacagtttaagaggaatctctctgccccaaccctcctttccctgttccctccaactcttccaggaaatgaatgtctccgtagctttctagcaatgtatagaaacgtctccgcagacctcaactcatttctccccattcttattcatcagtagcttaatagagagatatagtggtagcagaaacacccacttcattagcacagagtttgtgaaggtaggtgtgctgtggagataggtgtgttgtggaggcaggtgtgttatgggggcaggggtgtgtaaggcaggtttgtggaagcagttgtgtgtaagtcacatgctcccatcctcaagaaaagctgggggttgtgactctcttgcccccatctccccaccctgtctaggcattgtactcacctcttgggccctccagactcaaaatctagacagcaacctgatagcaaccttctagcagccaggactggcaagtctggacctcttactagagatggatcccgctatggaaaacctgggagtggtgtgtggagaacagaaagctgtttgtccattttcctcacttaagaagctggtgaaattacaagcaaggattatctccgcactgggacaattcatgatgtaaaaacagcactgggatgtcagagagagcaggcaatttatttgctgtcttggcactacagcctaagcaattatcataatggctaaaggacagaaagagacggtgttgccatcctggaaaccaaaagggcttttcttgaatggtatgtaacattttcataagggactaacgtgggactactggggaagtacaagctaagccaggatctgcccgaagatgaccagagacagcagggacagacatgccacagggagggaagactgtgactcacaggacagaaaagcccaaagagtcccagcctgtaggtccagcctcctgtgacttctacacagagggtgtattttctagagaaaacatggcagaaaccacttttaaatgactctaatattttctcatatttgactgctatttttcaagtacaggacgctttaaaggtgctatgctgtctgatcctcatcagtgggtggtatcactcctattttctgggcaagaagacctggaccatcacagaagtccacaagggaagaacagggaaatctgaattgatagtctgatatttcctttctacattctgaaaggcagccttgtccaccccattttggagactgctagacaagaattcagcgctgctatttctaaggactggctgtgacagcctgtgaactgccccttgcccctagggaccaacatctcagttttggttgaggcaaagcaatttcttccttgttagttaagcccctggaggaaagacgatgccaatctaaggctcccttgggatgccagactttagatgcaagtggaacaactggtagctataagtgtgggtcatatacctggcaatgtccagtgactgaacatttatcagccccaccctggtcttgacctctgctgtgagttcaaagccaatgattgcatttacagattttgagccaacttttgcttatcatagaatcatttcaccaaagaagatgagaaacataaaggtgtcctgaaagatgacacctacctccaaaaacctgtcatctaaaggcagacgggaggagatggagtcctttctccttcagagggcatggaggagcactgagtcagagactgaaaagtagtctctgggatcttctccagtaataatagataacattcaggtaatacaatgtgcccaggacactagcatccttggctgccagatgaggtacagtgaccatatggcttagattagccagggttgaggggtcttccaatatgccaggctttggatgctaaaaccttagcagtccagagctccagccaactggagcaattggtgatgtcaagtgtggaacatctacccagcaaggtgatggagtgtttatcagctccactctgaccctgacctctgctgtaaggtgttcaaagaaagctggaggaaggctgaggccactgttctaaagggtgatgtaatcctaccaagatagaagtgatataacaataaaaataaggtattcagtacatcaaatgtcaacatcagataaaaacagatgctggaaagaggacataaggcaggctgaactgattgggatagatggtctaaaggaagctgggatgcaggagacagaataagcatgaatgtaccacaacattgcttccagatcacctgcaactccctctacctcctgcctccatcaacgacagcagaatagaaccttctatcagatccaacctcttgctgcccttctcaaatcccacagcctcagtgttcttgtctttaaaatagaaccaagcccacctgacttgcaaagttttctggaaaggaagcccttcacacaaacactttgacagcttgccttagagaatgcgctccgcaaagccccactgttcatagcctctcttgccctcttccatctgttcacgcacctggagggttttaaagggcctgtgctttacacctagcactttcacactagtgagcctttaaaaccagtatcacagactggggactgctccgacctgtcactcccaaagcaagccaaggatgtatgggaggagagagtgagggaaagccaagcttcaagccaggccaagcctgagagcttcccccagctctgttcagataaaagaaaggaagaaagaaagaaggaaagaaagaaagaaagaaagaaagaaagaaagaaagaaagaaagaaagaaagaggaggggaggggaggggaggggaggcaaggcaaggcaaggagggagggagagagagagagagaggaaggaaggaaggaagaaagaaagaaagaaagaaagaaagaaagaaagaaagaaagaaagaaagaaagaaagaaagaaagaaagaactgcattcagctttcaactagaactcagtactgcactcaagtcatagggagattctcctggctccccagcctccaagtaccaaagacaaaattctgccttaggaactatcctctcagatggtgacaagcccaagcccccagctaaacattagctcaggatgacttaagactcttggaaaagagcctcctaagagcaaagatgctggtctcaagaagccctgtgtgtaaaatattaccccaaacctcaggtagcacattgtcggtaggatcggggagggttccctccttgcaggtcagtgctagaattagaaaaatgtagtagaattaaagggctgaattcccaccattaagcattcacttcagtctcataggtcacctggagagacaagtcacatgggaaacaaagatggggatagatatagggacatctcactgtccatcaatggattccgctccactgaactcctccttatatttccattttgtgttacatctttaataaaaagccctagtaaaagcaattagattgggtcagaatttgggggtttgggattttgaggggttttgttttgtttttagtttttcatgttttgaaataggctctcatgtagcccaggctgacctcaaatcatatagccaaggctagccttgaatgcctggtgtgatgagtttatctcacaaatgctgagattacaagtgtgtaccgccagactccccaacctttttcagtgtgcagttccctcactgttggggccagtgctgtcaatttggcatcacaattcagtacaagagacacaccacatatcctgtgatttttttttttaaatccatcaacctgaagtataagacatttggaaaagagcaataactcaaggcattcattctcaaaccatggtcctggggcagtagctgtatatgcaaattaaatagaaatgctcagatctccattcctatcccagatctatggtttagagagtcctgataatcacacacagggtgattctgagtgtttgaacagggcctcctatcagtgtaggtgactacttagacctaaaagccaatgatgtcgtcctgtactgtcagacactttctttaaaatgcttgacttctgcaggtactcattccctcacgtttggacatctactccataaaggtcaatgacagtcagacactggacatcatatggatagtcacaagatggcaggtagcatgatgaatcctccaagaagccatcttgtgtgcatcagaatgttgagaagcatttggtccaaatcccctcttaaagcaagtctgagccaacagaagtaagtgcgctaccaggctgagactttacacagcaagttgttcttcaggagtggctacagatatgagctcctccaggaactatcttgctgtctgcacagttgagcgggctcaggagaggggcctgcccagaaactgctaggtccttcctgactgcccactttatagcccattgtctggactgctgaggaagcaaggcacatagaagaccaagcaggaaatgcaaggattccattggccagcaggagctgtcttgagcactgagggagcatcaccctgcactgtcctctccttctggaccagctgctgctggctgtccagctctgtcccctgtagcaagctgcaacctcaagagccacatggcgacagcagccctgtcctggaaggtgttgtaaccaggtggttctcggcccctatggcctggaagtcagcaagagaggtcactctgctcctagttgagcaacagagttgccatgacttccatctgctctagtgttccagggacacaggtcacttgctgacacttcacttgaactatcctccagttataaaaagggactactcaccaccctctcaacttacagaccatttggcccaccatggatggtgggccagcttctcccctaggaacctgccaacccagagcttggctaactactcacctctcagggctaccatccatcacttcaacagaagcaacgacaacaaagaagagaaacatcttacttatgtgaaacagaaataagacagacccatcttctcttttatctccttgttctgcaaactgcattctattagcaagccaggaacagcaagaactgtccttctcagaatagatcttgggaaggcacaagagaaaaggcctggacagtgacctagagtaaaacttcgtggatgtaaggaaagttggttttctttttccataatggggcaggggcttccagaaatataagaagtcctaaactcgggtatttagctttatctttgtgtcccagccctgactcagagatggtcctcatcctagcaagccatcctcttcccttagggatctattctccatctttggatttagatagagggtctatctcaacactgctgccatttggtccagggggtcctttacagtgccagctgtctcaacatgatgggacagtgaacaacactgtccctagtttctcacccattggattcgagcagtactccactcaactgtgccaaatacaccatgtgaccattacacctacttaggaacccttgcatggagtaggtgtatatcctggcgtgtatatacagatctgtgggaaagattcctcttaattcttgaactctcacaacgagcctgatataagatgtgaattaccaaggtctgattacatgacaatctgtcacaaattgtacccctacctgattcacctcctcctcagtcagcattccagagctggccagcccatgccccagtaaatagccccaattcttcgagagcctcacccagccgctgcttgacaatattcaaacatgaaattaccaacaccctgatgagaagcaatgacatacgcttcaaagccagcttctgcgggctcacaattaatgtgaagacaatgctggcagctatcttcagggtgctgccacagctatgcctgtgcctggctaatgagggtcatttaatcctcccaacagctctaagaggttgatgctatgccaaattatatttaacagttgaagaaaaggttcagagaggttaaaaactttgtctaaagtcaccgagtgagcctaattttagaaactagactctttccacagcagtgtgctctgtatgtacagctttgggggtggggggagcaggatctgggagcttcctgctttcccattctggggaaaatctcaggggtgggctttattctccagaactatacgaatccagtggacagtggtccagcaaacattttgaaggcacctttaccataccaagaaccccacttgtcataaggatgctacacacagacatcctttatttatgacagggccatggctcagtaaagccatcagaagataaaaaatattatatgcaaaaatgccacataatatatataagctgccaagcagtggggcttatcatagccagatttcagctacccagaacacacacatccactcacgcttgggcagaatcatctaaaatgtagccagttttctagtaactgctggctatctaatgtgcagggaacaccgcacacgaatctaagcccagagtggacacacactattaatatagataaaagcgcactgggtctggagagtgctggacttaaatcagttactggacattgagataatcacagtacagatgattgagtcgcctcagggccacaccaagagctatggctcatggctgctgcctggcaccatggggcagattcatgccatatatcactcattgggaaaagataaaactttgaagtacagtgattgctgaatgcagatcattttcacagcatcctaagctaggtgtccagacaacacactaacttataaatgttccctgactaggtattaccctgaacctctttgtaactccagcacctgctagagagccaaggccacagcagggacccatacgatgaaatgtcagttgcagtaagtactccccttggaaactcacccctctggatgtaagcaatgattgcagaaaaactggctaccaccctcaagtgacctcagcccttcaccccaaactcttaataatactgctcctcggctttgtgggctagcttgtagggttccacatccccttggatataattgcaagtagggagggagcttgagtaacctggttgctgggtgacccaaaggattggcctgggagaccccccctgaagagctcctggagctcctctctgacaatgcaagtgttcacaccttcacttactaggtcaccttgagtggggctgccgcgctgttctgtggcccagtttcccccttggatagcacagtgagatctgccccccacggtgtgctattattacctggcacgccaaggaatcaggccagcaccacaataaggccaccccgccctccaagattcttcaaaactctgctccttgaggcaggacaacaaggccatgtaggagagtttctccaatatgccaagagccatggggcagagaagggaactgcacagtgacatagaaggcatcattcctggacacagaaccatgacaagagggaccacaggacaaaagacaataaagagtgggactcaccctggaaatacaggattacaacccatacatacacatactaacaccatccccactggtagagagtgtaattttagtagccacacagcccagcaaagcacttctcaagcagttattttgagaaatgctattagccaccgggttatttttaaggcccctcgtgtgacaggcatttatgacataaacagcagctgaaaggcagttaacccatagctctggattcttccaggggccaagggctagtacctcagaataatcccaagccccatttagatggagggaaaaagcaaccacctcacgtggctcaccacctctgtcatcctggtggctcctgctctgctctgcagcgatgggctgccgaaacagctctgatccatgacagtcaggttgctaatgacaactctcaggacctgctcataggtcaaaatccatacaacaatccctcctggcctctactcagactctgctcctagaacaccagcctttggctctccattttctctcatataagaaacccttcacagagaatgcccggccgtcttcccacctctcagaactcagttcccactgagctccactcccctcataaaacatctgtgcctgttagccaatgctatggcatcctattgtccaatatggtaactgcagagagcagcaatgaactgttccagatatctaagctatgggctgttgaatgcccctcaatgaggaagtggccgatgtttaagatgatgtgtatgctaatcacctccatctgatcagcataaagaccttatgtgtattaaacaccacattgtgtcctgaaggatgaagaattgtcatgtacaataaaataaaatgtctgctttaatagtctgggtcatctgatagcttttattatttaagtgttttgtttttcaagacaggggttctccatgtggccctggctgtcctggaactctccatgtagaccaggctggcctcaaactcagagacccacctgcctctgcctcccaaatgctgggattaatggagcatagcaaccaccactgacctgccttaacttttagctgtgtgaagctagttctatagaaactcctgccagatactgagtgcttaacacaggccaggcatcacttaaaatcctttacaaaactcaatgaattcccccagggaatttaagaatgaggaaactgggccattctatatggagcttccttgcaggctggtctctatgcaagaccaggtagcaaggccactaaagtcacaaattcagagaaggattgcctgggttaaaacccagttctccacctcaggtaagtttctcacagccaatttgtcctttgtctttttctgggctcccacacagagtggatacacaaaccctgacaaaacctctttgccagcacctggcacacagcagtaaaggtgaggcaccggtgtgttttgagaacgactaattggtcacctacaatgtagcaggcaagatactgaagcatcccacatgcattatcttatttgatgctcgaaagtccttgtagaaatttacagagcaatcaagcttagagaagcaaaatcgttcacctaaggtcaatgctagacagtggaaacttgaaccaaacagttgggacacaagtctgagtttattaacccaaattctctgctgcttgtctttgcaaactcatcagctcttcagattccccgctgctcctggcactgagctgggtcctttaaacatacttaacaactgtttctggcaaggctggctgactacagagactgactgtgggctaaagacctccagccccttccaggaaacccttggcccatcatctctctctacacttctcaaaagaagcaggtctcattcttaaaatacagaagcaatgtggcaggacacttagaaaggcatcactgccattcagtatgacaacaaagtaccacagagatccaaggcccaaaggtcagaaatccggttccagccagccaaggcagcaccatagtatgaaggagcagcccagcctgataggcatgggacgtgagctggaggcagcacgaaggggggaggaaagtccaactgagccatgcatgtgagtgagttacatgtgtagttcaattttaggcactgggcagatttgtaaagctcaacaccctcctacagttgcctacaaaaagccaaaagtttaacaccataccaatcaatcaacataggtgtgctggaaggggagtgtgcccaacccagagcagagaggccaagagctgagggaagagagtcatgcctgaccccagtggcttacgatcttggccaaggaaaagaccagcaccactgggaacattcattgcagggatcagcaaactccgatgtgattaggccatttaatttaacattttcctgctaacctattacacgccagggagctcctgtgtatcccaaagcctgtgataccttctctgggcagtgccagtaaacacctggcacagttctgctgcagatggtggaggaagacagcccccaagcaaatgctcctctcctactcacagaggagcctggccatctaagagtgcagacatcaactagagcagctaacgttccaaaatgacaagcacaggctagggagatggctcagagggtaaggtgcacgctgtctaagcatggggaccagtgtgcagatccccaacatctatataaacgcctcacaggagtggcagcctataatcccagcccttgacaagcagagacaaggaatccttggagcaggctggctctagaccagccaaaccagtgacctatgggttcagcaagagagcccacctcagcaaataaagcaaatggggaagtcaactgactgatgtgaacttctgatcctcacattcatatacactgcacacactcatgcaagcatccctaaagacaagtataccctcatacacagtcacacacacacacacacacacacacacacacacacacacacacacacacaagaaaataaagataaaagagaaccacaactccagactggggggtgctgtcagataaggcattcaaggcagaggtttacagtgctaaagactcatcacattgtgcttgactttgaaaggcaccctctgctcaatctgggtatcttctcaaaaacaaagtcacagatttcattatccagtgccttttccgggccttaagttgagcaggataggctactgaggaaggctctgcaaaagggtggtcctgatgcctgctgggcttgacactcatattcctgtctgtcttgggcaccctcaatgccacatcctcgtgaccccatctaaggaagttgggaaggagctgctcagagaaaaacataggaaggaaggtctgcagccttcaggaaggccacaaattgtgtgctctgcctacagaagctgcctagagtcctggtagctcagagagcactttcccacatagctaagcagccttgtcatttccaaacagttcagggcctggatcatacagatcttctgataccaatagatgtggatttcttcttgcaagcttggtatgttcatttgtaagggttctgtcaataagtatgcacacagggtagtttaaatctcagacatactgtctctcacttctgctgctccatggtccaagattaaggtgtccgattcttcaggacctggtgggtacccaagggctggacatggcacacatttttgtgactttctctttttgatatggaccaataagcatattagctagcaagtattcataacctctcagcttctgcattctagaaagatctatgatagatgagaaagctaagcttccatgtatctacatctagaatgttcctctgagaaacctccaaggaaagcagttgcccagtgaagacagaaagcctgaaatacccctaagacgctggaaacctgtgccatccatgtgccccaaacataaaagaaaaagcatgatgtttgaataaagaagatgaaggctaccttggtcatcctttctgactaagaaagaacagagctgcccagataagtaagacctgccaaaggaggtaaaccaggctaggggagagaagtagtcatagcaagagtcctcttgcccttgtggatccaagtgtgtgtgagggggggtgtcgggggtgtctgggtgtatctggaagtgtgtgtgtgtatatatgtatatatatatatgcatatacatatatatatgcatgtgtgtggatgtatctgtgtctttctgcatatctatctctctgtgtctctctgtctctgtctctttgtctctggctgtctctgtttctgtctccccccatatgtgtgtgtacatatgtgtttgaatgtatgtatgggtgtgtgtggattcatctgtgtatctctgtgtgtatatatgtgtgtgtgtatgtatgtccagatatatctgtgtgtctgccagtatgtatctctctctctctctctctctctctctctgtgtgtgtatgtgtgtgtgtgtgtgtgtgtgtgtgtgtatgtgtatagcaaaactgggaagccccaagaatcacatggctggtatatcagaagaacactggctgaggataaggggcctgtccctgacacagcaggtggcagctccaggaaggaggacaagtttgagcacagtttgtacctggcatggtggccaagtcaaacagcaagccagaggaaaacagttggcactcagagcagtggctttaccaagtcagaaaagtgttgtgaggttgagctcccactggaattacagatggctctggctctctggggtggcctcacaggtggctgaaccacgtgagatgccttccttaaccagtgatctggtggcagaaccacacagtgttctcctgaaatgaggtgaacagcaaagaggtccaggagagtcagccttccctgactgtgggcaaaccatgacggtgttcatgatggaagccacaaaaagcagccatcaatcctctaaagacatttgtaaacatccaagcagagaacacagaactcaaagaaaggattggaacaggatgactgcttcgttggtcacccagaggtcaccctgtcatctcagcaggactgctttaaggaggctagctttgactacacagtgagttctgggatagcctggactacagagtcaaaaatcaaacagggaagggagagatggctcagtggctaagagctctcattgttctcatagaggacctgagttcagctcccagaacccatatttggctgctcaaaaccaaatgtaactccaactccaaggggatctgaaactctgttctgacttccatacacacacatacacagacacgacacacatacctacacataagtaagtataagtctagaaaaacaaaagaatgacttcagagaaccctcttatggtcacagccagagcacaggctctacctgcctcttggtgcctggatggggcagtgtaaggcgaggcctctcagcacacatttttcaatccatagtgagcacaaccaagtcacatgactcttagcctcactctaccaactcaagaaggaacatacagcaggtaagaaacccagcacagggttcagcaaaggactcaagcgttgagtcccctgtcagtagccaaagccagggctgcttgctcctgaaacctgatacacaaatactcccgagaggaaggaggggaattctgagagaggcagaccactgagaaagctggattccagatcatactcaacagacttagacagccagaccattataaaccgaactaagtggggggaacgaaaacaaacaaaacaaaaccagaaaaccacttttcagaccatagggtagacctggctgtgaaggtcaaggaacagccatacaattaagcagatgtgtctgctgactccatggtggcgttccacagcacccaagcagaagatgtcagttaacctttgaaaggaagaaagatcagtttgagtctgactaattcacaaaatacagctgtggagccacacactgttgtaaaccttagaagaaatgaaatgtagaggctgagggtctgactcagtggcagggggttagcttcacctggagggggtccatccctagcagtgccacaaaagcagaggaaagagcaatgaatcagagcaattgttccagaatgttccataggtggtaagtgttctatatgcacagctaagacactgatcagacctaagtgtccacagaacaaaaccttagccatgagcctgaagtttcattaagcttaaataactctcaaatcacaaataacaatgaacacgaaagctaagacttaggagaagatgagatcataaaaataataaatacaatctaatacctatacaatagaggcttaaaatatcagcccacacagtaaagcacaaccataattgtaatgttctcagaggtgaagtggcagaaaaaagccataagagcactctgtgcagaagccaccagcagaataaggcgaaacactacccctcacacctaaggagcaagacaggtagagccaacattgccatttgctagagagaagtataagatgaaattttaaaatgtcccattacaaagacataacggaggctgtagagaaccatttaaagggggaggaacaaaatgtattagctggaagaataaaaataaatgacatcttttatgaagtataaaatggatagaataatacacagcaagttaatgcatacaattatgtgttttgtgtaagaaatgtatcctgtatcctgcacagatacaataaaataaagttgaaagtaaaagaatagcccaaaatatgccagccaaaaactaagtgccagaatgggggcactagagtcaaggcgagtaaaatccagggcaatggatattaagtagggtggtgtagaagcagggtagaggagcatacacaagtcagtacagcctcaggaggaaggtcaagagtttgagaccagcctggtcacagagaatgactctgtctcaaaatcataagtgataagcaatccccagaacagacataaagagccaggcataatgacatgccttataatcccagccctgggcagacaatgacaagagcttactgcccagccaggctgctcaagccaggcaagctctagactcataagaaagccttcctcaatcaagctggagacagtaggcagtaccttagtaaccaagccaaaagtaaacctctgtcctacacacacacacacacacacacacacacatacacacacacacacacacacacacacacacacacacacaccgagtatatctgtgcacacatgatgtagctgtacacatacttaggcacccatatgaatgtgcatacatgtgttgcacattatatatgcctatgtataaatgcacacagagagaaatttccaatgaatatatagcataagagaatgcagggtgtttcatatcaataagagtacaatccaaaatgagtatctggaagcccagggcctttccacaccaacaaagcagatgacaaaagaaaaaccactgaatgttctccacctactgctgtttttcctaaactaggttctcaaactagatacagccgtgatgcctgagaaggatgccattcgtgggaaactcaattaagcagtggtctggagagaacatgtagagatgccaagctcctagagtcttttgcagatggagaaactgggccaggaagctgagtaaggagagtacagaacagggaacctcagaccttggcacagctctcacatggaagcataactcagactcttctagaaccagcacccaggtgcttctggtgctggctctgggctgacaaccatctgcggtgatgaagtccaaggcttcagcagggccagagctaagtcatgtagtattttaccactgttcgggacttctatttgctcagccttgcagggtctcagattcttcattcctgaacagaccaacactagcaccttcctcttgtgtgtggatggttcgttcaagcctgtagtatgagtgctcacttacacctccctctgctttccaagtgtaaggcagatcactcctctgtgcccatgccccaggagaatgtcacacacacacacacacacacacacacacacacacacacacacacacacgctaagagcagatcgcagacccaagctgggcccttgcctgctgcattaggcaatgttgttccccctccccggggctctccagctggagcctgaagctggtgactcactcacggatcctgtcatctctgcctctttcccctcccacacggcctctatctctgcctccccacccaggtcctccccacttgcagcacagtggatctgcagtgtcctaccctgactgaggctggtctcttcagaggacaggaagttatcaccccacgccctatctgagaggcttcttgtactgcctttctgcaataggcaaaggaccagccctgacacagaaatgaacttggagggggcagaggtggcacatcctccgggggcatggaggagttggtgcagaagagggttcactgaggtgggagggaaagaaccgttacattcaaggctcctcctctctgccctgagctcagaaatcagagggagctgtcagtgagcatctcactgtaacactctggctgaaggagtgataaacaggcactaccacccacataggaagggatcagggcagactgacgctgagaccacacaacaggttcactgcacctgtaagcagactgaggtcaggtgtgtcctagttaaacccaaattatctgtgtggcggaagctgactcataagaatgcaattcgtgtctgacctgtggcatggatttctcagccgccaactgtgctccaccatggttagatcacacacatagctacaagtgcccacaaagatcaccaggatgacctcttttgctagaagatgcctaggaagcaaagcagatgcttcaagcagcactgatgtcacaagcaagcttccaatgcctgcctagtgttgccattaaaacccagcagtaagacacctgggagaagagaaaatcatgaggcgtgctccccacacactcccacgtgtcacctgacagctgacgtgcctcttctctgctgcaccatttttccgaggggaatccacctcggcaccccttcattcatgggcactcatgccgaggaagatggggagactgaggccagccctcaagccacctacctctctcctccttcctctcctagaatgcctgtccctaccgttggctacccacctgatccttgtgcctagttcattgctccaggaagctctccgtgtaaacttcctcctctcccttggccatcctcaacccagattctctggaggactgagaccccagatttacccactgatcatctgacttgatcatccttatacttacagcctacattcttatatttatagtatattgttatacttcctatatatagtctgctctataagaaaacattgaacccccacaggtcacatctctgtggagcatgctgtggacactcagaggagggttggaaatccttaactgagttcaaatttgccctcaactggttacccttcctttgcattgggcatgccaggtagtgtcaccattcctcagtttaccctcctggggaaaggcaatgataataatcactgtcttcctaggccactgtgaggattgtatgagatcatatgtacaaaagctccaagcatctccaatgcagtgtgaactgattatgtctgatatcatgggcctaccgtccaaccactggagcatggcagtgcaacctctaatctcagcacgcaggaggttaaggcaaggagatcacaattgtggccaaacattctctgtacagaatctactgaaggcccgccaggatagtgtagagagactttgtgtcaaaatgacatacataaacatatacacatacatatacatattaattttaagggttgggggcagtggtagaacgtctgtagagtgagaccctgggttcattccccaagactgcagaatataaggtaaataagatggcacctggtaaaaatgatgagattaataatgatggtttatattccattggcatgaaatgtaggcttttccattcaatttcccaaggtttcctgccaatgctattaaagcagaagacacagtgcctctttggttaagatactgtcagtgtatcggtctaaaccctctaggcctcaggggaagggcaaaacagacttctgattttaaaaatgtaataataaaatctactttccaaacaaaaactacctctgaattgagtcttcttcttcttcttcttcttcttcttcttcttcttcttcttcttcttcttcttcttcttcttcttcttcttttttcctcagaagaaaagaagtcataggcccagacccagaactatgtatgccagggttaacctcagatatctgatccttactcctctacctcctaagtgctgtgattacaggtacggactacaatgttcagtttatgcagtgctaaggaccaaacccaaaacttaatgcatgctacacaagcattttactaactgagctatatccccagcactgggtcagatctttagaacaatcatgttacttctccctattggaccagatttggggtgtatgatcatttcatcacttatatacaaaacaattctatgtaaagtctgtccatgcactcagcagagttagtccatagagccaaaacttcaattacaggttcaataagggtccagaaaagtccagtaactcctttttaagttaatgggatcataaattcacaatgttttatttcctaaaggttctgagaagacccactggtgccagttgactgagggcactgtcggatctgctgcctgtgtccaactcatatgctccactcccagtacctacagtgcacctggtcacatttgtgcatgccattgtatacggtcccctaccctcaagaacctaccatccagggctagagatgtagctcagttggtagagagcatccctatcacacaggaaaccctaggtttgatcccatcaccccacaaaactggatttgtatgaaaatggcccccacagcctcacaaggactgtcactgttggaagtgtggtcttggtggagcacgtgtacccttcttggaggaagtgctgtcactaggggtaggctttgaggtttcaaatgttcaagccctgtccagtatctgtctgcttctctctcactctctcactctctctccctgctgcctgctgattcagatttagaattttcagctaccacttcagcaccatgtctgcctatgggccaccatgtttcccaccacaagaataatggaccaaacttctgaactatacaccagtcccaattaaatgtttttcttttgataaagagtggttatagtcatagggtctcttgacagcaacagaaacactaagacaacatccaccagtaatcccaacatgggaggtgaaggcagaaggcagaagttctgggtgatccctgatggcacagtgagttcaaggtcagcctgggccacatgagatcttgtttcaaaaaccaaaactacccttgaaactgcttctaagaaccctacaaaagcaaatggctggtaattcccacatctgtactcacagtaggccctgtgagactatccatggctgttggggtcaacacccccttagctacaggaaatcaagtgtcagaaatgtcacatcctactggagttgtcattgcaactatcttctgcattagggggtttgtaatttaacagttcagacagcacgggaggtgcgtgtcatgtgccaatgttcactttatctaaaaggtgtgggaggtacaggagggcagggcacaggctgctggatagaaaggctctccttgtcggggtccaatctaccatcaccatcaaccaaattgttcccagttgtcccgtctttgttatcctcctgactcacaagagctagtttcttctgctgatgctgacacggggacctagctgtgaaattacatgcatttttcacagtggtatcacatattcagcattcatttctctctcctggaaagaaggtaaaaaattaaagtcctccccctcccccggttgtcctcggcctgcagtgtctgcacagctagaggaatctgaacccagctccatccacctccaagtctaacctgtagccaccggctgtatcttacacccaagcagccatggctagggggctggagatggggaaactcgcaactgaaaaaggcttcagccagctcatgcctttcatattcatatccagaaagcaaagaataaacatccctctcttagcttctggtacagcctggagctggaagcaaggatgtgcatcttccactgcaggaaaagtctagagtattgtctatttttctaaatgcacaagaatctcatccttctccatgctgtgttaaagtggactccatattaaaacacatccatttctaagctttgcagaagatctatttctgtagcaaaatgagctgtcttaatactgggtctttgagccttacccagaaggccccaggctgcggatctctaaagttgagaagtacagatctagaagactggagtcctgtacaagcctgtggccatcactcattgattgactcagagcccagaagagacccggcctggcagctgagtcagcagtctttcagctcatctccctttctacctctctcaggtatcgctacctgccttgtgcttgggttaagccaatccagatccatgctagaatacaacaggaggtgcctgtgaagcctactgcaagccaagcagcagagaagggtggagataaaagttgtcaacatgggactccttcagtcatgggtcattaatggatcaacctttctaggttactgacctaggtaccttatcctgcaatgtgaagcactcacgggggaccagggcttcataaactgaaaggaagcaaggttggagtctacagactttatgcctgaacagaaggcatttagatgaaagttttgagaaagaggaaatggtgtagaggctatggaaaggaaagctgatttgttagaataaagaggttgaagatcagaatcaagctattggggaaagctagtcatggacaagtgggatttcaagctaagcaaacaacgaagcaaaagggtactcactaagccaaggggcaataaatagaagaaagcagctagtgggctggagtccaaagacagagagaaaacaggaagagattatgaagacccttggggggggggcttccaagaaaggaaacctggggtttctgtttcccttcagctagcaagggccttatggaagaatcatcaatgaggaatgtgaaatgccagcattctgaaagcccagctggctggtgggacaggagagtcagagtcccagttggaagcctactgcaatggtctggacattgaggagggaaccctaaaaaccatttccttgggaaatgtagtagccccacccccttgtcactcttggtaaatttaacccctcagactcacatggagggctaattatattttcttcaggcaaaattaaaggtaccaatagggagcctcaggacagagttgggcccttaactcactctgcctgtctgtcatctttccagaacattccagaatcaaaagatggagtcttgtcagagattccttcaccaagagaagccatggacaccattagggtttgtttaaatacagaatttggtaaggaagtaaggaagaagagaggagataaagagaaaaaggggaggaagagaagagaagagaaaggtttccctacagccttggatttccagccttcattcccttcctctctcctcccacaaccatcacagagcttcattccagagtggtccattcaattcagaccaatgtttaggctgtcagctcaaaataagaacagaatgctatttctccaacgggttgtgggaagccaaattttatttctataatctgccaaaaagaagtaaaatttctttaaaaaaaaaaaaaaaacctctatgtaacttctaaattgttttctttttctctctactcctttccctcctccctctccctcctctctcccacttcttcccactggcctctttgctatcctctgtgtgttagggagcaggagagacctatgttttaggaccataggccaatcttaggtgtcatgcccccaggaactacccattttgtttttgtcagaaagggtctcattaccctagggctcgccaagtaggccaggctggtcaataagcagcaagaactcccctgcttctaactctgcactgtggtcacaggcatgggcacagtgtccagctcttttcacatgaattctggggctcaaactcatgtttgtacagcaagcatgttcccaactgggcttctgctgtttttcagagggtgagtggcttttgtaacaacatggatggatgcaaaggacagtatgccaagtgtagtaagacaagaaaaaatattatatgatgtcacacacacaaatagatatgagagagagagtggagagggtgagagaggggaagggaaggagagagggagggtaggagagagggagggtgggagagagagacggaggcagagacagacagagaactagaatccacagtgaatattaaatgaaggtttccagcagaggagggaggaggtgaaagaaaattataaagtataggtcaaaggtcaaaggataccagagtagacacattgaaaagatcttatgtccagtgttcttttttattttttaaagatcttacacattaaaggtttctgttttaatgaaaaatataagttgcctttgtcactatgaaagctgccagagatgtttcaacagatctcacacagtcatgttgcaaacctcaactccacacaaccaaactgcttttgaaaacgcaagggggagcaaatgcttgggaggaagagcaatgggaaatgaaggtgctttccacttggtttctcgccctgtccagttggagaacgagccagagaaaccaggctctcattccttgaaatgttgcatctcagggtatacgggagaaagacagaggggcctgccctgctgcttgccatgaaatgggatctgagggctgagtgggcatcgccctggcccagccagggctgaacttgcaatcagcctagataaaaatcactagactggaaccagagctcgatatcaagggattacctgtgaactggctgttctttcccgtgggcagagaggccagtggctgaacgctaatcagccttgtccgagctcagcacagaagcactcactcacatgcttcaggccacagcagcagcacctcggctctcagggctggggatgggcctttccttctcagtatcctccccacccgccccaccccacccccaaagtcctcaagaaaggagacagtgcccttccaaaaggctgctttttctctcccactttgggtggaggctttgtgtaagctgtgcagcctttctgcaaagcgacttggcaacgtgatgaagaaatcttaaaaatgcattcttcctttggtctggggactcctttcctaggactgtatccaaggcacagacagaccttaactgcaacccacccaacctaggacaatgaacactgaaaaatcactgaaagaaccagctatcatggggagacagttaagaaggggatgctagagggctgaggcaggaatggggtgttgtgggtgagggagcacccccatagaggcaaaggggagaggtgatgggatgggggttcacagaggagaaaccaggaagggggtaacatttaaaacgtaaataagtaaaataaccaatttttttaaaaaaaaaaagaattgttgctacatttatgccgaaagaaagaaagaaagagagagagagagagagagagagagagagagagggagggagggagggagggagggacggaaggggggagagagagagagagagagagagaaagaaggaaggaaggaaggaaggaaggaaggaaggaaggaaggaaaggaagaaagaaagaaagagaaagaaaacaagctatttcaaagtcagtcacagtggtacatgcatggaatcctggttgaagcaggaggattagcacaggtttaaagccaacctggactatacagccagaccctgtctccaaaacacaaaacaaaacagaacagaacaaaacaaaataaaacaacaaaaaacaaacaaacaaacaaacaccccaaaggttctgctaacaaaatggaaagaaattgtaaggaaagggtggtacaaaataccataaaacatctgtacatatcaccttggctatgtacctggtgctctcacctctatatttctgtgtgtcatggggtatgcatacatgtacatgtgggtcatgtgtgcatacacacatgcaaaggccagagtcccagcagggtatctcagcccctattgatccccaccttattctgtaagcacaggccttgcactgaatctggggctccagtttcagctagactggtgggccagcaagctcccaagagccatctctctccatcccccaaatccataaagagggcagttagggcacaagctcctgcagagacagagagaggcaagaaccaaggaagattgctgctcaacggtttgcccagcctgctttcttacataacccaggagcgcctgcccatgagtgactctgcccacagggatatggggaatgaagaaaaaggcccactggagctggaaagatgaatcagtggttaagagcactggctactctttcaatagacctgggttcaattcctagcatccacatgatggctcacaaccagctataactccacctccagtggacctgacactctcttctagcctccatgaatagcaggcatgcaggtagtgtacagatatacatgtagataaaacatccacacacacacacacacaagataaacaattgaagtttaaaatgaatgctccaaccacatgcccacgggctaatccaaggcgtccaaagtctcagttacaatcccacttccccctgactcctgtttacatccctgtttttatttctgtgaaactttgggaccggatgataattcagtgcctaatataataagcagctaccatcactccactagcagtgagccagggttccagcatacagccttcctggcgttggttattattctgacttctggataataatcatctaatccttttcacttattttctgggtgtcctgcaagaaacatgggtgtgctttacaatcagaaagataagagttaatgtcatgctttatttatttctaatatttttattttgcatgagtgttttacccatatgtatgcatgtatgtatgtatgttcactatgtgtacacccagtgtccagagaagctagggtgtcagatctctcccgatgctggacttccagatgggttgtaagctgccatgtgggggctgggatctgaattcagatcctctgtgagagcagccaatgttcttaatcactcagcatctctccagcaactaagaaacacacatgatactgacctctggtttacacacagagaggggatggattacatattacagggaggtattcttcactaaggaaaacttgtgtttcccaaatatactatacattaaccctcctttgggcctgtcagctactaagagtgcatgggctgacttgaaggcttgaagccacacagcttctgtcctcaacctgcctgtgcctcaggttcttgttccccatagatacccagcctcagacttacaaatgcaaacacaagggagtacaacaaggtcactgtgaaccaggggtgtcaaaacccggcaaggctgtcaatccagagagagggtgtaaattacgtggaaagtcagttaccccaagtcccaggtcccaggtcccaggtcccaggtcccaggtcccaggtcccaggtcccaggtcactatctgttctagtagctggactggggccttacaatatacctttctaagaaatccacactgaaggaagaagttgtcgatcgatggagcagattttgagaaacacaagaccataagaaaagtctgcctgccttgtgtggcatcacacagaaaaatcaagtctcattaagaacttgaaacatccattcttttctagaaaaaattctttatttttttattattatttaatacatacaagtatttgacctgcacatatttttgtgcaccacatacatgttgtgcccacataggccagaagatggcgttagatccctggaactagagataaaggtggttgtaaggtgccaggtaagtactgggaacccagctggggggacaggtgcttaaagtacaaactgcatagtagttagaggacaggaactctgatgtttgcagaccccagctctaccagagcctggctgaaggaccagagttgagttattttttttcccctcccaacctgtcatttctctgtcactaagataggactcataagggtggcacctgctcactgaatttctgtggtatcaagataaatatgacacagaatgttcaggaacagtcttggcacctagaaataactgatggtgttggctatttttaataactttgtttattaccacctcccctgataaacagctcaacatctgtgtgattataggagacatgctttaaagccgatggctaaatgaaaacagtgcgttggctcttgctcacactctctgcctggggccagcatatgccacacctgttgtgtttgccgaccccatctgccacctcatactgctggccctcagaaggcagtatggtcctcagaaggcactcttgtacatggccacccacaaagatctgctagcactggcctaccattgtcctggagataaactaaacaagtgtgctgagtgttcagaggacaacagcagcatgtgtgagtcccatgccacccactgaggtggctcaataaggagaggcacgccgggggtgtggtctccacactgtatatgcagacatctttaactctcgaggtagacactgaatgtgtttgtaaagaacagaccaagtcaaagcgaggtcactagagtaaatcctcatccagtacgactggtgtcctaggaggaagggacgaggagccaaacagaaggccatgtgacttcacagagagagcagggccaggctacctatgagccaaggaaacagatctcataggaatgcagcttccgtcctaccaacaccttgacctgggactccagagagagaggaaggtaactgtgctgttctagcccctctcctgggtaccgtgttacagcagtcatccttcccagggatggctccttgctaacacctgtctgacaatcaaggcaacctagcatcctgagaccccacgctaagacaagaaagacaaggaagtccttaagctaagatgataggtgcaatctggagcacgtccttggtcctttgaggacctgtttcttcctccagtggggctgctatacaggttgagatggcttcagtttgatcctgagcccctgttcctctattccctccccccaggaccgggcagtattctgctttggagttctgcttccatgcctgtcctgcctgcttttcaggttcacggctacagactgagatttaacaagctctaacgaggttgcatgcatggctaaaaccctccaacagtgctcctagtactgacatggacagccaacctccttactgttgcctacaaagatctataaaaacagcccctggaaacctcctagcatagcaccatgggctgcacacttcactcagagatgtgtctgtgcagtgtgaaaagagcaactgctttccatcctacctcaggacctttgtacagactggttctactgagagattcttccctccaatttctactgggctggcttcctttccagatatctcttcctcagagaggcctttcccaccgtcaggaaatattttccattactccataccttgctggctgtctttccagaggttaatagaaactgacattgccaccaaaaagccacccccacacacacacactgctgcctaatgttctgtggcatgcgctgtatctagtactttgcccagtgcctagaaggaacttggtgtgtgttgcctgtatgggggggggggggcgcaggggagtgagaaatccctgaaaaaacataaagtcctcctaagaactagccaaatggttcaaagacagaaaggcatcatggaataaaacaagcagccataggctggctatgtgaggcctttgaaccagcaagagagccacatggaggcttcacccctgctggggctaccctgttctatccagctacggaagctgcacagcacacacagcacttgactactgtagctccagtactgttgagccgctgagcatcctcctgggaaccagaatggggatcccagattcaccagcaaggctgactccctctccccaccctccacccccaccccaatccttgagtggcacccacctgcatctggctacttctagcagagcttccttcctgccaccagcctgggccctgcacaacctcagtgggcgggcttgtgattcacagatggcctgtcattctcaatgctagcagcacacaccagtttgcctatctttagatgttccacagactgaaaaaaaaaatcaatttacctgcctggcacgcaggctagaagcctcctgataacatcagtgagcaatacggggcttcccctcggtataccctggtacatcaggctctctgcgaggttcagagggaaagacagtgcttctgtctgaggtccagcagcccccactctaccccaaggcatgttattctgtcctttggaactagccaagtctcaggggaagaaatagacagagagtcaatcctggacgtaccaacaagggaacaaaagtcattctccatgcccacccacccaagctgcccactcttctgccacaggatttttgtggagtcacattagaccaggtcaccccaagagtgtggctttggtatcctctttagggcctggatcagctagaaaggaagtgggtgcccaaggcaggcccttgaagctttctgcctttcctaacactgcagtttagaaaacctcaggtaggttgggcaaggtgagatcctggatgtgggaagggaagtaatctaagatgctcagggctaacaggtgtcagacctttgctattcctcccaataaacactaggtaccagcttaatgagcagaacaaggcaaaagagaagctggggagcatgcgctaggaacaaaggagacctgcccctgcaaagctgcaccacctctatactgcttttgcatcttccaattccctgtgcttagccttttggatgtccttgacctctgatctttatcccatgcacccacatgtagaagccattgttacagacatgggagacatgttctctatgttgttcagggacgcggcctgaagctctgcccctatctgcttctttctgacctcagaagggactcactgggactcttcagcatagaggccaaagagtgctggctcccatctgggctgtcagcagaactctggagctaaggagacatttgtgagaatatacagaaggcccacatttgtttccctaatccaaagacagtgttttttaaaggcatgggggcaaagggtaacttgcaactgttgtgcctattagtcaagatgccgtgaagggatgcaggccatctgtgcagatcttcaatcatttttgttagaaaagtgaacaacccagatattgtatccaaaaactttggtccataaatggaaatgatgaatttaaaaaacaaacaaacaaacaaaaaactaactgtgccaagaacaccaatctatttgcagaacctgagtttgttccctgtgaagcagagtagggtgtcagtggtcctaggaagatcagaagacttccttctcctctatttctccttagggaggtcttcctggctgtagtctaaacatacagctctaaaccaagatgacagccagcaatcatggctccacttacttgaaggttggaaacaaacctaaggggaatcatcacaaatcacactgtaggtgccatggcccaagtcccagggctcgcctcgcctcatgctggcccctactcaagactggctcctccccatcccagcactcagcagccgcaccatcagatcctcctgtacataccctacttccagggcccacgcatccacttaagcacccaccagctgggaaccacacaaggaagggtggagtgttccatctcccaaccctgcagccagacccagagcctgtggatcacaggtgcagctccaagcagaaccaagtaactcaatcaaaaagcaaatgatctctgaaccccagcccgaagagaaccccatacagccaagggttctggggagaccagattttacaagtgacacatattgagctaatctctccattgaaggagattccatcctgctgccctacaacaccatcttacctcagcactctcaggcttgcttcctcctctgaccacagtagccctcacaatagcttatgggacgcaaaggcatcctcgtatgttcagtgctccccattcctgtttcaggggtccctttgtgtcttccccatggaccacatcttgtcttttttaccctgttcctaccactggaaccccaagctctccaaggcaggactgtctgcattactctcggctgtgtccagtgcctctgacaggctcaaacacacacacacacacacacacacacacacacacacagaagctacacaatgcatgagacatgaaggagtcagacatttctaaagagcattgaacaaagctggagttcttgacgcctctcctcccttcctttccctctcctgcttttctcagtggacgggatgcctacagaactttccactccggcctcatcacgtttctgtgttccagtgtggctgtacagatcggaaactctcccgagtgggtaggagaggtgagcgaaggggaggaaaacctctgaaagagagcctccccattctcatttcgaggtgctgcccacatgtgggcaaatgggcacagtcccagagaagctagggcagacggcaaagggtaacagctaagggacacataagtgtgtgcactgaaaagggcaggaaaaggggtaacaggcactccaatgtaactccctggtataaacacagactggcgtcagcagccattgagacctctgcttcaggatcatgagcaagagtgtgtccctgtgtcacttgctgcctgacctctgcacagatgcacaggacaaagatgctactggcttcagccaccacggtacgcataagcacatacagtgcctctggaaatacagcctccgctgatttgacatcagggttgatcacagatttagattctacacaacaactgaagcatcatggcattataggacacaagaatatcatagaaggggtcccagcagctggaagcaagaaactctgagatgcccaaggcagggctcacagacccaggaacctgattcctagccataccttcccagtagcagtgagacaggggcagggacatctacaggctccatttccagcccctccctctacacctacgcctggacctcctcacccctcacttgactccacccgcttctcctgtcaatcaacttttttcagctcgtcttcaagccaggagatgcagagaatcacctttctgggctcctccctggtggagaactggacagagagataaaatggagccctcaggggacagccatggaagcaagtgacaatgcacacggatgtgccaaatgtaaaggtatttattaacaatgacaagtaccccaggaacaaataaaacaaggaggaagacagcaagggggcagacagtggacagagtcactccagcaattaaactctagccactgccattccacatgcctgaatacagcattccctttagacagatatctcatgggatcctggtccttaaagagaacctgactggtcacctacacactcaaatgactacccccccccatgacctgtttcatggtcaaaatcatttaatatcaaaggaagagaaaccattgcccatttaccatgctgtgacttcctatactagtctataggttaaaatgactccctgtctgttatcttatcactgggtccctagcacctgaaacagactaagccattgcaaggcctcaggccccaaatgccataggtgactttttctgtatttccagtaacccaggtcctcctacgccaggctgggcattctttgtagcacatgaaaccattatcatagtcatatgataaactctatatctctaagggctaaaagctggaaagatggttagtgaatgagctgcttgctagccaagcgtaaaagcttaggtgagtggaatacggattgtgataccagtgttgccaaggtggagacaggagcgtcctcacgccttgtcaaacagccatgatgggcaaagaaggtgtgggggaaaggaagataagagatgggagtagggggtgagactactgcaagtctatttatatcaaacaaaaaataaataaggtaggctctagagagatgactcagtacttaagagtatttattcctcctgcaaagaacctgggtttggtccccagcacccacacagtagctcacaactgtctgtggctccagtttcgaggatctgacaacccaggctgatgtccaagtgcaccgggcatacttatggtgcacatgtctatgagcaggtaaaccgcttgtacacataaaataaagaaatctaatttttttcctcttaaataaaatgagaaatgaaaaagcaaaaacactcgacatcaacctctggcatacataaacacaccggcttgaaaaaacacaaggacatgtgtgcacgtgcgtgcactcacacatacaaacttatacacgcatgcaaacatatgcacatgcacatacatcatatcacagcatatcatacaaatctaagagctggggttctctctcaactcatgaggaatttcctaagtatccatttcattgtgacttttaggcaagaggggctctgctggattctccagggaagggacaactcaattaggaaaggagacacactcagctgcctcctgacttcagcctcgagggctgcaggtctgtggtctgatctctctgcctccagcaagcaggggaaaaccaaatcacagtgggaagccacatgcactttattaacgcactctctgagaagatgcctcccgttgctaagcacccgctgtacacacagggttactattagaaagttaatcatggaaaatgctgaggtctctttccccagccctgcatctctcagctccacgctacaatttcatcttccagatcacgttacagggcaatgctattggccccatcccttcccttgtcctgggcttttgtgacctttccattagcttccagccacacgccacgtcagccctgcaaagctagctgagtggcatgctggctttggcctgggccatcaggctgacattttccatgcagcctcaccagccagccaagcgctcagggggggattaaaacatcgtgctacaacaccttcgggaaagggacaagatctaggccccactaaggcagctgatgctatccacacaccatctctacccagaggtgacaggccagggcaaacaacagctcctcaggccttgctttcatgtctcacactttctagaagttggccagagatgtggtcctgttttgaaggccttcctgtaaaacacttggttcttacttgccaatcaacaccccagttagagatagttgattcttttgttttacgattattttcaggggctggctctcattccatgagtctggaccatctgaagggaggctgtgaaagtatattaatatccctacaaaggtcaggctctgcctgctgctgcctcgccaaccttaaggctgaatcattatggcttttattactaataaccaggataataaataatacaagtgattatgaagcagggggaattctgcggttactgcaacagccagaacttgcttggtcacacatagaacgggggaaaaaatattccaacgttcaagtttggagtcttctggcaagagaagtgccttctgcttggtggtattgtaaatctggcagggactttacatgaacaaatagcttgcaaggtccagtgtggctcagggctgtccccagagagtcatgccatttagtgggtccttgtgtgaagacaggaacgatttcaacaaaatggcagacttaaaaggcctggcagaatgcctggcacacacagaagcctctaagtatctgatgccatgttgtgtggcaattcagaaaataacaattcaggtaggaaagataaagtttgcatctggttcccatgccaacccaagaaaaaagttcaaaatgggatgattctagctattgtttagagggttctgtgtcccttaggaaagctctggccacaacacagcaaaagctacaggacacatgcaagccttcacattcactccagcctcccgttagcctcagcctgtgaggcacacaacagcctttctcaggatcagcagagaaaagcaaggataggagcttagcctgcatcttgaccaagaaagtccaggttggcttcaacctcatctccactgctatagctctgaactcacataagacatcaaaatgccaacagattcccttaaaagtcttcccaacttctctgtatagttattctctctaaccctgagaacttctggttcatttgctaaacagatttctgctgagcatggaccatgtgccaggctttataggcaatgactttaaattagaatttgacagggaagaagaaaccaatatacaaagagtagaaacagcaaggagtccagccaggcagaagtgcacttgtacaggctctggggtacacgggaccacggcacgtgctcagtggaacattctagaggtaaagagtgccagcaatgacagacatgtttcttatccccctcaccaaataacattttctctacggagccacggaaagaaaggaacatctctagctcaggacgcttctctgagctcccatctccctcccattcgtttacttccttgacttgctctcatctgccttcctcggtttctacacaggtacctctggaaccagggtccctgagttagtgacattgctaaggcaacctagcctctctctgtgtctgtttccttacctgtcacttgtggttgcccgagaaccatttctcaagactgaagtctttcacttagcccccagcacacagaaggtgtctgatagagcgagtctagtcacctcttgaggttgttgccatctcagcagagcctctgcctcccctcaccccagtgccctaggagtgaagtctggatagataaaagacacccttgtgctctcctccccagacttataaatcccaaacccctggccttagttatcactagtcaaacccaaattctaagtcctcactctctatggtgattttggggaaccttaaagagatcccagaccttcctagaagttctgatgagctatttccaggtgccttcttcagggacctcctcttccatcttaggaaagccagatcagggtcagggcactccataggctggagactatgtgcacctgcctagtcgtgttggttcccaccccacccccccaccccccccgctatgttttgctttttagtttgcctctcctccccttcaacaccccttacctgcctcaagtctccagaagtcttagaactgggtagctgctgggggctacagtcaagggtgctaagttgaatgtgagacaggagaagcaaattagagcattttcccaacatcccctcactcacacctcacagctctcactcctgaagggctgtaataagcagggacgggggcggggctgatgttcagcctatttctgtctttatccaaacttttgcgctctgctgaatacaggtcccacaagaaatgagtctcagagcagccaacagtcgatgtgaagctctgtctttccactgtgagcataaaaataccgcaagcactgagagctttaatgggttcaactgaacccatggcctttccctccagtgaaccgcacagattaaccccagcacacgccacaaaacatagtatgtttcccatcagtgtgtaagctcaggtcccatggaggtgcagagttctccacagcttctccccatgggtggggtggctctctcctgctcagaaatctctcaagcaacggcttccacacagatcaagatcaaaatgacactagtgtacctctcatctcctctgctaggctagggcatcctagagaagagaagcattgcctgccccactgaacctcattgccaccactccatctaagcagtagagtcaagggcagtcctagaacagctgtagaagtcatgagttcagcctcatcagcaccaaaatatgtcatcaatagcacagataaacacacagtatctaccagaatgctaggaacttaacagttgctttttaaatattctcaccttgttcagatgaattgcactgggactcaccaagtttggggggggggaatagaaacaaacaaaatgtgttattaactagaacttaccccaggtaaataagccattggtaaacacagcttttcctactttgagatcgcctgaatgaaggtgatcagagaagacaaagacaagagctaaaacagaggattccagagactaccccaccccggggatccatcccataatcagccaccaaacccagacactagtgcatatgccagaaagattttgctgaagggaccctgttatagctatcttgtatgaggctatgccagtgcctggaaaatacagaagtgaatactcacagtcacctataagatggaacacagggcccccaatggagaagctagagaaagcacccaaggaactgaaggggtctgcaaccctataggtggaacaacaatatgaactaaccagtacccccagagctcgtatctctagctgcatatgtagcagaagatggcctagtcggccatcactgggaagagaggccccttggtattgcaaactttattccccagtacaggggaatgccacggccaagaagtgggagtgggtgggtaggggagcagggcggagagagggtatagggaacttttgggataacatttgaaatgtatataaagaaaatatctaataaataaataaataaacaaaacaaaacagaggattcattagtggggaacccctacatgggcaatgtgcaggcagggctggggtctgggaggagagatggagtattgaaatgctaatgaaagaacatgcattcctatgtatttctctataaaaatactgtcttcaggaaaggtggaagatctgatgtctgatttcactcaggaattcttggtagtggtggtggtggtggtggtgatttggggggttttgttctttttttttttttcctgaagtttgaagaagtatcatgggctttacagtagatctagtcttcaaaggaaataaaccagtcatcaatcaatggacctgatggtacacagctttaagcccagcactcaagaagtagagaccagaagttcagagactgtataaccctctgttatacagctagtttgaggctagcctagaaatcatgggatcccatctagaaggatagatgggtgggtaggtagatggatggatagacagatggatggactggtgaatggataggtagatagatgatttgattatattcccccttcaatgtccaagagaagtcgatataagaatagggtttatgttgcaaaactccccatctggagagcttaggctctgcccaagctctatacccacaacaagaaagacgaccccaggagcatgtgagatgctaaaaggaaagctggaaagcttgagtcatcaaagagccaagaacattccctgtgatacaaaaagaggctccaagagttgcaccacacactcaagcctgcaagagctcaaagaccaagactgcagatggtgttcgctttgagtctgagacagcttcccttgtctcctgtgggcatcttgacaggtctaggagtttctaacactcaaatgtacataggatcctgaggctggctttagaaaatgttgcacaccggcatatgatgctctgggatcccaattccagacatacctagagacccagctccagagaaagaagaaaaggtgccagagtactgacatatcggtgtgggtcacggtacagctttacttctgatggtatttgagaacagcactcccttaaccactgagcaatccagcctccctgccctaactccagagttatcttgcttcttttataaatgcatgtgagcttttaatgtcaaatcttcggacacaaggccaagaatacgagtatgctcagcataggtgccaaccaatggtaacaagaggcctctaagaatgccagaataaaggaagagaggcacccagggcttcaccaacatcactgaacccttgcacaagcacttgctctcccctgatttatgttctccctacgggggaaactgtaagctaatcagagttggtgttttccaaaagttgatgtgattaagcatcctaactaatgcaggtagccaccagtttggaaagaatgcaagccctctggagaacttttaacaccaaatgcctagaaaatcccctgaggcacccctcagatggaggccacccttcacctaaatcctggacatcagtgatcctgactgtgatccattggtatcctgatgctctttaaacagttggatcctggccaagtggactcagccagggaattctcaaaggaaacagcactgcctagaccctctccacggagatggggacagaccctcagccctgctttgaaggaaaggagcaggaacgtggatggcagcacctagaaggccagaatcggtcatgtgggtccttctgagctccatccctctctaccctttcttaatctgcttactagctaagactgtggcagaatccaagaagatcctgcaggctcccttctctgcctcgtctcctctacctttcttgctctttcctcttgcctcctctcctcctccatctactttccttcaacttctccccctcagtcactagccaaaacaacaagacaatcatccagtcaggcagtgcctccctcaaaacaccttccttaatccatggccccggcccttccggaagcattgtgtgcaaatatagcgagcagccttagagggaaataatgccactgcatacctctgtgagcacgtcatgcccctttaagaggaggcccactgttcagttccattctaggccacatctctggtttcaaggcccaggtctccttactgcctcatgcagtattaacatgccctggcaccctcccagctttgcattgtgagccataatcactggagccaacttccacaggacagactcgtttggagctacctcttcacttccatagggggcctctcaatatctgtggccaggccacaccattctctgagcatcctcaccttcagtcatacagagtaatagaggcttttggatcagcagctaatatgccagggtagagtgtcctccttgtgggctactcacacaatggagaggagatacactgtcttgtagcagtcatcaggtaggaagaggtaccctgggacaccagtgtcagaggaaagcaggtcacctctgcagtaggccttaaagtaccatgagcggcccataagctagggagttctagggacaatgggatatctgttgaaggagttcacacctctctatcctctccttcccggaaagataacagagttcaagagttctctatggtcctatgccaaggagaatccatccgtgggccttttccacttagaaaaagacaggtttgaggctggtgggagagaagaggaagtaacaaggaagaaatacagaagagaggaaatcaaacattctgttgattaggccctggggtttcacatgggttccacactgtatacacagcctcctgctgcaattgggaggccttaggagcctagcatatgatgttggtgtctctgaggcacataggatatgctgggatgagactgggctctcaagatactctgtccaagttctcaatctacctctactttcaaactgaaaaacgtcacacagagtacaatgacctgggagacagggaggtcatggtcatggttgagagtaaagtgaggcttggctgtgtaattccatctagtcttcctggcctcagattccatctcaactccttttatagggggaacctagcactggcctctcccaccatgattcaacctaaatgcatagagcttagatgggagaaatcagaggctaatggcatcctggctcgcaggctaatgattcaacatcataggcactaaaggagagactttaacagatcattgcttcttctcacagctggctgtccactcctctttctagcatgtgagggccagaggacccacagtgatggagaacagataggattatatatctgagttcaggcaggtctgcactaagacctttaaacaaagaagctgctgaccacaataggaagccagataggaaataatgtcttccccaggagaagacagaaagatcacttcacctatgtcattattgctatgtctttaggcaagccaagttctctctgggtcttttcatcagttttccattcataaaataactgtgtataaaaccacctaagttttacacaaaacaacagatcacattcaagacctctcctagctctcaggctccgatgctatggcaaccctcaagtgcctggacgaccgaccaggcagaatcccctgctaggctaatggaatgtacagggtttgtccactgctggtctctgctcttgtgctttcttacagaagtacccatcccctcctccgggaattgacaagaatggaaagacatcttgatctgttcctattgtgttgtctacactagacatttgtaaccacttagaacagcagtgaccatcttgctggatttgaccatgtctgcttgccctgttctaataagctctacctattgtcctttaaatcaactcaaaactatctccattctttttttcaaaataatgttgtcctgagcaataatatctgtgaaatcacgagctcaaaagtgttgcttctattttttcacaagcgcatccaaacacacaaactataaaaagaaacgtgtctgtggccttccccacagcatcttgtacaccactggcttggtggagctgtagatcccaagagaagcccacttggttttcacggcaatgtcattagatcaaagctgttttctaccttcctagaaaatacactctgagtggcagagaggctggtgtttaggtgactccaccaactgtagtgaagccagcttcaaacatttgtgtgtctgattccaaatcccaaggcattgttgcttttctaagcaagtgtctggcttgtctgcaggctataggtgggataaaagccaagcaccgacctttgtcacacatttgacttaatcccatcctaagaacttgacagcaagattttccataataatctggaaggagacagatccttgtattcataagcagggcttgtagccagtggacaggcatggttagaagggtgtgttggaggagtcctgacctgtgaaaaacagtggcaggtactatttctatgtgccaacaaggttgaggtttattccccatcaggggaatgctagagtcaggctatctccatccagatgctatacagtggctctgccagctctccccaaacacatagcttagtcacaagggattctggctgtgccagcacatgactcagccacatccatcaggcccccagggaaaacaaaggcaagaacacatgagtggatcaagaatatcatctgaaacacggagatacccaagctttcacacacagaaccaccaacataaagggcttttgtctcagactggaactcaggaaaccagaactcaagggctgctgtcaaggtcatcttatataacatctcataaaccagtaaaggaaagccagatccaagaaagggcagttgtgacatgcccaaggacacttagcagtgtcagggcacagttggaaagaagtgatgccatcttgggccatagatcagacctggaatgtcccagtttcatgcagagttagcagccacaggtcctacacttatttctgcccataaggcactgatgaaattgtcaattacagcactatctcgtaaattcaggaatcgataaagtgtaagaggagagccccagttacccatatgtattcaacaacaacaaagaaaaatgaagaggaaaactgcctggttcattatccctgtgaagtgttttccagcagcaagtcaataagcatcagaaatagtccagaggaggagcaatggcaagaagatgcaccaaatcctgcctgtggggagagatgctggccgccatctcagcaggaagaaactcccctgttggtcatgcaatatgccagctgcagaaggatcttccaacaggcatcccccttgattccagcaccagagacctttaagtgtgctttcagagggttctcaggagggccagaggctggcaagagaggagagaccctcctgtaaacaaaaagaacagaggaaaggtgctccacacagatgcttggctcgtggaaaggcactcaaattactatttcttctcccatttggtactcctgtaatccagggagtcggtccactcaaactagcatgttcagaacagaaaatgatgccatgaacttaatggtttgaaggcagggttctgatttcctaagttcatatccaccgtggcagtggtagatggtcccagcaggtcttcacagtatcttccttttggagataaagcaacagagccacatagagaagcaaacaggaccagtgagatgattcaagaggtaacagtgcttgtgaccaaacctgagatgaatctccaggaccaacacaagttaaaggagagagacaacctctacaagtcatcctcctgccactacgcacatacatacacatgcacacacacacacacacacacacacacacatacacacacatgctcactgtggcacttttatgtacccctacatacaagatagatagatagatagatagatagatagatagatagatagatagatataataaaatattattaaagaaacaaatgacattttaaagagtaacctagatggtcaatagtcaagctaaaatcaagtattaaaatataaacacagggaagtatcagctgatattgtgaatcattgactttccagcccaagcagcctaataatgttgaaagggacccagaaggctgccatgtcctctacatatgttatcctgacaatcctaaaccactctcagtcttgtgatgctaccatccgtactaattaatcctataacttctgttgaaatttttactgcgtgaaacatcagaaatgtgatgtatgtatgtatgtggtgtgtgtgtgtgtgtgtgtgtgtgtgtgtgtgtgcctgtgtatgtgcatatgtgttgagtaaatgtctccatctccattttctgatggatatcacatatgtagtcgacagtcttaggctgatcagccatgccctgaaaaccccatgccttctctactatgtgaatctctgagcattgtcagtgggtctctggtgccctaacaagtcttgtcatccacacaggcatcaggaaggtcagatatattcttcactccaaggacagcaaatctagaggaaacactgacaagccaattcattccaaagcctacatgatatagggaatggaaccctagaatctgaggcatctagtctagattcccatccctgttcagtggctacatgaccttagacaagtcatttctcttctgcaggacttgcttcgtttgcaaacacaaaagtatgacagcatcccagaagtaagacagccaaggctgaaggcaggaatcctgaggactagagaaatagttcactgcctctagtatgcttctgtatggcaggctctacccctcccctgcttttctgacacaatcaagcaagtctgaaccaaccctatgaattgttcctgtcagtggccctagagaaggctgaggtagctcatcatccccagctctcccctaagccacagacaaatacccaaaaatcacatgaaggacctcccatcacctaagatacaagttaacctagagggtggctgtgcatgttgacagtctcaggaccaccacaaagtaagaaaccactgagagcttgtgtcctcttctgtccttgagtgggactgtctctggagtcacttacaatctctccgttccactcactgcctcttgctcttttccattctcatctgcctttaaatggagatataatttttatgaactataattttaaaaactagcctaggaacaatctgttattaagaatataacaactcctaaaaagccattagagtccaaaagccagccagcttcccctgtcgcccaaatcatcatgatgggccgtttggatcataaagagcagtcagcacctctgcagccctgaacattttttactgttttcctttagtttggtttggggtttgggggtgtgtgcacgtgcatgggtctgttgttttctttttgttttgtttgacaaatcaggcaggcttcttctgtgctaggtactatgacaaatgaactgactgtgggcagtctgaacctttgtgaggcactgtacaacagagagagaaagacagagagagacagagagagacagagagacagagagacagagacagagagacagagagagacagagagacagagatggagagggagagagacagagacagagacagagacagagacagagagacagagatggagagggagagtattgaactcttcatacatttgtatctattttcatcccaccagctcccaggaaaacctacagcactcccatggggcaaattccttgacaggatctttggctactgcaaagcaatgaggacctccttggtaacaacctcttccaattgtagaaccttcctgatccttgagtcaaatcttgagtatgtcctatctgcattaaaatctaagcttcctgcttatcagctctatggacttggcaaagtcaacttctccaagcctgtttcctcaagtgcatctgtaaaagtatcagttatagactccaggatgaatgtaagttagtatttaccatccacattcatggttagtcctgaatgtcatgagcccttgggcagctccttctctaggcagctccagggactccctgtgtctcctccaaacattaaaagctcaagtgttaccccttgaccctagtgtggagggagcaggtctagggcatggttctaggttcacacatgggatccagtgtgctgtgccctacctgtgagcactggctgttcaggtcagcagctacccgcaggtactgctaagcccaggcagcctttgacacacaatgacctgctccctgatgtcaccatttttagtcctgcattagttagtaggtggggatggatggatgtaacacaggctgaagatgagggtttcaaagaagagctagaaattctgggtctttcccccatccatttacctgctccctgcccagataaggaacaatgcctgcccgactcttgtccttccagagtctgcaaggctattctcacactggtcttctccatccatctgtgagtgggcgcagtaagaggaagtaactccacattgtgaaggtgacaaagcacccatagttgagtggcttgtccaagagcacatggactcttctaccccagttagccaacacacctgcctagtgaattatgggtaagctatagaggaggctaagaaggtaaccttatagacagtacccatctctgccagaatgcatcacacccccatcttattcccagctcttgccattccaggatctattaaagattggcagcccctgtcactgggcagtgtacataaatgcctgtcataattctcagtcctatggtcagccagtggtcccaggtgtgagtcctgccaccctcagactatctgtgctgccaggaccactgaaagacacgagccacaagaggcccactgccacctcatcctcactcagaattcccagatgaacaatgggggttcaggtgcagaacatatggcatatctaaatgacaaaaactgcagggctatggattcctggctccccatcagccactgggggacaacagtgatggagaattgtcgccaaggtaatgggtcatgtaaaagcaccttccacagaaaaggtctacttcactcttccctccatcccttgctgtgctcctgattcaccagcaattgctcccagaatcatagagatccacttcaccacccttagggggccacttgccaggcagagccaccgccagagcaggatggagcagccccagccttgggtcagaggtcaggatgacaggtgcagaatcagattctagctgaactagtcaaaattgggatgcttttagaaggaagttcagttcattgctgtgtaaaagccaccggttactatgtgcctgcagtgtagtacagtagagcatctgacacactgagctgaagagatggctcaatcagtaaagtgctgtgacaaaagacttgaggtcagtccccaggatccacacaaaatatccaggcgtggagacatacacctgcgacctcagctctggtaggagcagaagaggattcctgggtcctgctggccagccagtctagcctcatcctaataggcaaatcatatcttcagtgagagatactgactcaaataataaggtggagagcacctgaagaagacaccgacatccacctctgacctacacacatacacgcgcgcgcgcacacacacacacacacacaccgacttatcaaaagctcaggataacattttgcaaacacgagagctcatgagagatgttatcatgagcccgggagaaaaatgaagtacgatatggtcctgtctttcctagcattcccttgtttgggaaaaaaaatggtactattcaggacagaatttcttctggataatattcatggctctcagcttctttacaacatatccatggataaaaataatgcttagtgtgtctttgggcaaaattatgatattaatattcatcgtagtgttggcaatagcaagagagacttgagtcactggaattcttacgccttctaaggcaggctttgtgctagagattatatacattagtttaggaaataaactgtgtcgctttcaatgttcctagaaaattttatggttaagtacgtatctccaaattttaaaagacatgacaaaaaaccaaaatgcaacccttagcttgtagccagcgaaggaattctccattcaacagaagacaggaaagcgaaaagaagagccaagacacctcaagtaaaatgacccaaaaaagagagaaaaaaattggcacagtttgcctgtaatcttaataaacataaatggattaaatttccctgtttgaagatagaaatcatcagacaagattttcaaattaaacaaaattagttacaaggcacatctaaaacccagccttaataattgggcacacctgtgagggatttctgcttaatttgaagtggggtaatctacttctaaactggatctctgaggtagaaaaacacacctctaatccaggtctattctgagccacaccttctgctggaagtctaaataaggacatggaagaaggaagcctttgcccttttgcctgtttgctctcaccttgctagcaagtccattacatccctggcattagagcctgcttcttcgggagcccagcagaatctaaagaccctctgtgacatccagccctgtgtactgagcaactactgcgttcttgaacctgccattcatagccagccattgtttgtgtaagtcattcttagtgtgtgtgtgtgtgtgtgtgtgtgtatgtgtgtgtgtgtgtgtgtgtgtgtgtgtgtgtgtgtgtatgtgtgtgtgtgtgtgtgtgagagagagagagagagagagagagagagagattcactctagaagctgttactgtagagaaccctgattaatacagttgaaaatgaagagggaaaaaaatactatattaagcaaagccaaagaaaattgatgtctctcataattaatagcactccaaattaattttggttatcaaaacaatgcaagacagaattgaaattcctacactttgcctggggaacagagaagttaggttacttggtcaagatcacacagtcagcaggggcaggaaaatgatccacattcgggtttccattactcccaagatcactcttccaatgcaacagtctacatgttgtagccacttgtccttcagaactatccagtgggtgggaaatacatggtcccctagtgaaggcttgttgtatgagtaaggaaagccaagaataggtactaaataactgaggaaataaggaagaggatctattggctagaacatcaggggcaggggaccctgacccagtaaactctgacgcagtaacctctgaccagggaaaagccatctgttatggttcgaatctgaaatgcctccacagactcaagtttgaacacttgatcctcaactggttggcactgtgtatggaggctgtgaaagcataaggaggtgagacctcgcttagaaaagtcaccaaggcaggtcctcagaggatatattatccttccaatcacattctcctgttgcccatgtgtttgcatgacctaactcgtcccactgccatgagtctaccataagccaccatatggctttcctccactggtggcagtggcaagaaaagtagctaacagaacaacatcggtgtttgaagaagcatccaaactacctccaagtgctctcccatgaaagcaaatgatctacaccaaactccagggcaagtctgctctaagatggaggcagtgctttcggatcatgaagggcagaaactacatgatccttcaatggtatgcctttgctttggtctgactgtttatgtacccagcaaagttgtatgttgaagacccaaccattggaatctggatcagactcctcttaggaaccaaagcgtgctgacttgcccactccactgtgggaacacaacaaggttccatccatggagcaggacacgacctctcatcagacactgggatacctccattgtgagcctcccaccctccagcgtactgagaaataaccctatgctaacaatcatttttttctaagtagttctgtagaccaggctagccttgaactcagagctccacctgcctttgcctccccagggctgggattaaaggactgcaccaccacaccccgtccatgcttgcttcttaaagacaatacagtgaagcacagaaccttagggttgagaagaatatgaggggaaactaacactaaaatatcaaacttttctgattattagaattgcccaggacacttggtaaaattaaaagtttctgtgcctcatccctggggcaccaatccaatttaaaaaaaaaaaaaagtttttcaataaataaaggtactcaggaagatataaggaaagagaaagatgacatagtggatgataaaatacaccttttcaatacataattgagcaaaatttaaaaaacaaataccaagaaggaaggccatggcagttaagaagggactgccacatccttacagccctgagatctgaagcaaagactaggtaggggtgggcatgccagtcaggcacccacacatgcacttcattaaccaggagcattaatagccatgaccatgtccaaacacgttctactgatggctacactttggagagaggcaaactgtgggtatattatacaaacacacacacacacacacacacacacacacacacgcacgcacgcacgcacgcacgcacgcacgcacgcatgccacattctcattttggacctcaaaagggaaaaattagagagacaagtcgaaaacaagtgggtatataactgcaaacagcaatcaggggcccctgggccatagagactcctcagctccaaggttcaatgcttctttgagaagatggtcaaaatgtctagggcccatggtgtgtcccctttagtgaacagtggaacaggacaacaggtccatgcaagggaacacatctctgggtcttacctcaccccacaggttctcctaaacccctgacagcatcagaaatcagctcaggcaccaaggccaaagttttagaacaggaacacaacatagttgtttatagtatcaaagcaattatgactagataaagctcccagaaaaaaaaaagataaaagcactcatagcacttggaccatattggtatactgtatgtgggagctgatgagttctttcctaaaggaaacaggctaaagaaataataaatcccctctcagtgcttagtgctttagatgaaattaataagaatatcaatgtcatgaaacaagctagcctgcaagtcaatgaagcaaaccaaagaccaacttaacaacatttcagactgctaaataaattagacaggaagactgcatctagacactgaactcctgcactaggaacaggggtctgggatttaccagtattatccatcttaacaatgtaaaactcaagccatttctggataaggaaaaatggggaggagatacggggaagtctgggagtgttaattgcttcatcttgcacagcatgatctccaaagtttacatctaaataggttattaacagaaatctgtgacttctgacatcaaattagaaaggagatgactggaggggaggggagagactggaggaaaggggtggggacgtgaggagcagagttgtggaggaagactggttagagtaaagaacgacagagatagtgtcaaagttctacagaagatgcatttactcatacatctctccggctaggtcctcatcagctccaagaaacccacatctggtcagaaggaacaggaaaacggggtactcactcatccttccccaaaggctcagggaaagtggggtaaataggtaagaggcaaaggggacagaggacccaggggaaacattgtctcctagataaggcaaaagctgactatctacctaagacctctatcctagccagccatcattccaggaggagaaacaagacttgtaagaccacagcaccaacaaaggagctaccgacagctggtggcttcaagggaagggagagccaggtttttcatgggtgtggtcatccgtaggctgaccatgttccaatggaagagcccacacccaagaatatacgggcagctcaaattggactcaactgaactttttttaaaaaggctggcgagggaagagtggatccaaaaagtgttagtggggaagtggggagggtgattatgaccaaaatatagtgtgtgcatgtacaaaatgccccccaaaataattttttttgtttttaaaagaacaaagaatgtatgaaaatgccaaaaacctaacctataaaatagatcttaaaactaactttaaaaaagaaagctattaccttcaacttcctaatatttttttataaccacagtgacatgttttgaaaatacctattttaactaagaaacacttacccagatcagaacttccttcaagtgtgttcattttctctcagaaaactaagaagtatattaatattcaatgtcaagatcaaaatgcagaaggtggtctggttcttgtaaaattatttccataaaactgtaatgtaagtatctaggtatatcttccaactttccaaatgggggtgggctgggggccgaagtattgaatggctatctctcagtgtctatattgcttacttcttaggtattaagacattaaacaatttttttaatactctttcctgaatgttactgttttttgacttgcttacagtaaatattttgaaaccaatttgttcatcatctctaaatggaagtggacacaacttagcaagagtaccagtgaatccccaaacaacagtcctgagaagccactcaccaagctattacccaaactacagtggtatggtttgttggcaattctcagggctgcagcccactcctgagcaacttcctattcacagcactgcagaatcccctgctgctgctgctgctgtggccactatctcctggtgaagatccccaccatttcccaaatggcctttaactaccagctatgggtatctgctgatattgtccttgcatcctcagagcaatgctatggagttatgaagatttgtgagagtttcattcattttctgaggaaggaaccgtggtccagaaaagtgaatttcctgcccaaggtcctcagccggttggaggcagaccttcagttcctgttctgctcaaactcaaagcccaggtttttaacaaacatgcttggctagaaattaatgcattgtatagaacacaaatctcgtttgctttgtatcacatgtgggtagatggactcgcatcaaccgtattggacgttttgtggaaaccaacaactagcattgagatgtcatctttgataatttctgcacctcatcttttgagatacagtctcttaccaactggggcttgtttagactacactaagagaagcccctagatccactagtctcttccctacatcagcttcacagtcgcacgctgccatggacagatctttatgtgggtgatgagaatcggagctcaggtccccatgcttgtacagcaagcacttctcctgccatactgtcgtcaccccagccccggtccaacccatgttttctgtaacttccaactaatgtcacatgcttggcactctgaggacacatgtcgaaacccctcccatatgggagggaccttccattacccaaggtcataaatcataaggctctcacctgcccatctttttccctccccaacagatgccatgacagatgcaaaaggtactggaaagaggttgcatttctttcctggtgagtgaagtggtcatcaagtaatagttcatcaaaatcatgaagtttccagcacgcatttacctatatgcagccctttacattctgctttgaggaatccccagtagttgggttccctagaaactgttcctaggaaagcttcaaaccacaaacatcttccaactctccgggttaatgggtaggtgcggcagtgtgtgaggagtcatttatatctagcacagaagtgtattataggcatttttcaatttatcttcctaatgatatttttttcagctactcatatttaaatgagttcttactcccataacacccctgactgacagtgaaggggagaaagtaggataaaatgctaagcacattttccaccaactgtgaatcctccaagaaggaattgcttagcgcttgctctctggctgggcagggagggatgagaccctgcagggttgtgggagaggggggctttctcagaattatcatctccccagactctatcttcacatagagatgcatcagccttgccagctggctacacacactgtctggtgtttcctatgccaacatcaaaggcatctgggcatggaatcccggtctgaccaagaacattctcccaggactgcaagatttccagcagggtcgtcttctgggaagcccagttctagataaatattacactctgttggctctgcacagagctctccatcaaaacgcacacctctgctggcaatggagttatggacctaggcctggaaaacatggcctcatgcctgggagagcaagcctcggcctcggaacagagacccaatatagctcatccagacttagtcaggccactgacctggctcccctgtccctaaatccctccttctgtgtccttgatgtcatctcctttgtgtcctaaagtccaacccccccccccccgtgcatatgcaaggctcccagtttcctcacttttcccaggtttagtgtccttggcaaaagagggagacacttctagccacagcccagaaggaaccttcacaggaatcaggcagaaaccacagactgaaattgcattttctcactctcctcctttttgaaggaaagtctgtgtggggctgcctgtgatcacacactgtctacgtaagtgagagagctatctcaaacagcagctttctccttctccccctcctcctctccttcctcctcctccctgttgtcctcctccaagccttcaaggcctccctcttccatggtgttcccattcactaactcacaataaaaaatatctccagcccctccagcatcattgagaaccccaagaaatccaaaaggaaagaggaaccatagggacaacctcaatacagacataggaagcaagacttaggtcatgcttagacagaaggactatcatacggggaggggcgatcaagggcaagttcagccttgaggatcctactaagacaaggacagagcaagacagcttctgatgtccatggcccaaggcaactgttgtcccctcttactatctaactaatacaaggtcatgcattatcctgaggtatggtccccttcctcagtgctgcctggttcacacacccatacccatgtctctgagaggagtacaagaggcatctgactcaccagagacaactcaccatacaatagtagcccgatgagtgtttcacacttattcctacttgggaacattagaactgtgtagttccttgtcaggtaagtgcccaaagaccttctacatgtcactctgctttgtgactaagagttacccaatgtccaagagcagtgagggcacacctcatacaccccctcttccctctgcatgcagacaaggatcagagcccgaggactggagggttgccacaagtaacaacgcacagccaagaatcaatctggttctagaagccacgatctcaccaccacaccaaatgcctgttctaaaacatgcccataacttgatccaagaaaccatcccatcctggacaatccaccagggcaaaggaccaacactcctccatcaaaatgaaagatgctaatagcaagagtgtcgagtaagagtgcccacctttccatcaaacttcctgtgcaaagatgagctagatttctctcttggaagcgagtgcctccgacatccagccatccacccaaactgctaatgggtaccattgcttccccagagacctgcacatcttactataaactattaaggaatggtgtggtcttggctgactggatggaactggttgactatatttcacacaccctactaagccttaaatagtatgccttggctcaaacaacccttccctttcattcatcttggccaagaatccaagcatttgaaaatttatagtgaccaaacctcacccaacacagaatcttccaatcctggcccatctatgtgcctttctagatgaactggaaactggggtgaaatccagcctttccagacatagcaagtcttcaaagaagacacatatttctagaaccttcaataccttctccttagtgtatttattggaaagagttgtagagaagaagccaagggcaaagtcaacacatgattgtgctttttcctcagattatctgactcaagttgtacccaagaacagcaaatcaaaataggctgaccccgaaaccaccatcgaaaatggttgtcagtagagaaacaacctgagaaccaaatctgtctgcaatctatggacagaaaagaagttttattagatcaactgtatggcccaccacagctgcaaatgatctggctttttatataaataaataaataaataaataaataaataaataaataaatagctgattcttaggttataaaactttcagaagtatttaggactattcagtgaggggctttttaagggttttgggtttttttgtttattttggttggttggttggttagactttttgcatatgtatgtgggtttggggagagatgtgtggtgaccaaagctgttatcagagatctacctagatcattctctggattattcattgagtcatggtctcttatttgaacccaggcctcagcagaacacgtattctagtcagccagcttgctccagggaatcatctatctgccttccaaaccatggaattaacagcaggcagccgtgtccagagagcatctatgtggtgctggggatcctatctctggtcctcacattgtcacggcaagtgtgtatttgctgagccatcttgccaaaccctttcagaccttttaaggtaaatactatctttaggatatattggcattgcaggacaaggatgaggaacaatgattcgtgagacttgttcaaccatacagggaagtaaaagggggaccaggtacctggtacccagggcttcaggaggcagacatagcttcacaaggatcattgttctacctcagagaagcaagtgttgcatgtgcctattctaaaacacagcttcaccacgcccatctccattcagcatctggaagcctaaggcaggcagtgccaacttcaggagggcagctggtcacatgtcccatgcccacttagctcaggagcagagaaaggcttccccaaagctgtcccctagcagagcttcattcagtgaacaaccatctaccaagtctagcaactctggtcctgacaggcacactgggaggcctgtcctagtatgcttctctgatgatgtgataaacactggccaagagtaacttggagggggagggtttatctgacttccacattagctcacatggacctgtcttagttacttttctattgctgtgtggaggtaccatgatcatggtaagatggcaaagaaagcatttggcaaggatcacatgtgaatccagagggttggtgttcatgatcatgatggcaggaagcagagcagcaagcaaatagatggagcactggagccgtagctaagagatatttccttatcctcaagtgagaggcagagaaggagaggtagttgggactggtctaggattttggaacatcaagcctatccccaggacccaccaattccaacaaggccacaccccctaatccttcccaaacacttctgccaactagacaccaaacattcaaatatatgaggctatgggaccattctcagaccaccacaggaactaaggcaagaactcaagacaggaacatggacataggaactgaagcagagaccatgaaggaacactgctcactagcttgcactctaggcttgctcagctacaatcctatgcaagccaggaccacacctgtccatggatggcacacagtaggttaggccctcttgtatcaattagcaattaagaaaaatgacccgggtgtggtggtgcatgcctttaatcccagcacttgggaggatttctactaggcaggcagatttctgagttcaaggctagcctggtctacaaagtgagttccaggacagccagggctatacagagaaactctgtctcaaaaaaaaaaaaaaaaccaaaaaaaaaaaaaaaaagaaaggaaggaaggaaggaaggaaggaagaaagaaagaaagaaagaaagaaagaaagaaagaaagaaagaaagaaagaaagaaagaaagaaagaaagaaagatggcttgcaggcatgtccatggttaattctaatgaaggcaactactcagttaaggttctcacttgccctgtacatcttgttgacaactgaaattaactatgacacctggagggacagtgggcatatcagcctccataagctaaacggagagaaccccagctttaggctcttatgattctgggctctagtttttctatttatccagatggcttcataccacatgctatactttatccccagctctcaattcatcaaggcataatcactaagcatctcctatgaaccagatcattttttaggcacttgagacagagtagcttcaaaaatggcatgttgatagcctcaaggagcaaaatagactgaagacagttctaaactcgatagatgtctgaacctgaatgtcacagccaccagcactgagaaaggtctctctgtatcatgctcagcaaaggaggacactaggccacagcagtgaagccaggtttccaggattacacagctagaaggggagaggggtgcaagtaacactcaggcacatatatctaaacactacggtcccctgccttcaatacaatgccagtggttgcccatcctttggttatctcggtagttgttggcagtgccgaactcaatttatcatgatgaggaatgccatggagcaggtctccctgaatgggaaaagcaacactcctcttgtcaatcatgctagacagacctcatactccttaacattggtagcctcacaccttcttctttgctcaaagtcctgctggctgggaacctagaagataagtgatcatgggacccagagagaacctgaccgggcctgttggacttgaataaaataacgatgctgagagaggctgtgacctatgagagacagagtggctagatgacagagatctggctggtatccactgtgatggtttgaatggttgcccctcaagcttaattcccagggtagaggaattgaggggtaatatgatgtttgagagctatggcctagtagaaagtctgtcagatattgaggctctaggagaagatttgtgtgtcctccttgatgcctctcctcttattgactcatgctgtgaatgccagcttagacatacactcccactgccatgtgcagcacaattccattgggctacttgaccttgagtttccagaatcatgagcccaaataaacacctctatacttcataaataccctgtgtgagggattttggtacagtgacagaagctgaggaaactatcctcagtttgattcacttttgttattccccaggatttcaatgatgccttactgaaatgtcccagccaggctgttaacacaacattaggcatcaggttggaaagtcctccaccccattttaggctaccatggcttgtgacaggtgacagtaccttcaaaccagcattcctatggtagtagtaataacagaaattttccagaggagggcaaaagtgaaatctttgggactattcaatcacatcagagaacatgttcacactgtcaatgctggggcatgcaggaactggtatattcccatagcccactgcttctctttcagaaggggaagatgagaagacaaggaaggcatgcagagctgtgtgcattcctggggctctatggcgacatctcctatcccagccactctcctaagtctggtgaggaggctcatgtcttcagtgttactccaggccaggatagagcaacagaagaaggagaaagaggggaaataagtatcagattaggatggtgaagaagaagatggagtacatcagtccaccaaaaggcttcttctgacatgagttctggttggggctgccgcccctctcccagcctctacagtgtagacatccctggctgctaccaagcaggaccacggagccagagccatcttccttcagcttctggaaggcaggagaactttctgggatcctgtgcttcttcagaagctctatgctctccgtctcctctctttgcctttatctctagatttagcatcccgatctaacatctgtgcggctgttaatctgcttgttttagctttgggacttcttgtagacccaccaaactcaagagccgaaaggtaccttcaagaaaatttccaaacaagctttccagatgcaggcatgccccccttcctgggaatgtggggagggggaagctggctggttctaggcagaagcacagctctgtggattccctcggagcacattctcagaggagggggagcatttttaagctaaggcactggcatagctgttgagtcttggaaggaaagatggaaataaaactccagacgtgcaggactagaactccgtgtggagtgctatttttatatgttgcccccacaagctaagcaatgccacaggctctgcccctaagttttgcctctaagaatgtgggaagctactcagagtgggagaaactgaagcatattggaatataaaagtgatgcaaagatacaggaaaatggtagttttatttaagtaagtgtgtgtgtgtgtgtgtgtgtgtgtgtgtgtggtgtccccatatacatgttattaagtcaatgctgctaacagcatacaagaccagattatgctctgaacttgaaatgatggatgggaggaaggacacttcacctttatgcccaattcctcttacagaattttgtgtacccaaattcaaatttatccagtatccgcaactgaaacccagagttctcccagccatggtggaaaaacacaaagaagttcaccagcaggaagttctagaaatctccaagtctcttatggaccattttacaagtggaaaaactgaggaacccccctcaataaaaatatagtacataagcaagccgaacccacagaccttgaaccttcggggatgctctttcagttgatatctctatcccttgaccttcctatccctgtccagaggccaatgtgtggccaagatgttcccttgattaagtctttctgcttgaacacagtaatgtttggaagtttgagagagagtgtgcctggcagttttagcctatgagtgatagatcacctcttccccagggtggtctgtatagagccccaagaacagtcacagttgtgctgttcagctcagctcctctgggggcagctcttggaagtccattcctacaaaggagacatcatggttctcatctggtccatctctcacggacagccatctgcggattcgtacttgcacggcctagctcaactgagaggagcaaaaagaaaaatgtcagcagcagcagaggctgggagtcactgtgggaaaccatcccctcccccaggcaaatggaacatcccagaaaggagctgtgtacagaaggccgggagcctagctggcaggagaggagaaagaaactccatcactggagaatgtgccagtgccaaggggccagaaatcctgatggaggagggatgaggtgggcagcaggagcctggaccaagtttggcttctgcttctggaaaaggcagcacactgctgtgggtaaaaaccatgaggtctggggacgtggtcactcctgagttaggaccataattcctccattttcagctctgtgatttctgtgtccttttctgggtctgtttcctctcctggaaacagaaacaatatgcctcacatagtgtgggggcactaaagagggtaatatggagcccacacctggtctcatctgggcagcagctgtggtgagtagcttgcagacacacatcctgctcatcaccctcactttgttctgtgaatttcaatcatgtacccttctaagaacacagagttttgtcctccctgccttgcggtggttttcatcatggttttctcttgtcacagatgactggggaaccactgtgccctgggttcctggggcagcccatgatgtcactcccagtaagggaagacaggaagcagtgataatattgcttcatcacaaatagtacagacactggcatagcagagataaataagtcacagtaatcttcgatacatctttcattaagctaaattataaactttttttatcttttgaccctttgtaaaacctatttttaatatgcatttttgaaaaggtgttgcattcatattttaaatgatcccatgttggcttcatgagctaatggcccttcagcccaggtaagcatcctctcctgccacactaagaagagtagcatctaggagagcagagggcagggctggaatatggcaacagtggcactcctgggtgaagtgcttcccaatgccaggcccaaagtgcgtaacagtatcctgttagactgtccccaggttaccaagtctgagaatccagttgttgggacacagagaacacgttccagggccagacaacactttgacccagagaaagcccctgaactattcagtcaagggcccaccagtcatgtctctaggacatcccacctccagaaagcagactgtctcagggctgtttctaagtcataccccatcaggaactgagtcccagtgtccccaacccaacagatcaacatcagcagcaagacattcccagaaaacagctgtactgccaggagccaaactcaaagtgaccaaaagcacaagaggcccttcccacaagagtcaccctcccttcctgcgttgcctagagtggtagagcccaggcacagaagctgtggtagatctagtttaaataatacggatctcgtatttcactctgaacattccaaatgaaagggttcaagtagggatcaatgtctctgttgttgttccagtaggagacagggaaccaccaaccaaggtcactgcgagtggacgctgaagggaggagcccacagggttgctcttcaaagcagacctaacaaattccttggggccaagccaggccagattttccataaccatgacaagtctgctatttttcaccctctgaaagcctggtgataccatggggtacagcgcagaaacaactatgattccccgaaaagggttccagacaagaatgaaatagctcatctccagtaaggtaaacaagatgacacagaaatcctgtgagcagtttggaaaggaaaaagttcaaggacccccggtctctggctggagagactaccttcccaaggctgtgggtgcttagaaggtcattttgttcagagactctacacacagagaaaccatgagatcacaactctgtggacaaagcggggcctaaacgtcctagagaaagtagaaaacattaaacaaggagggtagaggaactaaggggctgtactgaaatgtcactgatgcctccagcttccaagatcatgtgatcacaagctctgttcaaaggaaaagcattccctagggagaactgcctagtccccctctggtttgcaaactgtggcttccctccacacgcacgcacgcatacaggtagctgctataagaaaatgtattaaacagagactcctcctatccaatcaagactgcaggagggtggttttcctggagcagtgaggggcctggtgtcaggggttgggggagccagagaaatagtggcacacagctgatctgcttctggaaggagttagcaggacctgccctcccaagccatgataaccacatgacaaagtcacaaatccctgtagggtgtcttgggacttaatttgagcccaaataaaactcaagagatcaaagatcacttctggctattctacaaagggggtattaaagaaaaagaacctacaaagtggggatgagaggggccagcagcacaggtattagagaagtgaccttaaaatcaggttcaagaaagaaccaagcttccttccagaaggaagaaaaatatttactaaagtggcaaaccactattatgtattttttccccaagcttccttctgaattggatttttcaaaaaagttgtacctctgttttgcttatttgattaacaaaaacaacaacaaagctcccaatagcttcaatcagagtcggtcctactgtgttttccatttctatgataagtaaaatatgacttaacttttcacttcctactccatcactgagggaagacatcatcagggtagggactcacgcaggaacctggaggccggaactgaagcagaggccatggatgaacactgcttcctggcttgctctccatggtttgctcaggaccatttttcccagaggtaccactgacaatggactgggcccttcccccatcaatcattaatcaagaaaaacaacacacagacaagccttcaaaccaatctgatggaggtgattcctcaagttagggtccttctttccaggtgactcaacacaaaggagtacagaatcctttgctgaagttagaagggatatatcaaaacagtgtaaaaacgtcatggtgtaacactttggagattaaacaggtgaaaggaagactgtacagaggctcaagttagaccccctgtgcccaagtggcatttgccaatgaagtagtggcttgagcaaagccaggaatcctggttgtattctggagccttgagggttttcttgtatcagcaaggtaaaactcactacattattacaatcttgaatcgatacatgaaaattaaccaacattgaagctctgaggggcccataccaaacttcaggctcccataggcctcctaagatcccctcagagaagcttgtgtggaaatctacagagcccctcctccacacagttctcagacatcacttgggtcaagtgcctgtggctaaaatcccttctgttgtggagatgtaaacgtccccttcctccctgagtccccacgataaaggaaggtaagattccatcagagtacattctggggaaccgatgggtttattgcatctccttacagcacagtgtgggagaggtttcaagcaggagcatggctaactttaaaacagcctcagtggaagaactgatggtttctccaaggctatgtaaatggagggctcttctccagtccttaccccacccccatgtcttctagcctctctcagagatcccaaagccacatgcaaatagagcagaactgcatccagctgtatactcaggtgagggtctcctgagccttcccacccactctgcccaaaggagatcatcagtaggaaatagcccagctgtaaggacctttgatgcacaaggtggagggaccgagcaagctggttcaggtgggaaaaggtgcctgccaccgaggctgacaatgtgggtccaacttccccaaagccacatagtagaaggaaagaaccaactcctgcgccgtcagtcagggttttgtcagggtgtgcccctcttcctcacccacaaaatagatatcaaaaataaatatttatatataaatagtcagattaaaaaataataaggtggagaatgatagaggaagatgcccagtgtcaatctctggcctacagacacatacacagacacacacacacacacacatgcacacacacttgagaatgcaaggatagttctggaagtggttatggggcattaaaagttctaacttatgtgacagagtgctaacacctctagcgtgctctccatagtgggctgatggtgaagacagagacacaacgctgagcatccaggacacctttgactcaatacagtgactacactgcatcaggtagaaacttggaccgtggaaggaactatgaaccactgaggtctggggacaaagatgaacatgggcatccaggtcatgaagactcccaatcagggacctcacatccaactacaggcaaccaccatccatctatgtgcaacagccacatcgcaatgtccacacataaaagccaaactccctaagaaatagaattcctgggcacttccccagccctagccccagcctccagacatcaatcctaaacataaacaaacataaacataatagtaataatagcctggtgcctctcagtggtctcctatagcccctgccaaagcagattggaagtcactgaggcaatcagcatacattgtatttgatggtcctccagctgcagtagctcattggtttgagactaatataaataactccctcggataatgccggtaattaattctggtcaaagagcgggagatgaatgtgacacccactgagtacagagagcacaagaggcaggtttctggaaggtaggtagaaagagctactcaaggaaattacccccacggtgctttacaggcaagtgggggctctgaactcattacttcaatcctgaaagctgtcagtcactaccaatgggcagtttaatattgctctagagccttcagactcactatgaatcaaggcccacaattatccctgtgatgtagggctcatgagctaggggcattctctaacctgagcgatgcaagcttctcatacccaaagagtggctggctcatgaaagacgtaaaagtacacacacccagccgggacagacccagaagaagggtgggctggatggctctggatttcccagccccatgcagtcaaaatggtttaggttatctgggacagttaacttcagactgcctaggaaacctcgctctgttatacggtcccctaagtaagtagggtaacgtccaaaattgggctcccaaaaggctatatcaggcaagaggcatttgggtgtgtaaatgctaattcatgttactacataacaccaattcaatgaatcacaagaaaatattttcttttaccttgagagaaataatttgcaaggcttttgcaagctctctatcccattgagcttcacagtgaaatcaatgcagttggtattcttggtgtccttgggaagttaaaggaaaggctcagaaaggcctagtctggttgactgctgaagtgttcgtcattcttgccttatttaaattaagtcaaaaatcatttaatgtgccttgactagctttctttgactgtaataaatatctgataaccaccttatagacaggaaaggtacactccatctcctaggctcaggttccagcccacagacaaataatcccgttgctctgggcctgtgacaagccagcaggtcacacacggcaagagtcaaaccaatacatcccactgggatgtgaaagaggaagaatttgatgaaagggttagaaccccataattacctttctatagtaattcttcaagggcctgcaacacacaaggcttgggggacacttaagatccaaaatacagcagattgtgagggagtaactggccatatgcttgttaaggcctgatggcttatttttcttagggacttcagccctagaacacaatcagccctgagtcagcccagcccaatctgctgtctggcaacacttgggaggttcatggatttctcctaattagtcacaagagtttgtggccaacagtggtctcttggggcaacctaaaacaacagggaaagagtatatggaaccctataaggtggttttcgatctaggcagctggcagccttcttttctaagtggccctggctctgaatacaggcatcagatttcctggatgctaagtagctggctcttcagcacccaagagttgtgctcaagtggtctctagagccactgagactgtccccagcagagaagacttaagcaattggctcatcagcccaggccaggatgcccaaaggaatggtacccagtccaaggccttaaattcccacagctagacctcggctcctccaagaagctcctctgccaaacctgaacagtcctatacaaagcattgaggccataggcccaagggagctttccccaccaacatagctggagttcttccccaaagtcctcttctctgtacccaggcttcacatccccaagtgccctctagaaaaagaagggaacacttgtatgatgagaatctgaacaggcaaaaatttccagacaacgtggtcaagcccggttgtttggctgctgctgtggtggtgggggtgtgttgttttgttctagtcagagctagtatagatcctggatgagacacagactgaaatgaaatgatacaaaaatatgactgtgttttcccaatagaagctacttagataagagctgctactgttcactgagaactgattgtcaagaattattcgaggggttttacatgcattatcttgccggatgcagaatgaagttatctcacttgatgtatacaagccaacttccgtatctataattctccactggcagactcagccaactgaggattgggaatagttgaaacaaaattgtgcctgtgctgaatacattcagccttctttttcaggtccttattccccaaataatacaatatcacaactacttatgcaacgcttaccttgcttgctatataagagatgcatagaggatttgaagcaaaggagaactgtatgttacaatgtaacatatgaaacatacacaggccatctgtaacaaagcccagagaggctcattcttttccacagcacagagaactatcacagtgacagtgctttctatactgtaaatactttacatagattatgggatctcaccaccaattcaaataaagtgctgttatgtacccccacatacaaggaaggaatcaagttgaccaaggcttcatggtttgcccaaggtcacactgctaagtgacaaaaagaccaaagcctggacccagacttagactatcccctcatccccatactctgcttatgataagcttcaggtgcaaaaacagacacggaaaagccaattcacttgtacagactccatccactaggaggctatacggatacatcaggatggtccacacgattaaacgattaaatgtgtaatggtgcacaccttagggggaaaaggagttgaaagaccgccattctcatctacaaagtaagtgctgagccaacctagatacatgagatcctgtccaaagaaaatggaccttcactcaagaagctgacactgctgtaaattcaaggcctgctggggatgtatagcaagaccctgtctcaaaagtagtcagatcctgcctctaaagtagtcagtaaaattaaaaatgtgaggtagatccatgggcccaggctccctgctgtcctgtctcataggtaggtccaggggcatccagggcagaaactaggcaaaacccagggcaatgtccgcttgacagaaccaagacttttttcttgtgttattagttgagaccactacaaacccaaggaacaataatttgaagttcttcttcccaacctgaatgttgtatattaatcatgttgctcaggttcaggaaatgaccccagagtgagtaagattcaacaggacagatggctcatcagtcaagagcactggctgctcttccagaagacccgagttcaattcccggcacccatgtggcagcgcaaaactgtctgtacctctattccagggaatccaacaccttcacacagatacacaagcgggcaaaacaccaatgcacatgaaacaaaaataaattatttttttaaagatttatttatttattatatgtaagtacactgtagatgtcttcagacactccagaagagggtgtcagatcttgttaggatggttgtgagccaccatgtggttgctgggatttgaactcaggacctttggaatagcagtcggtgctcttaaccactaagccatctctccatccccagtaaattattttttaaaaagattctgtgccctcattctctgggtaaggatgctccagacacacagatggtacattacagagtcaaggtgaaagtgcaggtacccagatgggagcaatggcatcataccaggcatggcttcctccagctgtgtggatttagttccaagaagacatatcactgtacttgtctggagcctggtccacagaaaatatgccacactctgtcaaacttgagggcctaagacacaaaagttctatcaggggccatgatagcctcatgggtattcagtattcctgagcaccgccctgaattctgtatgactgattttagcacctgtcggaggtggcttctaaatttagacctgacattggaggcggtctgttgcacaaatgtatatttcctcaggaacagttgtcagaaacagtaaaactgacacaaaacaactgtctcttcacaccttggcaacagtgggctgtgaagccagaggaccacaaacaaacaagtcatcccactccgcaaagctcactctagctgtcagggcctgtccatacttgcggaggagggtgcatgtacatgcgtgagaggggatgtctatgtatacacacatgcacgtgaaggccagtgggaaagctcaggcattgtgcctgtccttgctccactgcccttgccctgctccactgatcctgcagttttcccaggaggggcggaagaagctactgctgtccactgagccccagagacatgtctgtctccattcccccaggccctactgttgagattgcaaacaccactgatcatatccagcttttcaaatttttaatatagactctggggattgaacttgggtcctcaagcttgcgcgcagacattacaccgatctattactccagccggggttcgtaactttttttttttttagtagaactcctaaggagtctccatttttaatcccacttgtcaatatagtcccctaggcccttcatcctctctagaggtttgtcatcaactaattgggagcctgagtcattgctcatttggggtgctaaaacgcactctatgtgataaagccaccttggtagaagatacagcttaattttaatcatctcctttgcgttccaattagttgcttatatccaatttcacacgtgtcccctctactccgaacactctgctgtgctagacagatggaggaatcttactaacatcaacttaacagaggggacaccacggggccataaagaggtgaggcacatggtacatacttacacataactttcatgaaagcacctcaactgcccttgcctagaacagacccagaaaaaagaagaaaaaacaaaattacccttatgccctgaaactttccattctcgatctcaacccaaaggtgactttttttatttttaaactgaagccaaaaaaaaaaaaaaaaattaactatttttgatttgtgcccaggctgaagaaacagactttgttcttcttaaatggaggtaaggctttttaaacacgtaggtagctcaaacagctgagcttcaaaagccccagcctcctagccagctagtgtgcacagggtggctgtgcctttgctttcattgcagaccctagcatgagcagccaggctgagagggagctgggattcctctggctgtgcacattgtccccaggtccactaaatacttgaaagaccagctgagggctctgacattgttagcagaatgcttgggcctggagcttttcctcccgcatggatgacaaggaatccttgcctttgattgaattccatcctccccaaacccctccaaaatggcaccacagggaggcctgatgagtcctctcactgttatttgtctcagactctctctctctgcccgtgcatgggtgtgaatcacccttgacccaaacagacccagttgcccatttgacacgatcctcaatgaactacctgcattgcagccatgagacctcaccctctcgacttaccatttatcccttcaaagatgtgttagggtccagggaaggtttccacagtcacctatccttcccctgagctgtttggaaaactcacagccagaccatgccacttaagtactgtgtgcctgtgaatatgtctctgactctttacaaaccaggctcactgtacatgtctcgcatacccacagagttaggatgaaaatgggtctggagaggtgtcttagtagctaagagtctgtattgctcttgcagagaccacagtccagttcccaggacccagactgggcagctcatgtccactgcaattccagctccagagggtccaatggcttcttctaaacttgacagtcagttacactccaatgtacaaatcccctcttcacctcctctccccacatacacacataaatataaaccatgataacaaacaagaggaatcagggatctgaaggagctagctttgtaatcagagttcaataaaaactcgtttggattattccgcacacaggacagagctagggggtgtagtttgctccttacagctaaaatccaaaaaatactgtggataacgaatgtgacttatatcaggcaaaacacaaggaactaaaagaaaacagggaataagatgcataaggcttgaagcaagggcatttccataacaatacacaattagaaaggcttcctgtaagtggaagaccttacacatagccttgactctcaggacactgaccacagtactttaggcagtccttttcctggatccagacctcctcagaggcaagagactgtctgtctttgtgcatcctggttttcccagcatccccccatgaatcacactgcctcataacagatgagtggtaagtaaactgaaaggaaaaaataataaattgagtctggagaagacaaggaacccagatagcttagagggggagaggaaccccaggaaacacatgtgagtttagaaagcaagcacctgtagagcatgctgtgggcatcaacgtgcatttacagcagcatggaaaaggggggtctggaaaggcaagccccagggcagagggcagaggcctggactttgggccagaggagctcgggcttctgaacatgggaggcagcgaagaagttcagaagcacccaattgtcagccctctggggaggtggactctggcagcagcagacagggaaacctagagaaggaagcacataagccaggctgggagagggaccactgccccacagcaaagtcatcaaaggccacctcagggactgtccctagactgatccatgaatgtcctttcaccccctgccgagtgcactcttctgcaagtcatcacctttgagttcttagtctaggctaggcagttgcattttcagacaatgctgacaatcggcctgccatttaaaggatgggacgggggggggggggtggggggttgggggaagtccccacctttaaaaccattaccccaagtgcctgttttcaacagttctatgaagcaatatgctattgcacgagtgagcaaaagaaagctgaaaggctggggaattcaactgtaattcggacactgtcaccaagcagaccttaggaccagagcaagagctaactcggcggtacaggggctggcctagtatgtgcaaggccctaggtttcatcgccagtagcacacatacacacagaaatagctcctggcggggctacagtagatcatcctggttccaaaacaggccttgtgccaaccagctgggtgaccttgggtgactgaaatcctctgagtcactttccccaatgttagagacagctcccacccaagaaagtagagatgagaaccaaaggagtcgacacggtaggatacctagtgtctgctgagggtatagtggttagtggcccatggctagagtgggggctgggccttcaactgaagctgacactgttcctaaggcccccaggagctccttgcatgtggctgtccccatggagtgtcaatgtgagcctcccagcccctttaactctcctggattcactgtactttccacctcgaagacacacgagcgagctgatatctaacatctcttttgctttgcagaccctgaaacaggcgtagggctatggatcattaaaacttccctttgcacggggctggagagatggctcagtggttaagagcgttaacattggctgctcttccagaggaccttccagagttgttagcacccacatgttgggtcacaactacccttaactccagttctagaggatccaaaagcctcttctggctttcataagcactgtatatatgtgtgtgcaggtaaaacattcatatacacagaataaaacttggaaaaagccctcctccctgcatttctctacctgtatgccacttctgctgccctgatacacaaagaagataggcagtgggcatagactgatacaaaaacaatatttgtaagtgaaattgcaaaaagaggccttggcaatgacaacttaggaatgtaacccttgggctcaccatagacctattcaagtggaatcccactgacagaacagtacgcctctcggaaatgtgctccttccccctccccccacagagcctagccctagtcttcagagggtcctgatctccctaggacctcgctatggacagtctttgtgccctaagagaagcacttctcaccgtgcacaaatgctggggaagcatttgaaaatagggtttccagttaccactggcatgcctggagtgtcctgatgctgactgcagctgtcccacagaaagccagtgacgtcatctgcaggcctaaccgtgctgagttccaaagctgtgcttgacataaggttccctgaaggtagaggtccctgtccctgggataaaaggaagctggcactgtccaggataactttttcctttgctggatagaactccattgtcacaacttagtctcacaacaggaaagtgtcagcaggtattccaattgtctgagacaatgcatttggttgcttttaagttttttatcatgtgccatgtcttgcccagagcccagggctggacagaggagactcactccctggtttcttactggactctgttatggtatgagaaaatgaatagtcttacacttctccactacagagagaatggaaagagaggaaaacaaagaaggcaaaggaagaggagggtggaagggcacacaggaagggactgtgtactcttcctcctctccctgaccagggtactgtactggggacagccctggcagaacttgtcctgcagaacacctgactgaggggacagactctgagtgcttgcagggcactgtaacagattgggccctgagccctagaccagagttcaagctcaatgcagaacagatttcccaagggttgggatcagattaattggaatttgcaagctgtgcccagttaagatccgtatctgtcaccatgttaaccacattcaggtccctcttaaaaatcacaactccaccatccatcacctccccggaatgggaaaagtggccaaagtctggccacccaaggccagctctctggctgacagcctgccctcctgtaaccagactcttccactggcttcaagataaatgtgagtgactcttgaactcctggggtgggggggtggggggtgggggaggggctgctactagcaatcatgaaaatatccccttcattggcctgaggagtgaattcagttacataaagaattatagggtttgacccagtatggtggtgcccacctttaatcccagcactcgggcagcagaggcagggaaataaatctcttgagtatgaggccaagcctggtttatggagtgaggtccaggactgttggagctgttacacagagaaactctgtctcaaaaaacaaaacgacaacaacaaaaattcctgggttcttcccaggggagaaagagttaggtggggtcattcagactctaaaagcaaggctgtaaaggggaagggagatgaataattacctcgatcaaactcttcctaaaaaatgtatagagtccagttatgcaaggaaaaaactgagaacccaaaattacattataacctaaggttacccagcctggaggggaaacacacagatgtggaccaggtcttcttgggaccaaactctgttttctttgcaatccctataatacatttaacttgagagagagagagagagagagagagagagagagagagagagagacagagagagacagagggagggagggagggagggagggagggagggagggagggaggaaggaaggaaggaaggaaggaaggaaggaaggaaggaaggaaggaaggaaggaaggaaggaagggagagagagagaagggagaaagagaaaaaggctttgacctatctctatatgggtctagcatgctttagaatttcaattctttttattttagggcattcatcaggtgactctgggagagtaaaatgcacatgatcaaccagtgaaatgtccatgaatatatgtatcgcactaagctgaccgcataaaagtcatgaatgaactcacaatgtttgggtggatttcagaatttgggccaaggtggcatgagccctgatagattttttttccctcaccaaaaacacttcacatttaaggatagaaacacaaaacttctggaagatttggtcattaagattgaaatcctatcttaatgtttatgataaagataagcagcaaacagatacactatttgctgaagggaataatttcaatgtgctaatatgtttttcacatcttgatgttctatttgttttccttcaaacttccatgaatttttaaaaattagtataataattcctcctcattttttaaataaaccacctgtttcctgggacacaacctctgcccccaaaggatctcatttccagcccagtcccctcccctaccagccagagctggggtctggttctatgggagagctagcacctgacttaaagcccacaacaccctcagtctgatttcttccagacatttagatgagagcctttctcttgggactaacttggagcaaattcacctttctctagtctcaggacccccgtgttctcagaaacttcggatcttccaaaatataaagctggaagaggaagactcagaagcacgggattatgtttgagggcccacagattaatggtagttacagaatgtgcagacaaaaaagtgtgtagtcagcagacccaattaagaaggatggaaatatgaagaaaggaaaaacaaaccaagggcggtagctaatgtacagtcagaagacacccttctccccactgtggactttagttatttttcagctgtggcaaagcagctcttttcccctatagcatacagtgggcctctgagaaagtcagcattggctgtgtgatgagagtttacagctgagaacatttaaagggcatcagcccacataggtaggtaacaatcgtgactttccaaagagcttcatacctgtcactcaaactgtgctcgcaaaagccctcagagtcaacgttctagaaactggtccccgtgctttctgctgtctgctgctacttcacagaacatatatccatcatcagtaatgcactcaagtcaaaagtcccccatccatccaaaacttcccagactatacatgcttcagaattgtcattccttctgatttgaggaatcaagtgaatcttggagatttgagctgtgccacggtggaacagtggcacttccatgaaggtacagcagactacgctgatccatggagataataaatgaccaagtaagtgcacaataaacactcaaagtgtttggggatctcagagtggagaacagggtggtatgaacccccaaaacaaacacctcatcactcaaaatacttcacacttgtgtctttcagcacagcacttctggggggatcttggaatcaaaagccatgttcaggctcttagaaggggaaaacatgaatagtgaccaataggagaaagaagcctgggccagatggcattcagagggaggacagccagctccagggaccacagtatacaaggtattcataacaggagggagagaacatgtgggcaaggaaccccacagagaaatggccaggggcactgaacaattgcaggtgtgtgtgtgtggggggggtgttgtctgtgtgtgtgtgtgcctctgtgtgtgtgtgcctgtgtgtgtctctctgtgtgtgtctctgtgtgtgtctctgtgtgtgtgtgcctgtgtgtgtgcctctgtgtgtgtgcctctgtgtgtgtgtgcctgtgtgtgtctctgtgtgtgtctctctctctctctgtgtctctctctgtgtgtgtatgtgtgcctctgtgtgtgtgcctctgtgcataggggtggggtgggcgtagggatggtaatctatccaagatttttgactaagagatatggcttgtaaaaccaaatgttgccttcctcttttacaaactgtagaaattcagaccacactgcaagtttgcaaaagacaagccttggcctcatgcacaatcatagagtctaataaatgggttgcaagcaaatttttaagaagatgggagaggatggaatggtgtgatgatgatatggaataagatggagggggatgggatgatgtcaggtaggctaggaaggcatggagtacttccacagcacagctccactagaagagaaattgtcatgctcaggtcctagactcatgctgtactcctcatctggctcttgctgtatatgccttataactcagtaatctttaagaagctacgtcaagctgcatatcatgtcatgtgaggattagctattgtttcatgagccgtttccatgagagcaatgtgtgtgtataagctgcagcacagtatatacttccactgtacatgttttcacgtgcatgcatgcatatataaatgtacacatttatacagaggtgcacaatgtgcagcatgctttcctacataagatacactctaaaaactctcagatttactatgccaagtgacatcctccccatcatttcagcacacatatcctatgagttgagtttttggtggatattccatagcctaagccctctgccaaagagccatcccagaccaaaaacaaaatggggagatatcagccaaccctgtttcccagcctatgcgcttgacaccagggcctgactgctcatttctttcctgacactcatccctgtgatgctcatgcatctgatctctgggcttctgctttcccactggtaagatgtagagacgaaccccgcaggcctgcactgctcatgtagaacaagggagagcatgagccctggctcccacagcactggctgggaatcacacgagtctgttcttagaatgctgctggacacttgagattctaagagcagacctgtttctcataaagattttagttttgttttcgttttgagtaaaagtcattccatacagcccagacagtcctgggctttgttatgtagcttcagattcacagttccctgcttctgccttctaagtactagagtcacaggcatataactccacgcctgacttaaaataagattatgaagtcttcctgtatctggtgttcaggtggatttggtgtcaagcatgcagcatgcctcctggttgtcatatgtcatagcttttcccaggagaccccagcctctgcctgctataggaattgagttggagaccacaccaccttgtcttaccctcttgccctggtcttaataaataaactcaataaatgatgaccagactccgtgtttgttgcccagcatcccgggaaacaggcagtggcaatagcagagggattacttttgggtaaatatttttctaaacctcattctttgccaccactcccagtactcagagtgagggggccaattccctccaacagctccatcatcctaattaaagggagcatgatatggcacagggcaaatgccccaactcaaattgagcctcagaacttcccattggtggtaaagagtagggtaaaaggagaaagcaggcacaagctgagatccctagacactggtattttccttcctcgagcagggttattggctacattaagcacagtggtcttgaaaatacttgatccctggatcaccaagatacatcattgtgtgcctcgcttgaggccacagtgggtatataatctggtctccctcaaacaggagtcacagctgtctctttgggtgctgaaggaaacctgtccctccgtgctttttttcaggtctcagtgaactcaaagatgatgctctccaaggcaccagcacgtcacaggaaggcagataggaatacgtcaacccagctgacagcctagaaaactggcttaggatatcacctaaggtcctggatgcatactgggactgtggggaagctcttcagactcccggttttccttacactccctgatactcttgagttgcatccagccatttacctcattgaccctgttgtaatcctgttgtgcagcagagctgggcagaagaactctccctcctgactgtgagctgtgcctactccagagggccagttcatggcactgggtaaggcttgagagtttcatttctaacaagctcccaggcaaagctgctgctgctgacctagggaaagaactagaaccttgagaatcagaagccggggcccatagactgccctgtctcatttgaccggggagaaagagtccaggctccagaagcactggcctcagtcttctatgtacatgtctatgtttgtggtgaatattctggctaggttccggaagttctgggtgggaaccctattactggtccaactgtactgggagtagcaaggctctggacgagagtgtctgactcccaagtccacatgctccgcacagcctgttactctgagcaggtcttgtccaggcaaccatgattgcatggcctccatgagccacaggagaataattatgtctgtcactcaggaaagccacccacacattcatctctaagtctctcttcttccacacaaagcaaaccaagccctccatccctttccttccttctatgtcacaacagaactgggacatgcttcctaagtgcctaacatgtgctatttacaccccatgctgctcagagccccaactgaacccaaaagagagacagagagcagttggcagtgcaagagagggcaccatgggccccagtgggggatgaggtgaacagccagaatgagagatgccaaaggaaaagagacacagactcctatgcaaccctcttccccctgaggtactggcccgatctgcaggttagatgctgcacttaccaatgtcatacaaaaagaggggcaaaaacaatgctgtatattcactatatgtgggattctgagggtcccaccgggacctcctgtaatgctcagcactgtggtactccactaggaagaatgggacttagagagttgatgtgccctgcaacatgtactgaagcagaatagaaactaaattccgacttaaagaacccacacttggtgccatatggttttgctgtaatcaggactgaggggaactaggaggaagtaaattctatgtccttccaagaaccaagcatttttaatgtattatttactgtggttggggagtggaatacatgcgccatagtactcaagggaagatcagaaaataccttgggaaagttggttctctcgttctacagtgtgagccttgggaatcaatctcaggtcatcagacacagtggcaaatgccttcatccactgagccatctcattgatcctaagagccaggttttggcataagatgacaaactccttggaagtgtgtgtcttaagctgtccttatgccagcagctccatgtgatagttaacaaccaagtttcattattcttaacatttcagacatttcaaatcatacttaaataatacatataaactatgcggtcccatggtgaatccttggtaggtgggtctattggtaaatgctcactgcgaaggaggtggggggtacacctgagttaccgacagcatggtcacctagcagcaagcctccctcaggactagagctacactaagtgagtgggttagagaggtcagcagcttgagatggtacaactgaacacctgtagcaaagatataccatggacttcagggaagtctccagaaaagtggggctgcccaccagaatgggatggtaaggaccttccactgagtaaaccatacaaagagaaaatcaagctgtaagcttcctccctgctggaccaccttaatggtgccaagaaggaggtactatatatagtgctaagggtaaaaaatgtatcagtggtcctaaccagctttgttggttgaacctcacatgcttcaaaattacctacttggtaagatatgcccagtcttacaacagtggtatgactatcattaacagagacaaccaacgatttcctgtttggacttaaggcttattcaataggagggcgcttaaacctgatactgtaaaaccttgtcaaactctgtggctggggatgtcctaagagagagcccatagtgggttttcctcaatggacatgttatcagagttctctgactccctatgttcatatctatagatcagtgctgctctcagtcttcactagtacaggttctgtctgtaatgagcagctgttaattcagagacctacaactggtcaatgtactaagaccaagtgactattgagttctgggccctaaacgagacatctatatcaacaccccaccttgagtcccagagaacattgaggaagagcaggaaggagaagatgtaagagctgggataggcagctctggaaaggtatcttctagatgtgacatggctgttagactcaggaactcactgcacctatggtaacctgcagaagattgggactgtcaaaatcccatcatgcacagggaagggatttggggggccccatccctccctcagagcctatgaacagtttctggggaaaagaacagtttagtgatgttgtcgataagttacccaaactatagtaaataacccccacccttgatcatgagaacaaccagaattgttagtaaatgcagtgggtcacatagaaagatattaaaggaggtaaagcttgttagggagactttcagtaaaagagaaaaaggaataaaagggggtgatgggagaggtaaaaatggacacattaatatatatgcatatatatatatgcacatacatatggaactgagaaagaataataatttttaaagattaaaaacaattcaaaagttgaaaaaataaaaaataaactttggacctcagagtaaatcctgtggatggggatgaaagatcaaaaggatccagagaagggttgaggaaatgaacagcctgaccacagacaagcaaggacagactagaggataccctgggctccagcagtaaagacaggccaccctccagccatctccataaaaaacggaagcagaaacatataggtgctacaccttgcccctctctccgagagttctggccaacccagagccctagttcactggggctcagggtcacctcattgacctctgtggatatctagatggcactcccccatcacttcttgtgtgccggcctgatgctaatactggtgcacactgcctctccccccactgaaatgtgaactagacacagaggccagggctgagcctcatctctagaacacctgacaggggccgggcactggttcccaactgttgactacgtgagccatctcagcctccaggccttctccctccaaaccaagtttcaagctttcagagtctctaagggtctccctatttttcttcacccggattgagagccacttaatcaaagagagggaagggcaagagggaggagcttgcttcagggataactcactggtgtttagccaaggcaggaagaggttgaagaaaaaaaacagagaagagggcaggctagcccaaggacctcatagcttctagtagccctggggaacttgcagagtcacagaagccaggtagggctgaagagaggccagtgccagggacagaaggcctcagaagccaggccaaggagccacaatgttatcccacagccaaggtgtcagaaaacttttccataatgacgtcttctgattacccaactctgccactgtggtgcaaaagcagccatgaagatataaaattgaatatgtgtggccacgttccaataaatctttatttatagacacagaaattgtaatttctcatgttcatgtgtcaaaaaatagtatttcttcttttggctttccccaaccatttcaagatctataaaccattcttagctcatgggccacagagagagaggcagtcagtctacctctgccagcccccaccctgacccacccccatccccacctatcactccctggaggattttacaatgatttacctaagtaaagggaaagattccagcaaaggaaataaaacctagagatatccccagtgcagtggtttttatctcctactacagaagtgagttgagagcaggtatcccagaaccatttttgccaaaatcataagccaccatctcccatgagtggtaaatttaaaatgaacacgcatgccaagctcgcagttggataacagcccttcggtgctggcaaagtgaatcagcacaaatcattttccttcgccccacacacctggatcaacttttcacaagaaaaacttcagcacaaacagtgtgacctgtacagtgccatctatattgcttagctgactttttctctactagctcttctccgaatctgcagattagtaagtgcagggcaggtttagcctatcctgagctccctttcagagcccaggaaggcagatgtctctgaacagtacggactgggcctggtgagatgccccttgctccctcagacgaggcatctatccttggcaaaagaagagaaagtcccaaatcccaaacaaccaagaacacaggacaaagcttagacctgaccctgcagctggacaattactgtggctttcctgagacttaaggtacaacccatgtcaccatacaagtcccatgtttgattcagtattctttggctatcatcatagttcttaatgaatcttgacccagggtcccctgtttggactctgctgtgacccccacaaactccactcaaagaaaagcaatttggattacacatggattctgctgacttctaagtattctacatttggggactggaggaataaccacagactgagtctgggaactcactagaacaacggtgagtcagaccttagccaaaactctgttgatcacctgacgtccacaggtccctactttaactgaagggctacggtgcttcttagagtctcctgaaacagcttcaattcagaaccagtatccactagactccaaaaagtctgactttcattacccgccaccccagtatacagttaccacagtaaaaggccatagttccctctggtgaagaatgggagaaagactaaccgtaaaactctatggtattataacaagatcctttgttacagagagcaacaagaggttcttggtctgggctcatcagcagtactattggagttaacccaagcaacgagataccagtacctggttgcaagccatgacaccattagcaattacattcaagggcctacttgattccatccttctaaaaggcaatgccaggtcagatagcagaatctatttgacacctgtagtggctattcctggttgtcaacttgactatatttggaatgaactacaatccagaattggaaggcccaccagtgacccttatctggaggcttggagatagaagtttctgatctggatcttggtatggagatcttgaggcatagtggctatggattccagaagattaaatctctgagttcaaggtcatccgggattaaaggtgatagaacacacctttaatttgggctacacctttcatctgggattaaaggtgtggtggaacacacctttaatctgggctacagcttctgctggagacaatataaggacattggaagaagggaggctggctcttgctccttcgcctgcttgccgtgtgagactgagtaactgctagatccttggacttccattcacagctactactgaaccattgttgggaattgggctgcagactgtaagtcatcaataaattcctttactatatagaaactatccataagttctgtgactctagagaaccctgactaatacaacacccaaatctatacttctaacccaggcaagacaaagatggcatgtcctgggccaatctagccttcatggtccattgtctccttatgcttgccttcttcttggagtttgcccttccgcacataatctccatatagtccaaagatgctccagagaactgctacttagggcatggcctctgaaagatgcatgtccagacctaccttcctctctaagtgtagacacctctatccctaacagatcaagagaaacttcaaacagtatctgagttccaggatgagagagaaagcaaaacgaggagccaatgctgtggcaagctgcccttcacctctgatctctggacaagaaagcctgctgcagaataaaacctcttttaaaaattccacaaaccaggagatatgccctcaggacatagctctgaagttccatatctcctattttccaagtgctgagaaaactggaaatttctccagcaagatcaaaggaaatgtatctgtaccttggacccaccagggctaaagcagagtctgcacccaaaatcaccaatgatgtcattgctaccatcaagcccaggacactggccctggagctagtcagcctgggtttgagtcttgatttgactaagttaccttgaatatgtttattgacttctgcatgatctgtttcttcccctataactgacagacaatacctgtcttataggattattatgatgcattaaaaagtgcgtgtatataaaaaaagctgagaaattgtctaatatacagcaccatctataagcaccaagtagggtcttaaaataaaagtatctaaaccaggaagtaatcccaaccttactatgcccccaaatcactgccctcggaaggtactgggacaagcaagcagccctgttcttcctcagtcctctcaagtaccccccctaactaggatgttcctgaagacaatccactctgccctgcttctcctcactcactcctaccactaaacccaagtgccaatgttcagggcgaagttggctctggcaagataaagttgtcccagaaccttctaaccatcctgcttcagtctcccaacaccacgggaccccagtttcatgttggcgacctacaccacttatagtctcagaaccatcatggccaaaggcaccaccaagctcatgagcaaggcctgtcttgagaccacccaaaacttggacttcacattcttccagctcctccctggctgtgacctttgcttctattccatggacttgcaggctaagcttcccctgggcagctccattctgacctcacctcagcagatcccacagtaagcagctgaggttcaccaaaaatgaggtcaatgactcgctatttcagttgagcagaaagatggatgggggcatgcatggccagtggaatccaggtcctggcaggcacacactggacagtcccatgtctcacggaatactatttcagaggcagatagtagtgaagtccaggttgtaacccaggaatgttttatcccaagaaaagataatttttaaacattataataatattttggccatgagatcctaggctgctgtcctcttctaagatctctaatataagtacagtggtgaccagctccagagtccagaagcagaaaattggtttgtgaacttcttgacttgggaagacaagcaaagcaaagatcccaggtccccctttgcataatgtccttggactgtggcacagcacatggagatacatgtatggttgattgctcatggctatggagctactccacgggcaaccatccttgcctgttattctccttctaactccagcctctgggctggctcaacagagagacaatggtctccacccagggagacatgatttcctgataggaacgtgaccctatgtagatcaaataggcgtttcttttctaacacacaggttttaatgccggaggctggatctatggagtaggctgagaagtctccatgttctgatttaatgtcatgctttatcatgcttcaccaagaacctcatttcgtaaatatctgttggtttcttcaattgcttagctcacttataaaaacccaaggagtatgaactaaccagtacccccagagcttgtgtctctagctgcatatgtagcagaagatggcctagtcggtcatcattgggaaaagaggccccttggtcttgcaaactttatatgcctcagtacaggggaacaccaaggccaagaagtgggagtgggtgggtagggaagtgtggggggagggtatgggggactttggggatagcatttgaaatgtaaatgaagataatacctcataaaaaatatttaaagaaaagacttgtgtgtaaccttggaagcaaacgacctagggtaagaaaaatgatgtcagtcaatagcaacgctcagtgtgtgtcggtagctggatcaaaggcagagtgggtctcaccacccacctctctaatcccagtgacctgtgccagccatcgaacctgcgaataagagcttgcgtctgtgagccctgatgatcctctctcaccacaaaagctgcacaaactcaagccagacaaaagtcccagcatggaggaagacaggtgggagtgatgtggtgccttgcagagaagacagtgtcatctgattgctgatgggacagggaatgttagctttcttcactggagtgagacctggaatttcagtcacactccaggcaggccccacaccccagagtagtcagccatgacaaagtaaactcaactgattggtttgtgtgtgtgtgtgtgtgtgtgtgtgtgtgtgtgtgtgtgtgtgtgtgtgtttggtttgtgtgttttcgtttctgttttcattctcttttaaaggtgggaagacatgacattggatgggaggtggaggaggaattgggggcgggagttggggaggtgtgggtataatcataactcactgggtagaattgtcatggagttaatgatataattatttaactttttaagatgtgcattaacctgacttgcctgtgttcttcacggtacccagcatgttctgtttccatcccctcgtccatcgctgtttgtaaaactatgtccacacacatttccaggctgagcgcagctatcctctaaggagaattacaggctcctggatttggctcacccaggactgctttcctgtagtgtttgaggataggtagattgggtggttggttttggcattcaggaacctgggcctatactcctctttctgcagccttctgcgcaggtgtattacatgccccaccacactgcaagtcagtggccaggtctcatgcttgcttgctttcctcagtgccaagtgagagaatgattagtgcctggcaatgatgttcctgcaaagacatactccaaagcccccctaaaactcacttctcatagcacatatctcagaatggccttcaggaacctcaaggttttcaaggtcagaagtcaatctgaaggtggacatgtgtggcactgtgaaagccaagcagcatgcttctcaacacacattttctagcttctccatttaacaggggcccagtgctcacccagctgaagtcagcacacagtgctctccatctggatctaatggaaaatcattacattgcacagtcatcacagtgggactgtgtggccttcaatccccacacaggttcacatggtcactctactgagctctcagcacacccacggatccaaggatcacagactagacacagcaaagctgcaggctattgctgcatgttggacagcctcctctgatgctctacttgaaagatatcctggatccagcatggaccacactctgccatcccatttacaggaaggtcaagaagtccaacttctgataagtaacaatttctgtcccacctcatcaacaaaatagagatatgatgatgaattaaatgatttgagtccttactagtagctgttgactattattgtttattaagaagctaataatccatctcattttttaagttaagcaaaaaagtcaatataataaattagattaattaaacataatattaatgcagtggaatcacaggggtggaggaaagtgagctccagtatctgcaatgttctccccatacccaacaacgcgcatgaaacagcagattaaaactttcatgtacctgtcacgggaatttaactggccaaagtgcaagcacgtgcctctatttggatggctggattgttgaagaaaggagacagtattccttatattagcctacacttttgactcctaactctgtttttattccatctgcttttattattctgtcttccccctgcttaataaaatgacgacatggcacgttctaaacaaccttgcatgatgtttccaaacagagtaccatttgagcttgtgttttctggactgctgccctctgccacgtgaggttcaagcagcctcttttgcttagagactcaatgccaaggttgcgccataacactccgcagcgagcgagaagcctctgaggtctcccagaacaggcctgtgtaaacaggaggtgtgactcttagatagacatgaaacatatgtactcttcgctgcaaattttaagcgaggaaacaaaagtcattacacaagctaccacgtagacaagtagctaaccacgctactatgtctgaatggtccaaacacactctgttctgcagcatgcacttctatggctttgtgtgcttagaaccagcctggggcggagagagggagaagtttgtttcataagcttacagatcaaagtagtgagaacagcgccagcatgccagggtctgctggtttgggaatctcagcaagtggactctctgtgcctgggctctaggctcctgggcgatcagcagtgagtacctgtttagtacaattgatggaaggcaatcatcggaccagcctcactaataagtcctggttttacagagacttcctaacatgtgtccttcaacaagcactttctaggttcccactacatacaatattaatcaccctgtgttgcccttatgtgcgtacagatgcgctactttataaagaaggaagatctacctgtgcaaaatgtttagagtttatctggagacacaacaaatagtccgattggaaagaaaagtaatgctgtgagcactcttaagttagtactcatcaaactctgatcagaattgcattttaggaatatgctttaaaattttttaaaaaataaagagaagtctcatcatcctgagtctggaatctggacccctaaatttttaataaggagtctggaggatttgaaattaacataaaatactacagtatttgagtccttacaagtagctgttaagtgttattcatttaaggtgaaacaggcattcatatcgatccatcaaggcaaatcataagtagggtccattggggttaatagagtatagaaaacagtggagaagaaagtctcagtaggggaccagtcatcctgtgatttggatgacatatcatcttctgccccagaatcttccaatagaacaatgtggctctagtgcttccagatgctgctttcccctaattacgcctctctctcttcccgtctgatgggaagttaaacaccctcacatgcaagcatcaccatcacttaaggacttatccttgtaaatattttctccagcctccatggagcttctgtatcctgaaatggatccatcggtttccatacagggcactagtgaaactcaaatgttcacctttagagaagcaagcgtggccacacgcctcatctgccccatagtgctggtgccagccatggaaacagaactagtcagagagcccaacagcaccacctctatcagagccaatgggcagggaccaggcgtgggcaaataaacacgttaaagcaagccataaaaaataaaggatacatccaggactcagagtgacttcaatgaccccagccaaggtcaattttaatcagagccttagtcagcctccttttctgggggtgaggaagggggggtggatcatagtctcctggctcaggtggctcacagtatgggagtgttggataaggcctcaagtgagggcagatgccatcagggaaagagaagacaaaagacatgcagaggtcatacaacagcagcaagctgctgcacacaggtctacagtccatttccccctacttgtgatggtttgaataggaatggccccatcaactcatgtatttgaatgcttgagccatggggaggggcactattagtaggtgtggccttgttggaggaagtgtgtcactgtggggatagaactttgagtactagatctccttttgggatttggagagtgggatttcagagcctcctcttggctacctgggaagacaatcttctggctgccttcagagcaagatattgaactctcagtcccctcctgaagtaccatgtctgcctggatgctttctgccatgatgataatggacggaacctcttaaactatatgccagccacaattaaatgttgtcctttataagagttgccttggtcatggtgtctcttcacagcaatgaaatccaaagacacgactcaagcttaacctcttcctccaggaagacttcatggatcctgctgattggtggtaacctattgtttcctctgaacagttagagtatgtatctgtacttaggcggggccactgggccaacagcattagcatcactgggaagtcactgggaatgcaatttctcagcccccagtacacacaaagtatgcattcgaacactgggtcccagaaatctatgttttaacaatattctcttaccattccaaagcaggctgggggctttcaggaaggctaaatgaggtcctaggtctggattagcaactggatacaggtgcttctcagcatgtctccatgttgccagctcccagggagtaagtacatagcctagcctggctctcaggtacatatccatacctcagcttgtctggggcgagtggtcactgtgagctcatactccaccaacacaccggatgtagtgaaatacaatacttgggcccacacatagtaagagtagggggagcagttcccagaggtcttgttgttcatatggcttttgccagggtttcttcttccttgagcagacagtccaccagcatcaggagttcactgcctccacagtcactcagcaaatattgactgacgtgggtgccaggcacacagatgttcgtgaacatgaacaaaccagaaagacaagatccttactctgaaggtgatgacattcccattagcaaaagacccaatagacatgattaaattcatacgcatcaactgtacaaagatactagacaggagtaaatcacagaaagacatgtatgaaaaggttttatggaactcgtttttggacactagtaaaaacttttgtaaagatataaaacaaacccatactgaaggacattctatcaaaaaaaaaaaaaaaaaacctaaccaatactcttgacaagccacaatatgaactataagaagtaactagatgcagcaaaaaaaaaccaaaaaaacaaaaaacacaatgccatacatgtattaaaatgtgatggtgaaatccattattttctataccaactgaaaataaaattaaattataccaatttatgccaattaaattataccaactgaataaaagttaagagacacacccaggggcattctatgaaacaagctaagcaatattcttggcaaatgtcaaagtcatgaaaaaagaaaaaaaaaatgggtgggaggaggctcgggagacatggcaggtggatgttgcatggggtcctggaatggatcctgggaaaggcatttgtgaggaagctacagacaacagaactctggctttggtgaacaatttaacaccaatgtgaaatccttggttccagcactgtcaggctccacagttgcataagatatgaactttaaggaaagctggccaaagggtataccagatgtctgtactaaaattggtaactttgggggataaaattctagatgatgaatccactgaaggaagcagtaatcaaggagaaagagctgttacaaattgtgtctttaagcagggggatgcctcatctagcatatgagcaagaccttgagccaggagaggtgtgtaaaagttaagtctggttcatcctcccagacccctgtgcccagaaataagactcagactcaaaatgtatttacaaatacctagatcatatagctaggctcttctctacctagaatcataacttaagataacccatttattttaatctacattctgccatgtggctggttacctgtgctcaggtaccaggcatatgtcttctcacatctttccaggcaagtcttcctgtgcctggctctatgccagaattctttctgctcctggatgttccatcttctattttctgcctaagtcataggccattggctttttaattgataggcacattcatagaatatgcaagatgttctctctacagaggtgttaaccaaagacttagaaaatgaggccaagccagtttcgctggattctgaactaatgctgggttctcatcagtgctctctttgtatggaaccccacagtgctaagctgtgtcacatgtgtatggagcctctagaaaagacagagataatatatgaagaagacaggagtctagcaaggtcaggagcaaagcatttcctccttctttgtttggaaccaacctaggtctcttctttccagaaatccctcacgttccttcttttatctcttttagatcctatggcccagtattctcagcatctgagcttctctcctgggcacaatccacacctttctccagaacctcatgagtcaggctgcaactccatcaagtgacaaaggataaacattctacccaaagttttcaatttctagacctttagtaaagataggacaatgtaatctgaaaacaaaacagcccactactgagagctgacagcctcaaaccttgtctaaaggccttaaccaatctccctctgctgggtagcagctccccatctataaagcaacaggctacaattcgttcaccccaagacccattcccattctggcatcatatgatgaggagtatgtcaaatgaaattgcgcatggtaattgtagctgaaaggtaacagtggccatgacaagctccaaggactcccaccccaagtgagtcattgggatcacagatgacaatcattactattaatataataataccttgaattgaatttccatttatactgcacttttatacacattatctcatgtaatcttcataagcatcctgtgagagcagcgggaactatgtcatttctcttgtacaaaaagaaagctaagttggacagacatttgattaccagtgccactatttagccccagaacatgggtcatgacatgcctggtgccatcttgctatcataatagcccataacactcatgataccatccatcgctctgtcttgacaggatttggccaggctaattcacacagggaaaacaagaagtgtgctccttcatcagaaaggtaggcatccaaagagtgcctaagctgtctcacactgtccatccagtggacccctgggagcaccatcccctcagagaagagatgaaaacaccctaaatttgcttccctgtggctcaaaatagaaccgatgagacaccacagctgaactcttgcagcatgagatgtctcaaaaaataacaaaataaagagaaacaagagtgtgaaggaaaagccccgatttcagtgctagtaccccacataaatgacaagaaaagaaggatgaccaagtatggatgaggggaccagctccccacaaagatgccaggtttcaagctgttctgtcacaccgtgataggacaagttggccaagccttcccaccagtagtaactctgtcaccttccaccatttggctgctctttgtaaaggacacgagactagttccactcttgtctccctcaaggataggaaatatgctccagccagcctacagtttcccatccgtaggcagcccagttctccctcactcaccatcaacagagcctgtctgtccaggcagacctaaagtggatggccactgactgtcataccagaaaaggccagtcagtgagaatgcttggccactaagctggtgtgggtagttaagcatcgagcttcccataggataagtgtctcccagacatctgtctccagggttccaaatagagttgaaagcacttatgttacctctgtgcagaactgtgagggcatagtgcaaccatactggaagagacactaaaaaatttctaagtgccacatagacactaaaacaccagggcagactgtgtgcctggggtcaagactgatggccagacacaacagtggactccactcctctggcaggtggatcatggtcctggcctgggggctatggagctatgactgtacacacacacatacacacacacacacacagagagagagagagagagagagagagagagaccacctctctcttttccttcctacagacaaggaccctaagtgtactagagacctagacagggcagatctccggacagcaggagcctgcatcctccactagatgcttgaagaatgccccgccaggagcatctactctagtaagaataaatggtgttaagaaggtggcatccactctcttatcatgttttgttcctgaagttaaggatcattcactaaagccattgtgtcacctggcctaacccattaactcaacaggagtggttgccagaaaacaaagtgtaattatgaatccaatcaaacaagaaaaggattttcatagaaaacagtcaggcttcctcacacttcctcaagccggtaaaggcataaaaaatgagactctgtgaaagacaaacccaggtacatggatccagaggccaacagttccctactctgtctgcttttagcctctctgatgattagtctacactatacagaagcatacttcagacctacagtttaccaggtctcattttctcaaacaaccagactttcactcctagctactgacttcttgtcagacaagccagcgttcatgatcacactgtcgaatacccctctaacattagcaagccattcttcaaggagtcagaaagagaacattaacggggggggaggggggggataacaaagacttggcagctcacactagaaaacagaaacagattttaaaatgttttgttgttgttatttggggaatataagggtagaacccaaggcttcatgcatgctcaacaagcattcgaccactgaggtataccctcagcccctatattgcttgggacattggaaaaggacatacagaaccaatgcaaaatgaaatgacacacagcaggcatctcacttatcagattgacaaacattataatgatggacggcctcccaagttttatgtagtgtagggagatgataatcatttgtaccagctgccaatagggacacctctctgaaggtcaatttagtcatgtctatcagcatataaccagaaaatcactttcagtttagtctactcatctcctagaaattgacccaacacgtaacctggtgcatgtgcgaaaggactcatgtgcaagattaatcattgtttgaactgcaacagatggaaaacagccacaggaggacatcaaacagatgaaaagtctacaagagctggttctgcaacacccaggggtggggaaggagtcagcaggcgctcagcattcacaggccctccagtcaggatgctgcaaggcagccttaccctgaagacactccaggaacatgattcagtatctgacaaggtgcgaatgtgtctccatgaacttcctcactgctgtgcttattttaagcacatggaacattagccgtaatgcagacaacacggcaacagctgtgtttccctcttcctcactgtcctgacgtcacagtcagtaaatacaagctccaaaaatgaacaagccatgtcatccccagcagcatgcttcgaaagaccacacacaccttcccgcagatgaaggattctgagccgtccctcagaacatccctcagcacagactggctagttagcaatctagaagcagaggcaggcagctgagctcacaaacagaagttgatccccaattcagcagcaacctttcaagggagaaattttgcagtatctgttagaattagaagaaacacccacctttcaacttagaagtgcctctccaaaagaaggtaccaggtgggaaggcacgtaccagcaggctgttcaggtcccagcattgcctttgtgggaaacggaggccaccctgcaaccaaccactgagagtccactgaaaggggagtgagggctggtgctcttgccccgtgaagattctgtggttgttgggaggaatagagagcccagtacaattaaataagaaacacgattgccctcctccaatccctcctcctctaagccttcattcctactgttttttctcatctgtccttgtctctgctttcttgattctgctccaggggaccagtcttgaccagatatcatcctgcctcctgaccttggcactgaccccaagactcctttcccagagatctgtgtggctttccctctgcctgtccttttgtctccataagaacctacctcggggattcccacccttaaatgcccaactcaaattaaaagagggagtaagatggctcagcatttggccttcaagtctgaggaagatcctagaacccaggtagtagaaggaaagaaattcatattgttctctgacctctacacactcacagcacacactttgtgacctcccccttaaacacacacatacacacacagtagttaaatacatacatacatacatacatacatacgtacatacatacatacatgtaaagaaaataagggtgtcttctcctccttggtttttctctaaagcactcactagcatgttagaccctctgctgaatgctgcttttgccctccggactgtcagcactgtaagggaagggacctgtgcctatcttactctctacagaatccccagcacctagcacagagcgggtggcattcaacgactctcgctggctgaatggcaagccggcagaactatctcaagcctgaggaaatgaatggaagactctaacagagggtccccttagggaaggagggatatggcctccaggagccaccaaagatgaaataaggctacaacgtattaatattatggcttaccaacttccctgactgtacaggaggcatgagaaagcaaagtataaacaggagtaagaagaggcagaggaggaacatgggctgacgaatgaagagctcagacctcagcacctcaagcccagtgttttcagagaaaagtaggcctagcttctcagcatgagacgcagcccactttaacagcagagtctggctgctgtgttcccaaaagaaatctcagagaatatgtcagttctaaaagaaatgcgcctagactatcctcctaccatcttgattagtcctggaaatggagcccaaagaacgggtaggacaagactctgctagaacctgtcaggtctgcaaagggctgggagagagagtagacagaagggccacagctgtgcctctttaccaactgaccttgggcaaggtcactgtaaccactgtagaacacaggtccttcctctgtaaaactaaaactgtctcttctaggccttatgtcatgcacctgtaattccaatatccaggggttggagacagacaaagcaacaaaatccatgctggcctggtcaacatagtaagttccaggccaggcaaggctaaatagtgagacactatctcaaaaactaaataaacaattaagtgaattaaacagactctggagatggcttagtcggtaaaatgcttgcctacacaatcgtgaggacctgagctcaaatgttccgcagctcaggaaaaagcaaaacgcattagcacataactgtaccttcagctgtggggtgaaggaggataagcaggtcctgggacccattgcccacctgggctagctaaaattccagctttactaagagaccctggcacaaaaataaggtggaaagccactgatgaagacatctaacatcaacctgtgatctccacagtgcatgtgtgggcaaatgtgggcacgcgcgcacactacatgatctgtattgccaggtgggtggatatgagtgagacagcactttgtcccaccataccaatgcaagtcaggaagcatagcctggatgccacccaattagataatgaccagatcctactctacacaaagcctcagtctcttaggaagccatgcatctggcattcgacctttggctacctggctgaactccatttgcttctaataatttatagatttggagtctaggctttcctccagccacatgaccagatcagcagccagtgaagacacccttatatcttcctttccaatgtgtatgcctctcctgctcaactcttatcttattgcactggttcagacctacagttcattgttgaacgagaggtgatactgggcactgttttattcttaattagagtggaatgtgctacagtttggatcctggtgtcccctgaaagtccttgtgttaaaggctcagttcccagtttgtgtgatattgggtggtgaacagaaggaagatagatcactgggggaagagggcatgtccttaaggaggtattctcttcctccatgacagctgttctcaaccttcctgatgctgcaaccctttaataccattcctcgtgttttcaacagttagggagatcagcacatgggtagactcccttcatctgggttggtagagctgtagaaaataatgggataccatgagccaaatgttggctttcagtgtcctgctgagcaagccctgtaacccagcgcaaactgccacccctcccttagtcaccagaggcctccatatgcacccttcctctcccactacacaaatctctgttttgccttgtttctttccatcctaaactttcatcatcccctaaaactccataggccaccaagcatgtggttggaacaccaagtctagatgtagatcactgtcaacccatcctcatagcctggacttgtaccatggaaagcaattgatggcatcattttctctggagcagaaggggttactctgactcctggttacttctagaggggtgggcactgcctcctggatgctgccacaaagagatctttacagttgacaaagatggcctaaactatcctcagctgtttaatggtggcagtgaggccaaacaaaaagaataggagggagaggaagaggaagaaggaaagagatggggtggagaagaggaaggggagggggaggggaagaaggcagacaaggcctgatttagcatccttaagaacctgacactccttcagtcctcaaaactgcccttgtagacacactagcttcttacaaaacacagagttaaacagccttgttcaaggtcctggagtcagtaggtgacagaacccaggtgatatcaaggacctcagaccccaatcattacacccactccactctagctcttggcctctcaggctacaggacatcaaactgtttgtcaatctgcttactacagcagcagctacataatgggggcttaatggctctccccagactgatgtggtcaaaggtgcctcccactgagcaaaggcaattttcatctgcaaagcaaagcccagacttcatccctgccctcacacacagtgaagcctgacagggaaggctttcacaaccagccctctccaccttccaaaacaccattagaaatgggagcccaggagcccagtgcagcctcacacctttaagagactgggataccttggaagatcactattgaaggttctatcccaagtcccacactggaccaataactcacatccagcaacagcagccacccaataccatctcaatgcattccagagccctctgggtaaaaaggaagaccatctaactgtgtcatttaaaggcaaagattcagactgacgagacagcacagctagtaaaaaggcacttgccaccaagcctgaagacctgagcttggtttctgagatcctaacggtgtaaggagagaaccgattctctgcaagctgtcctctgacttccgcatacacactctggtacgttaccttaggtggggacacctggaatggactttttttctcctttaaaaatctgggcaccataatcagccaccaaacgcagacactattgcatatgccagcaagattttgctgaagggaccctggtatagctgtctcgtatgaggctatgccagtgcctggcaaacacagaagtggatgctcacatcacagtcatctataagatggaacacagggcccccaatggaggagctagagaaaatacccaaggagctgaaggggtctgcaaccctataggtggaacaatatgaactaaccagtacccccagaactcgtgtctctagctgcatatgtatcagaagatggcctagtcagccctcattgagaagagaggccccttggtctatcaaactttatatgcctcagtacaggggaatgccagggccaagaagtgggagtgggtaggtagtggagcagggtgggggagggtatagggaactttcaggatagcatttgaaatgtaaataaagaaaatatctaataaaatttttaaaatatctgggcaccaaaatatccatgcactacttattcccatcagccccaggataaagtaatttcttctctggttccaaaagaggagtcacggggacttgagaggccacagcctaatctcaatgatctgattattggaggtcatcaccatggtgcctcctcgtcccacgaagtttatttgtctgtgactcaaccagaaaccatgtggacctcaaagccatggtcttcaaggatatggactagaccagagaggaagcaaattacttgaaccagcaccaaagcaggtgccatagacgatgctaatgattcgatccaagcaatggtgagggctaagcaacacaggcaataagaatgcagcctctgtctctttgtctgcaagatccaggccacctcaaatactaacctagtttgacatcaaaatgaccccacaccacagtgttctgagaacaatgtacccttgatacatttcctaccctcttgagggacgggaagaattttctaactttaccccaacttgtgaggcacatgtaaccaccaatgcctgatatcatatctgctcctcccaccccagttcaacagccaagttgaggaagtcatcagcttttcaggtcctagtagctctattgtctgctactgacacctatgttcagtgacagggctcactattatagcataagttggagcaccaaggaggccacataacatgtgacaccattcatatgaggttcccacaaagcaaatggtagactagaagacgattggcaactgtatttggaggtaagagggaatgtgaagtgattgttgttggggaagggggacgattaacatggtccacaattggataatggtggctacacagtctacatgagctttatagcatatagttaatgtctctatagagtgactgctttttataattggcaagatgtgaggatagacaaccagaagatactttcctgctccacactttctcactgtcatccctgcactggatcccatttcctccactgtggggccagcgatcccccccccccatcaacctgcctttgcccagaatatctccaaagaatggccattcatcctagcagggagatgattatgctttgggcaaccagaatttaccagatctaaggggagaaaaccaggaatgatgccatctgcctgctcagagaaactcgagccaggagggagagagagagagagagacagacagacaagagagagagagagagagagagagagagagagagagagagagagagagactacaaggccagtgctcaacatcatccactctgctcctccttgacgaaggggaagagcagttgcttcagggctgcaggcatggccaactacagaggaaagtaaatcaagcataaaaactgctagaggttccattagcaagatggagcaaaaaataggattcccacatcccctgttgccctccgggaccctcatattgctaaaaataaagcaacaagtaatggtatttgcaatggcagagttctcaggagctcctgaaaagctagacttgctaggggccctctcctcttcctcctcctcctcctcctcctcctcctcctcctcctcctcttcttcttctttcttcttcttcttcttcttcttcttcttcttcttcttcttcttcttcttcttcttcttcttcttcttcttcttcttcttcttcttcttcttcttcttcttcttctttcccctctggcttcctgcctccaccatcaaagagtactgctaggaaagggtctggtggagatgtatatacagtcatgagactggaaagacttccctctgagatcctacagtgtggatgtggccagaggatgaagattcaaatgtgaaacaaggacagcagtcctgtagaacagggtctaagcatgtgtgaagagctggatgaaagggaaagagataccccacaccctctttagagtctgacctcacatccagaccaagtcacaacaaaacagtggagtcctttccttaggtcctgactccatacttgccccaacacaagagtcttgtgttgtgacagtaagtggtggtcttctgggtcaaggacagacttaagtgacaaacacagctcttggtgactgaggattgggcttcctgagttcaaatcctgcctctgcctctttcttgatgaatgactttggacaagcttcttaaatgcagttctttcactaataatgagagacccacaaccttgtggggccattatgggaagaccaaaaagacatgtgatcactgcctagtattactggggatctgctaatagcatgttgtccagaaaagcagctttaatacaaggccagctagcaattcacccagccacttcttgcatggcaagacatagactcaccctggactctaggtaacaacaataaaaccagttgaaggaattggcaagatgttttggtaaaggtgttgccacagaagcctgcattcagtcccctaaagccacatcattaattaattaattaattaattagccaagcattgtcctgtgcgcttgaaatcccagcacagaggaaatggacacaggctgctctatgtggctctctgcctggccagcctagcctactcagtaaactccaggtcagtgagaagccctgtctggaaaacaaaggttactaaggaacaatacacacacacacacacacacacacacacacttgaacacatatatgttccccacaaaaaagcagttagacagtgaggacaggatttgaaccagtattttttcagctgtaggttagagctggtcactactagcctacatgaggtcatcacttgcaaaactccatagtagcatgggaggctttccttgttgggcagtgtaaatgataatgaaaagtaatccagaggcatggtaaaaactgatgaagtctctccctctgaccctgatagtaacttatgccagagctcagacaagttgttcccttcctcaagactagcagatgggaagtgggcgactagaaaggcatggctttcctttgagccacctgattctcacctggcaccagatctccccatcatcacctcaccaccacctcgcatttggcaggtgtctcagatgcccaccttatggcactgcagcctataaaggaactgggaaatcttgggtgtggttccaagaacacagagccccataaaacagccctgacgccaagaactccaggatggccataaactgctgctctagcagcagatacctccgcaggttgctgcactgtctgccactctgtgaactctggaaacagttctgttccccaactgagagaccctgcccagttacaacccaagggcacaggactgagaggccctccaaagccacctggcaagaagggttttcttattgaacgctggccaggcacaggagacagctctcaggaaggccaagaggaaaacaggagagaactggcaccatgccttctgataggaagggctataaaatgtccccttcataattccttcctattccctataagtgtcccagcaggttggacctcattcccattcacagatgaggaaagtaagatcctgaggagccacacaactaggaagtagctgggatccaggccaggatactaaagcccagctgtgctctgcccccaggttcctgaggaggttggaggatgggacatcagggtactcaatgggactcagagacgtccctggcctcagcccagtatcttccaaacacaggacatccagatctcctggtaaacctccttctgaggctaagacagtccaagcagtgtctcaataggatgccagcccagagcagcctcccatactccagctctagctgaagtatggaaataggcaccagcttctcctccactttctgcagaccttctctccactccagaccaagctccacaaatgctggggctggctcgcaagtggcgatgggcagggaagcagctcaccttcagagagggtttccaaacttcttatgcccttcttgcatcactgcatggaccaaatgttgctatgataaacacccatggaaggagttacagagacaaagtttggagctgtgacgaaagcatggaccatctaaagactgccatatccagagatccatcccataatcagcttccaaacgctgacaccattgcatacactagcaagattttgttgaaaggacccagatgtagctgtctcttgtgagactatgccagggcctagcaaacacagaagtggatgctcacagtcagctattggatggatcacagggcccccaatggaggagctagagaaagtacccaaggagctaaaggaatctgcaaccctataggtggaacaacattatgaactaaccagtaccccagagctcttgactctagctgcatatgtatcaaaagatggcttagtcggccatcactggaaagagaggcccattggacacgcaaactgtatatgccccaatacaggggaacgccagggccaaaaaatgggagtgggtgggtaggggagttggggggagggtatgggggacttttgggatagcattggaaatgtaattgaggaaaatatgtaataaaaaatattaaaaaaataaagaaagagagaaagaaaaggaaaaaaaaagactgctctctatagggaactgagattcatagattctggaggacggttcatttggtacggtgcttaccttggaagcagggggacctatgttcaatccccagaacacggtggagtgtgtctgtcatcttagtgttaggaagattcagacaggcagatccctcggcttcacagctagccagcctgggttaatttgcaatccccaagtcaatgagagaccctgtcttcaaaaacaagttgtatggcacctgagggataacgcccaaagttggcaagtactcacgcacataacacaaaacaagacatcagaacttcacagtatcggtcagctataaaccactgagctggggttgagcccatattcctcttccccagtgagggacagataagctgtcaccctgctgcactttcatcttccagtccctctgcagtgatcacagcaatgatctatagagtatttccactctgagcatagatcactaatggccctggccctctctccctaggtctcttcataggtgttgaaaggccaggtcgacttcaagcatgggggtcatccaggcccaccagaattccatcacacttctttacaagacagagatagagaagtgatatacaagtacgttctccagagaaagacccaggcctacagcagcaacctcacctacccttagaaggtacccgatgcaccctaaaaagacaagtttgcatccacagtgacccgcctccaaggataattagtatagtagagtttggatcatgagtgtcctccaaaggtccacaagatagaagcttgaatctcagagtgatactatccggaacgaatagtgtctttaaaaggtggaatcctgtagatctttagtcattagagggtatctttgaagaagatcagaggacccacaaacctcctcactcctgtttactccctggatgtgatgagatgagttttactaaccaaaagttcctgccaccgtgtacccaacacaggctcaaaacaatggagccaattgaccacaaacagaaacctcaatgatcacgagccaagataaaccttccctttgtacgctgattatctcatgtatttgttatagtgacagaaagcacagtattgccccacctctgggtctccttggataacacagagcccttcttgttggaagcaggaagacctatctggggtttatgttaaacagcctactcttgacaactgtcctctgtgacacccgatcagtggcaaaagcctctgagaaaagtgatattcacagatcctcagagccatagtttggtgggttccattcagtcccaggaagcaccacaggtcagactcacctaaccagctcagtgggtaatgcagctgttaggtgacctttgtcaaattacttagtagagtttatctgctagaactgacaaaatggcaaaaaggacaaccatggggtgaggaatgagagccacgttggaaaggggtatgggtgaaaagctaggcagaccctgaagaagcctgctaggcccgctgggtgtgagtgtgtgaagagaagcgactctggagggtggtgggctgtaccatggaactggcttcctgattccttcacccgctctgtatcttcacaaggacattcatgtatacccaggagtgtactggaccctggttccgctaaagcccacttcctaatctaaattaatcctgattatcaactttattgtgctgagtgatacacagaagcttagtgagtgcacctatggatggagctagcaccttccaacaagctgggagtccccagggaatagaagggtgaaacaggaggaagctggattacacaggtcccttcacattagttctcatttctcttccctttcctggccacgaggctccaccatgatgacctgacacccttacaaccatgagtcaatataagtttttcctcttttaagttgtgtgagttccatatgttgttacctcaacagaaaggcccattaacacagtccagacctatgactgttgccttacatggcacaagatactgtttgatatgtcccagtgatcttgatttgagatcagtctggttgcgcaggggactctacctgtagttatagatctggcctagacgaggaagtgggagaagctaggatggacgtggagacttgagccatgtgattcaaaggtaagagaaagaggcatggagacaagaagacacaaggtaaggagatcctcccttcagataccttgaccttggaccagtggaacccacttaaaactctgacctcttgaactgtaggaatgggaaatattctcttttctttactgaagggaaccgagggtcttagacaagccatgtaaagtacttgaccagactactctctcagctctttatttttattttgaaacgggtctcattaatcacccaggctagccttgaacttgcaatcctcttgcctcagcttcttgagtggctggatttcttgtatacaacaccatgccccggcaatcacactgtgttaaggtactgatgcctatggccactggtcacagcagggaaaggaaagtggtacccagtcgcctgggaaacatttcacagtatctgtatggctctagccaatgaaggccaactgatgaccaacaggtgctgctctacctctccatagctcacagtcatgttttcttctctgcctctcttccacaagcctgggcaccttgcaacttctgcagggagatgttctgcatccagggatgcagagtgacaccccacgctgggataggcttttcagtgatacagctgcctctgaggcatgtgtgctcctggaaatagctcctcacctgtggtcctgtaagtaccccagcaaatttgttggttcactgagctagccttgggtggagtgttcatttggctcattgtcagtgtcctatctggggtaaatagacatttttggcacacaacaatcatgctacacatgacagacatttacagttatctgtcactttcatttgtcttgcatgtgtcgtgtgtctggtgtgcatatattcatgcttgcttatgtgtggggtgacaacagccagaggttgatgttaggcattgtcctggaccacttgtctccttagctactgagacaggatctctcctaggtaatctgcttagcctgcttgccccgaggatccactcactccacctcccactactgggataataggtgggccactacacccacaagcttttatatggattctgggaattcaagcgctggtcttcttgtttgtgcagcaagtgttttatccactgagtcatctcagacccagctctgccaacttaaaagttttaaaaccaatttttcaaaataaaaattaagcaagatgctatttatattaagctatagtccctaaagatttagccaacataaccaatatctaagagaaagaacacaaatgtgaacaatcgaattgtcctttaaaaagaaatttttctctcagggcagtggcagcacatgccagatctctgggttcaaggccagcctgatctacagagcaagtttcaggacaaccagggctacacagagaaaccctgtctcaaaaggaaaaaaaaaaaaaaaaaaaaaaaaaaaaaaaaagcacaacactccaacctgagttaattcaaaactaaccacagacaaaagataaagccccacagagccaccacatccttttagataaacatactgtacttctctctctctctctctctctctctctctctctctctctcacacacacacacacacacacacacacacacacacatacatacatacatacacacacacacacacacaaccaaagaggatacaagttaaaggtgaagtataaataaagaggccagtcaccccattcccagctgttcttcactacagggtttacaaatctcctccacgtataaggggttcaactgctcccaccttttactttcccacttatatatccttctttccatctggggtccttaaagttctgaagagataggacagtatgtgagccctggtctcagacaacccaattagaacagtcctcagatcctgaaccaggaatgctgggacaaaagtattttccagtcaagtttgcattgagcattgaattgcctgctggagctacaacaacaagctggcttccagaagtataaggaaagcaagctggaggaacagaagggagtaggtccttgaagacgccagatacattcaaagaccacaacacagtaaagcaagtgctatcctactgacttggtttaagaactacggccacaaaaggtaaagggttcaagagatgagaatcccaccaccttcctggtatctcctggctccgctgctcacaccctagctaagccaagccaaaatatcctccctacaataaatagcagatagcaaacaaaggtcagccaccaagccaagctcccacaaatttcaaaggaagtacatagttcatgaacatgaccagaggctcaaacacagttcttcaaggccatgggtaccatgtcgttcagctgctcacagaatctaccatcttctctgctttcttcccactcccctccctgcactgcaggagctgaatgcatgaaacagttattcttcagctagggaaagcaaaagacaagtcaaagacccatgaatattcatcttcctttcccttgtggaaagcagctttgagaaatgttcatgactccactgcctcccttcacagtcctcacatggccacccagtccttctacctgaatacagaatataagccagactcctcacctccaaagcccagtgctgcctgtgtactcatagaggtaaccttctcagcctgtgtacctgaggtctggggttaggtaccctgtatgaacaaaaggcttccattgcaaaaaaaaacaaaacaacaaaaaaaaaataacatcttacccatgtttccagtttcaaataggggtatcatttctttacagccaagaatgaccttgagcacggctctcagtaaccctcccaacagcaaggggcccttctaggccatttactccttggaagacaaagttgttggttctgactcatttctggaaactccttaccttctaccccaacactgcacataaacagacaatggggattcaataattgtttattgtgcaaacaaaatacaaatggcctggagctcttgcttacacactaagactgaatttttcactgtcctggctcattttctaccttctgaggtagctgctattatgacctcaggtgatggacctcagctactgagcacctatccttcaagggtgccccttaacccatcagaagcaatgtggccaatgttggagctctaccaactctggcttcctacaagtgggctagctctatatacctccaggctctctgtgacactctccacctctcttcaatgcacccagtgctccattaaagaactctgagtttttctggccttgaagcaatcctcttttctaaaaaccagacacaacagggcagtcaatgaagcaagaagacttctgaggctttggggctgatttgggcaggcaagggggcaccccttaggaggcagcttggctgcagactggcacatgggtatgcacagagaagctaattatcagtcagactccgcagctcacctctgctctcctatttcccattgtgtaacaaagcccagcatggcttcatctccaacaggatgtttttgttcgggctaacatcaccccctccatccaagtagctgcaattcgacttagtacagtgcaaggaggaacttggcctctttcagggatggcgggtggctagctggacagaggtctcttcatggtgggaatagggtggagaagaaaacaaatttgtggttccatcaaatacagctgaaggctgtctgctggtgggaacagctatcctacactttaaaaaggcacataaaacagcctttcttctgagcaagtcaagcttgagacacttccagaatattctgccaagctaccagtaaatggggataaggtagctttggagttccaccctcaggtcactcacactccctgctaatgcctaaggtcaggagagagtcttgccttcttaaagcccgtggtctggtgaaggtggtctagaacaacggtactctgacttccagaagggatccgatgccctgaaagctcaagaagcctccgacaacaaggggaatcaccacccagaagagaaatgtaactaacatggaatatctgtgagtgattgcagaatatgcatctgttctctgactcactcggcgcctcctaagtacccatttgtgtcatgtcacatgttcagtgctgagaacagtgagacaaataaagatgcacatcctgcctggctctgcatcccgtagtccagagtgtggagtccacaccgggtcccatcaggagcttacaatctagccggatccctaagcacaggaagtgctctggagtcccaaggacatgcctcatcctcgcctacacagtgcttgccaggaggtggcctcaagtcaacttcagctaagtgctaccttgtgcctgtatacacattgacggttattgccatcttttgagcccatcttccatgctgcatgaaactctgtggtcttcctgctatagctacagaaagagggagttcaaggagggctggcaaagaccagccagctccctggcagagggagagagaactaatcccaggtacctacctatgtttccttaccagctcagcacacagatgaaaaagaagaccctattcatgtcttacacagcctcacctccaccgcaggcttccccgaaggcagtgtgagtaacactcttgagaccctcttcccaacctggcccaaatgtggggcaagaaacccaggagcaaaatatttgcttaattcagagagtggcaacatcaacctgacatgaaacggagctggaggtggggaagaaagtcttccgggaattcagtgtacagaaacaagttttgtgagtctccgtacacataatccccaacaaaaaagcaaagtttaaggacaaataccaggtgctatgcaaaccttgcagcaggtgcctgacccagctctgtgagtcagagagagattcctaagtagggcactccctgattcttccttgcctggatggcccaagggtccttctgccccattcccttctcctcagaacccacgggaacacagctcctgaggcacacagggccaggtggcccttcttactctggtgtccagactctggaacctagaaaagatctatcctgtggagaagtgcctctgccctctaaagcctccccccccaccccaccctgccccctttgcagttgtctccatctgtctgagaacatggaaggtggcagcactggacagaccattcgggaggaaaaactcaaaattcacacaaaacacaggtgctgtgtagagtcacgggagcttcagaatcgtgggatgcagccatcattcggtaaactgaggctttcgaaaataaacccatctagagtgaagtctttgaaacagagtttcacgtcgcccagaccggccttgaactcctgataattccatctccgctttccaagtgctgggattataggcacattccaccacaccggtttataggatgctggatgctaaagtcaggtttgcatgcatgctaggattctgccaactaagctgggcccctgccctaaagggaggaggtgttttgtagtctcaactttttcctctcctctccctacagtccctccttcctcttcctagagtggtagcgagtgtagggtcagggaaagaggcatctccattttccttttgccctaagctctggctctactcttaatgcccagagaacagtgcccaccttcctgctggcctttagatgccaagtttcccgctagccttccttcctagccttgtgaccctttaatacatacagttccttaggctgtggggaccccaagccacaaaattatttgatgatactgatgtaactgtgatgtaaatatctgatacgcaggacatctgatatgcaacctcccaagagggctcgtgacccacagatcgagaactgctgacctaaactcacagccatttgttcaatgcttacaagatgctaaatgctttctaaatctcctcaaaacctccatgagctggtatttttggagtccagtttatgtatggagattgaagtggatattagtcaacgcccccaagcagggtaggagtgggttttaagctcatatttgtctaactgcaagacagaccaccatgttcacatgttctaaatttaagaggcccaggctcagaatgaagcctctttgcattctgggtgcgagcagaggttccctatatcactggactgatggggctgtctgttacagcagctgtcctagcctgactatacttgcagctagttcagtgttttcatgaccacagcacaatcacagaccagatactataataagcaactgggtaagaagaggaagcaagcagcaactcaaggaatgccatggaaagaccatcagcctagaaccagcagagtggtccagtagccatgttgcctactcataagactcaatacccccaagcagtgtaggagtgggctttaagctcacatttgtctaactgcaagacagaccaccatgttcgcatgttggtcagccatcaggtctccacaggggagtatcatgaagcaaagtaaagagcactgtgcggcagaacaaaagctgagtcttaaggaaagcctctagcaactactacctattccagtcagctgttgcagacaaaccaccccgatatataagtagtggcttaaacccaatcatttcattctgttcttggtcttattctgaaagcaggaatgcatggagcaatcaactgaataatttgtctctgatttgcgtaagtgggacttaaagtatccagttccaagatggtgtcttcatgtgcgtctagtacacacatactcattccctaccccctcccccatactcactgcacttcctctgtctttttcctgtctcctttctgctcatatagtatcccttcctccaggacctctcctgggactttggacttacacatagtggtttcaaagcagtcagataccctgcacaaggccactaatttccagacagcaagtgtcccaagagacaaacggaaatatcaaggtgtcctgctactgaacccaggaagttacatcaagtcccttctgcctgattccactagttcagagcacttcccagctagccttgatgcaaaagcaacaaggccaacacataaataacaggagctgggcaagctgaggttcacccatggtttctgtgaagaccaagtcatgatattatctaccaacacctagaggcaccagtacccttcaggaccaccagccaggcatagagccaaagagaaaatgtagcagttctatccacagggagcactccacatgggagtagagatgcctgctgcagcagatgcccatgcaggccaaggaagaaaagaaaggctggctgaagagagggaggatggccccctgggaggtatcctcctaatcagttgaactaatctgcactgggtaagaaagtgggaggttggaggggaagacttgggccacctaaggccatgcaaggcctcctctaccctctactgcacctggaccttcctgaactatgctctgctatgctatcaccaggtctcccggcaacagggatatagctcagatctgcagcaccttgaagccacagccagcagttccagagcgattattgataagccactgctggatgaagagctgcccaacacctcagggctgaaaagaggcatcaatggcaacgatcttttctctgtctccacctgcccatttcacccaacccagagaagcttggctacagcctgccagcctctgagaccatcaactacccagcctgggaaggggacagccatgacctggatgagaaagtcctggcctctgatagctacttccgcttcatgcagaggatgctgtgctgacaaacacctgggacagcagaggctgtaggtagcagctgaaaatagcagagctggctgcagaggagcctcttctaaatcctcagggtcttgttatccctcgcccgtgggccacagggacgcacctggctgacatgtgtacaggaggcgttctcaaagcttgtgcttaaaaccagggacgcttgctgtgccagggcatgagtacagtgatgagaaagcacagaaacagcctgttgagggacgaggcttgaagggtaaccccaactccacagttccaatgggctcatctggcccctccctccttgaccaaatccattccctcccccttctctggatcgcaagttctttgcattctgccttctcgttttgacagtaatggttaagaggggtttatggcatttctcatttcttctgtgagttcattgtaccagcccagctagttgcttgctaagacaggcatatggatatacaggttgggcactacagagctccaagggtcactgctcataactacaatgtgtaggggattcctgcaatcatgcaatgtgaccacggcattaccagaaaagaaaggtctcacatgatccccacatccctgggaaaaggacaatcctgtttgtaaagatttactaactgaccaatccatttcccacttccaaatgttctacccacagggtttggaatacacaaggtcatgacacccaactatctagaaagagattgagagagaggtacaataatgtatttccaggctaaagaggtccagaggacagggggtgatcctttcaaagcaagggggtcacacctactgaggggtttcctgaccccccccccatcctgtgacgtcattccaataagccaaagaactcagatctatctatttcacgtgcatggcttcccttccatcgccaagagtctcagactttgaaagagaggagccagtgaggatcctcagcaggtaaagcgtttgccaccaagcccatcagtgtgagttcaagtcccaagacccgtgggatagaaggaaagaacagagttcgagagagactcaggtagcacccagagatgagagaatagtgggcaccattccacatcaggatctgcagctctgttatctctgtggcttaacaggaaggcttgggtggtaagtgtcatccaactttactgcttccccgtgctcgtgtgtgtgtgtgtgtgtgtgtgtgtgtgtgtgtgtgtgtgtgtgtgtgtgtctgtgtctgtgtgtgtctgtgtgtgtgtgtgtgtgtgtgtgtgtgtgtgtgtgtgtgtgtatgtgtgtttgggatgcatggcttatgcatatgcacatgtgtgtggaatacttgtctgtaggtggcccacaaaaatcagcaaccgagtgttttccccaattacttttctgccttttttcatttgctagggtaatctcatagctccacctcggctggctggccaatccacctatctctgcctcccagcactgaggttacaggcaagtgtgaccatacttagcgttcatgtatgttctggggtctcaaactcaggccctcatgcttgaacagaatgaattttaataacttccaacctctatctcaaccttttaaaaacatgtttgaattatgtatcttatgcttaatccaattgaaggacacatgctcaaaactcacccaaatatttattttgtgcttctatggaccctgtgacacaggggttggcatgtgggccttagattgtcaaacacaactatgtgttatatgatctaagtctcacaccagctctggaggtgaacctgcataactgcatacagtacacccacttattgaaggtagagaaagggggcatgccccattttctgacaacacagctcatgaatttaagagatgtgaccagcacttcagatccatttcaatcctggtattatggaattctctgcacttaaccaaggacttcccacctcatggagaaatggtgtgtgaggctcaagctactccttgttgttgtttggtggtggtaatgtgcatgtgcgtgcatgtgtgggcatgtatgtgtagtgtttaaacgttgatacagggtcctaatgtatcttaagttggccttgaacttgacttgtagccaaggatgaccttgaacctctgatgccacctcccgcccccccccccgcccccatccagctccctacaactggggaactgaacccagggctttgtgcactctaggcaaatactccaccatctaagcaacaccgtccaccctctcatacaccttttagtcctatagcaatagttcctctagactcataagcgactcatcatacaacaggccctgggatatggggtacagaggtcattaatactgtgtaggttcatacccagatctactgccacactaatgcatggcctgggcctcaattccctaatccataaagtaagagtgatagtactacctaccgcaatggatggttcaatccaaatatttgcatataaagtgcttagtaccccaacaccagtaaacacacaaagcttcctataggggtgggagaagtttgattttattcctcatgcttattctctaacctttaaaactttataaaataattttaaatgtctatattaaaggattactttgaggatcaaataacctaattaccatatgagacctccaacactgtttatgcctcatggatactcagaagaaacttgttattgttttctgaaagacatcagtatttccagttcacacagaagaacttcccagaacaaaaacagtgataaatctggagactgatggatacctgagaataaacaggaaagggtacaaaagaatgttccagaactaactgctgggctcaaaagcaaatgacatagtatatgagccagtggaaggccttgctataaacaaattggttcagtctagggacacagtgccatggtaaagtacttccatagcaaagtaggatccacctaacatactgcaaataaattctatctatgtggatcgtgtgtgatgcatgtgtgcatgtgtgtgggaggtgtggatgtacatgggtaggtgggtgtctgtgcacatacatatgtgtgcacatattctctctgagaagacacaggtgagcagacactggggagaatgagaagcaacatctcactagctggtttctgtttccaccattaaaatcattttcaagccctgcctggcatttaaatagcatcacccctggagatggctgctttggtttcattaccgtctgtgttcgcagagcacaaatagaaaccttcgtggttttattagtttccatgcaactcaggagagattagcatgctagcatttcagctgccaacttaaaaaaaggatcagctaaaaaaaaaaaaaaaaaaaaaaaaaaaggtgttcacgtcgtcatgtcactgggaaaacgaaaacagaaaatctctatcatatctgcttcctgcccatgaacagagcacatcactctgcagttgccatctctactgtctaaatgtttagctagttctgtaagaaatacatagtcacaatcacctgtgtgcacgcacacacacacacacacacaccacatatataccacatacatacacacaatacacatacaacacacaccacgcacacatactcatgaagggctaactcctctgtagaagggtctcgtgctggtgtgaggggttttgcttccctttgtttctctctctttctgtttgtttggtcagggccgtgggatgatggctggtgtgctgagcaagccccggagcagcctcgtactctgtgactctgcaaactgttaacatcatttacctgtgacaagttaaaatttaatacgtggccctggtaacggcgaatggctattatataatctaaaggcgtaattccaggaagtcccggtgtactggctgtttatggttggggggactttggttcagagagcacctagacatttgggggtcacccctcctggagcttgcccctgccacagcggcttcggcagctgggaagctcactgaacagtacagagatgaccgggctggctcagggctgccttttaggatgacttgagggaaaacttcaaagtgagttgattctcatggccttcttttcaatcaaacactgctagcctataatcccagcctatttatagactacaagctaagatgacttccacttttccccacaccaagagtcaaaataagccttcagtagtcacgcagctatgtcatcagaagtaataacagagtcacaaaaccctaagtctgaatgttttctttttatttctctttctctcacacaatacatctcaaccccagctcccactccctccctccctccctccctccctcccaggtccctgccacacccctcccttctcccccagatctgattagtttttttttcccctctaaatgcaggcataatagtatttccaatgtcctctgattaaaaatgtttaatttttttttttacttttaaattgtgtgtgggtgtctgggagggtgcatggacagtgtccatgcactaaagcgcatgttcccacagaagccagagcctcagatcccctggagccagagcgacaggtgatcgcatgactggagagctggggaccaaagtcagttctcttcaatggcaactcctgctctcagccaccgagcatctttttaatactgcttcacattgaaattctcaagtatgtctcctcatcaaagtcagcactaaagttttgggaacatgtcaatcaaagtccacttttgtgatttttagcagagcaaaatccactccctgggtctatggcctcaagtaatggaatttataaaaggtaaaaatgatatctttgaaattgacctacgtggcattgtacttgaaaaaaaatcattaaatcaagaacaatttatatctaagaagcctaagacccagacaacgccttgtcagagacacgataactgccctatgtcgtgtgtcaatgtcaaaattctgagatggctcagcccttaactttcccctgagaggagaggtgggctcgagttaccgctcactggtccaaggctggcacaagaccctgaactgactgtccagcactacagaaatatacaaagagcaaatctcagtaaaacagactgtgggcaggaagagggccactgctcattcttcaggtggctgtgtggatccaacccagcaaggccgtagacctctcaagggcctgaatgcccacaggaagaagaaagtgaaaagttgtggtcaatggggtcccagtaaaagggggcagggaagtgaacagacccacatactagttaactccaggggtgtgttttgatctggagaaacttttttttttccttctgaaaaaagtgtaggggtgtgagtggtgtgcatggtgtgcatagtgtgtgtgtgtgtgtgtgtgtgtgtgtgtgtgtgtgtgtgtgtgtgttatcagtgctggggattaaaccggggtgggggggcagcctctgcatgttaggaaagtgctctaccactaaggtacatccccaggccctgttttgacattgttagcctcgaaatcgagatcctctgccatagcctaccaaatgttagatttataaaaacaattattgaaaaatattagaaataaataaaatgtgtttggccttcttggagctggaaagaaggtttagcagttaatagcactggctgctcttccagaagatgcaggttcaattcccaccacccacgtcgctgcttataaccatctgtaactccagtcccagtgggatccagtgccgtgttctggcctccagaggcactgcgtgcacgtggcacagaaacatacatgctgacaaaacccctacacgtaaaataataaagcaaaataaaaatgtaaagcctgccttcttaactgtttctcactgagcaggtcagcagtaacaaacatattcacattggtgtgcaagtctcttctgaatgttctcatccgcaaagctgaaactcggagcccagtatgagcgatcacctgaggaaccaccacttgccgtgagttggccatcctaggtgcctgttggagtagagtcccatctttcatgtctacgtatcatcacctagcttaaggcagtgaaggtctctattcaaggtccttccctcatacagccggacaacagcccttgtgtgtccgaactacatttggtttctcccttcaccttggttgccactttgggctgttacgggtaccacggctctcagtgtgagcacacagacgtcatccaggtccttgttcctaaggtatgagacatagaccaaaaatggaaacactgaaccatgatagttcatttttaattttgtaaaaaaccctcccatctagcttccaggggttctaatttctctactaccttttcaacacttgtgaactttctggatgtttttttaacagtactcatcccagcaggtgtgaagtatctttttttttttttctgtctggtctacatcttcatttctacaatgttctacattgtacactgaacatacagtactcaggattaagtaaaaatataaaacactgaagtcaaaaactaaatcttatgaggaaaataggttgcaaataattataagaaatggacttctttttctttctttctttctttctttctttctttctttctttcttttctttttttctttctttctttctttctttttttttttttttttagagctatgccaactgttgcatttccctgacggtttggttagggacatcatttctgcactccttaaaagcccatcacctgttcggctgtggtgcctataattcacaggccaccagcacagctcctgtagacactgtgaagaaagtgcacagagagaaggcaaaggcagggggggtaaagggggggctgctgctggtctgtggtgaagggcccagttaacagaacaaagtgtcgtgaaaacctgcactgttgcagagacgaaagtcactgtgcccagtggttttctactgctctgccccactccttggaggtgaggcaacctgatatattcaaatagggccaaggagaaggggctgggatcaaactctgtcagtctcacatggacccagcctccagctccccgcggggaagtgtcattgctcctggtgtgactgtctctgtatcattctgcacaccctacctcctcctctgtgctcctgggggtgtctgtctgtcttctctttttctagctctcccttaaaatggatttttagttagcatgccaagaatctggttccatgtgacaatattttcatacatatattccactatgctttactttttatttgtcccccctcagcaccctcccctactcttcacccttgctggtcccctcctccctcaaaatagtttcgccttctgcttttatggcacatatacctatatatccccgtcttgttacaccctttttctttccttagaccttttccccccaccctcataatcccatttctccttacacacacacacacacacacacacacacacacacacacacacactactcacagcttgcagccagactaaaccgatcttcatagtcacaaccatcgggcagactggagactccgtgcttccaaatgtcaaggactagaaaacagggaacctcactgtctcaggagaagagggggagccaaaaaagtgaccggagaggacaagctgcctacacagaagcatcacaggtaaggttctttgacatcatcacagagtagttgatatccatacactttgccatccaggcctgtgctcagtctgaaatctactactctggacttgttctgggtgccccagccatggggcacaagcaaagagaaacgggaaagctcttgccaggtccactctaaggtgggcaatggtggcctcaggagatcatggacacttgtcccctttgctgggggagcagaagagcaccagcacttggggagacctccaaagccctacccaccatgagctgtggttacacttgcttagtcaagtccccgtttgttgcccaccaaccacctagcttacaagccactatccgctccagtcctcccacacccaagttcactcccaaaccagaacagagcatttcctgctctcaggagaacaggagaacaagaacacgatatggcaaggaaactgaccgatatgcagactctccatttataatccatgtatgtcataggcaaacccatcatgcctgaatggctttctacaattctgaaaagaatatctcataaaaccttgccctaaacctcttatgcaaacattatggttggctgagaggtggcttagtggttaaggctgctctctgatctttcagatgacctgagttttattcctaacacccacatcaggcagctcacaactacctgtaacttcagctccctctatcagacaccctcttctggactccataggcagaatatatccacacagacacatgtgagtacacataaatacaaataataatgataaatacttaaaataataatattaaaatataaattatggctccagatatcatcatgtatgggagagattttacttcaagtaacaatctttcttcctctctcccaccacaaggtctcactgtagagccacctggaggtaatgatactgctgtctcagcctcccatctgctgagactacaggtctacaccaccgtgcccggctttacaatttaatttttcatttaaaaaaatctttggctggctcttaaacttaaactctgatgatagacaaatcatgtagcactttctctagctatctctgcctaaatggtagcattgtgctctagtgtgtgtctttaaagaccaaaattaaatgataccaggttccacagaagttctccaggatgagaaagcactgtggaaaaaggaaacaagggggaaggcaaccagatggaagacagagaagaagaaaaggatgctggtggtcattttaaggttgagagtccactggatctgggttctcaagaaaacctggtaagaaataccaataaaacggcatgggcagaatatgggggcatcagggctggggtaacacctgtgatgccagcactcagggagcagaggtgggaagagcacgaattcatggccaacctgggctacatagtgagactgtctcagaaaagaccacacacacagacacacagacacacagacacacagacacacacacacacacacacacacgcacacatgtgctcacaaattaaaatggaaaaacagttaaggtcgtcgctcaagcagtagagtactcgcctagcatgcttgaggctctaggttctatactcagtacttcaaaaacaaaagcaaaagaaagtaaaaaggtaaataagatgttttaaataatttctgcattggccacgtagagaagcattcgtcacacaggtaatgagatcgtacaggaagatgactcccaggctcagctagaggacgttaagtatatccattctggccctagagtgccaattacatttccaaattggcaattagacataatgtcccaaagacaattaccaaataatgccaaacacaatgcaaattccatctgaacgagagcattcttttgaaactctccttctgccccttgcccaactcatcccccctcacacacagctgcccaagagaactaagtccttttcacccactagtcaagacactgtggtggtgtgaataatcataatctaggatgaatcaagcaatctagaattttatcaccaaagcttgtcaccaaatcaagccattctctctctctctctctctctctctctctctctctctctctctctctctctctccctctcttgattccctccctctcagagcttctctgatagttgacaccaaaaaaaaaaaaaaaaaaaatagaaagatggggctggagagatggctcagagagccatacacactgaggacctacctgagttcagatccctgggacctatgtacaaagctaggctcatgtgtgtgcttggactcccacagctgagagggtgactcaggctcgctcgggaatactggccccaagcctagactacttggtgagtccagaccattgagagagactgtcccaataaaaaaaacaaggtgaagctgataagatggctcattgaaaagtagttgctgagcaaacctgatcacctgggtgtagcccctggaacccacataaaggcagacagagaaaagcgactcctggatattgactgtcctccacaaatgcaccacaacatgcacacatgacaaccaatataatttttaataactagagaacaacacccaagattgtgctctggacatacatgcacacaaagcagagacatgaatctgcacctcccattgtccccaccaccctaagtttcttgtgtttctttctagataactcaatttctgccctcaaggaatctgaagactgctcagggtcactcacagctgtacacaccccatgagaagggacctggttttagctctgctcagtctgatgattctgagtccaaatgggcaagaggtgagaaccagtcttcattatttttttcccctggcacctggctcggtttctggcacagtatgtatgctctgataaaggcaaaaccagcggtgctaacgttaagaagaagatctgtgagcctccaggtacagggtcaggtagagggccaggtacagggccattcttcatatggctccttctaagttcccctcctttgacaatggaacaacctaaaaagaacatctcaaggaaagtcccggagttagagctgtgaaatcccttctagtagtggcagatgggggggtgggggaagaggggaggggaaaggcactactttcactgttgcactgttgtctactagaatccttgagaagtacaaaggaagatagcactctttccccttgaagatacctttaaggttgaggctccctcccatttggtaaaggccaccctaggtccctgtggaaaatcccctgatttgaacctttccagtaggattagctcacagctgacctcctggaccaccacacacagctgtaacctttaattttgcaagatggtggtttggctaactggctaccctggactttgggaagccacacccctcacagtgtgaccaactggcatgaagaagaacccacacattggctggtaactggcatgccactccctgtaaactacagaaagccaccctggctaccacaaagccagccccaaagctctttgggagaagatacccaaagaggcagctttaatcgtgagcatccaacccggcagcaggcccaccctccaccccaaaccacctcatcgatctctctcaccccgactgtctgatgttagcaaaccttccacttcttgtccattctggaccccttcatgacataggagagctaggggtgtacatgttctaggataagcccatcttcagagacaacctgcccttactgttcattcacatcaggctctgcatggcatcagcaaggcctgtctcttacagaaacacgaccgctcaggccgctccctgggccttctgcatccgaccatttccccagcccttcaggtgatcctgtatatatgaaagtcaaagattcctccttcagccctttgcagacagaaatctgagcccagccgacactcttcggaccttcttctcacaaagctaggcacatgaggatgggatcctgaattctcttctcactgagcccaaagccaagaatacagcaacttggggcatctggaagaaggagacactgttggtctgctcctgctgtgtacagcaatggaatttcagaggttctgcgggagattggccttacctgaccctgaaaattttctctataagtctcagagtcctccatgatgtccccgggctatggtgtcactgcacaaacacaaccctttcccacgaaccaaaaaggagtctctctagaggctcctcagctctcaagtcccgagaaggtagtgtcggctgttgtgattcacagattagcacagccattgccactgagagccagggcactcctgctacccactttgggaaagaggccctggcattataatccaatgtcctctcaactgcttcaaagagagacagagagagaagggggcggtgcaaacaagtgagccctagagcaagcacttactgcctgctactaagcacctattgagcagcccagcccaaagagcacagttacttgttctgtggtcaagaagagaggccgattatatgcctcaatacaggggaacgccagggccaagaagtgggagtgggtaggggagcgtgtgggggacttttgggatagcattggaaatgtaaatgaaataaatacctaattaaaaaaatcatgatcattttctcagaaacaaacaaacaaacaaacaaacaaaaaagaggagaggctgagggaaggaggcaaaagactgggcctcccttctctctcaggccaaacagcagggggtctcttcctgtcctctagaagaagaagcagccccaggcttgcaagaaaagcatgaactccacgtcttccctgaaccccatgtctccctgcagtaaagtaagggaaagaagcttggggctgtgctcttattatgagtctcagtctgacaggaaggaaactgaggcacctccactgaagtccttgccaaggtcacaggctgactcttgtctactacacagtgggtagcaggggacggggggtggggagaaggatgcttaaagcaagctccctaccagccagacttctgtagacctataatgagatcctcccagtagagactcagccagggccctcactaccaatttctcccaaggtaacttcaagggcaaggaccagaacatactttgggaaaccctgttgtaaagactgccaaggaagagctggtctggttgcacagcacagtggttaggattctgtgacctccctgggaggcagggaacatcgttctgggagccttgactgcctggcctaccagggatggaatccaccctcttcaaggacacactgttgaatagctacatctcccggtgcctattacaatgtttttcttctgccagccctgttctctgagacaccaataccatcaagggcccacccacagccccatcatcaacacatcaaccatgttgtcagggcatcccccatagatctttcttcacccaccagatccccatcaccatagctcgaagcaatccagagccaggagacacagtctcagtgactttgaacaggttagtgacctcgtgttgctggttctggaggctccttttggttcccaaattctatctgttctagtgtgtgcccttctgcggcttctgtttaacggagcagcgaaaacagcttctcacttggtggaactgtggtaactctcacttccaagaggcccgctagtgccaggtgtttgttgggcactagacacccatgttattgatgcttcttataggaattctacaaagttaagtgtccgtgggctcctctggcagatgaggaaataaggctcactgtcagccaaagataccctcctgagtgggagcaacagcctttattctgggtctattaactgtagagtctaaaatatccatcaaaataaaataaaaataagcaatacagcagcagctctggagaggtagctcagcagtcaaaagcacctaccaatggtgtagaagacccaggtttggtttccagcacctacatggtggctcacagacatctgaatctccagtcccaggggacccaacccctcttctgacctctacaggcttctgcgtgcacttgatgcacatctgtatactcaggtacatataaaattaaaatttttaataaccaatgagaacaagctatctggacaagaccaggtcagatcccccgtgactgggggctgacagtatctccctagccaccctaggtgaactgaccacaaaagagtatgtggaggtcatcggtgctggcaattgccaggacaagaggaaaccaggcactgaggccaatctggaatctagagttccagggtgctgatgccgcagtcctgattgaatgcaccagaccagaccctgggtaattaccaagccataatgggatctgatatttatattagtcacgagcttgtcggagaaaatgtgttgttttctcagacatagccatggagacaacacctcaataattcacaacatgcagaccatccttgaccaagaccgaggttctatagggatgatagctctgactgagattatcggtccgtctatgccttgccacaggcaggtccttcagcaaaccagaggcccatccacaaatggcctacttccccaaacacttgaccacacgctagcagatgaataaaacaagggcagggggtgggggaagacacataggtgtccaaaggaatgggaaggaccacaaagctgagcttaaaatctttccccaaactgctctgtccttccattctcctacgtgtgttcccaaggcagagggaggtgattggaacttacggggtccaatcctcagatttcccagggaccagagaggttaaatggcttatgcagactgcctgaacagttccccagctcgctacaatctaggaccagactgaaccccaaaattctgtggccaaatgaccagtgcacactgatacaatccagggtggtggagagaagcaatagcatgaaaaccctcagcaaagaaccatgctccaatcaggggtggagtggtgaggtttgctgtgtgcctgtttcactctcctactatctgagacaggctatggctacctagtccaagctgacttaaaactcacaatcctcctgccactgtctttgagtacaggaattacaggcacaggccaccacacctagcataaatattctttgttcctcccttcttctccccaaatgtttataatcctttaaaaaaaatgatgatgataataataataataataatgatgatgatgaagtcattagctatgtgttatttggagaccagaggcacaaatgaacagagaccctgagatatatgtccacagtcttgggttcctttgaccaaaaaaccacggtgcagacctggagaacaaatatataaaattccaggctcctgccgaaacatgtcccctcaggaatgtcagatgctgagaagataccttctccggaactccagctcctagtaagccacactggacccggattagggtcagggtgggcaaagaggcttgagggtgggcagaagattctgtggaaaggcagcagaggattgcttacggagcctggcaagtcacaagtgttctaaacttgagctgaattctttattctgtaccgagtcttaacaaaactactgaatacttggaaagcaaagaggagatgaataactgcaaaacaaatgcagagcccagaaggtagaaagggaagcacctaaaaattctcttttaccattgttaggtacagggagttgagtatacgcacaatttaatccaacgaatcaagaggcagatattaagaaaactgggcacgattctaaaggaactcacagtaccaaaaagagcttgatgctattctgttttgaccttcaatctttccaatcaaccacaatcatcttttactccagggtctgcattgaaactctcaactgtgtgcactccactagtcttaaagctaaaatatatgtagaggaataggtacggattgttgttttgttttttttttaattgttgttacacaaaaccttttttctgagaaaactggcaaaagctattctggtcattatttagaaaggggattctttatgtaaattccttaagagacatttcatgacacacactataccagcacagggtaccccctagagtaaaaagatgctagacgctccgcttaaaaccttagaaagacaaaaaggactcattatgaccaaatttgttcactttctgaaaacagaaagtagtttttttaaaaagccaacccaagtcacttccatatagaaagtaactgagatgcgtgcaactaaagatagtcaccaagtctcagtatgagagggagacactcccaggacaagctgaagatgcaggagaaagaatgggtgaatgtgattctatgatcagacagagaccatctctgggtctggctataggaaccttgcttaatctgagggcttctctggaaggccatcggtctttctccttgaaaaggaagggggaacctccatcctcaagaaggggactctaaacaaagctcacctgtcaccattggaggctttcagagcaatgccaagaggaagcaaagaaggaagggtggtttttttctttttcctcccttattccaacacaccagtattttccaaaacacaaatgtgctgccacaaaacacagctgagcccagcacctacggtgatgtataattaatgacagagagtgcttcggttgcccttgggtttcatagccttcccccttagcctaactcttctctttagcagctgtacgctgctacaagttgctgagccctgtgacttctcaagggggtcccggatgaacttttctagagcaggtgtgaacatttggggaccaagatgagtgtcttgcacaatccccctagagatatcctctgtccaaaagtatgggtgctattctgtcctcttggatgagaatttctctaaaagactgcacccagttcagctcctcttttttcccagttctttcttttattcattctgtagttctcgctcaaacattgcccacccccggtccaccgccccccagcaagtgctaggtggtgggcagggacccctctagggagatggccacagcccaggagtaaagcctagcaaccacacatctgagatgtgagtcctaacactgtgggcgactctgccaggaatagcttaagacgacttctagccacatcaagtgccaaaagggggcttagtgaagcagaggtcccttggactcttaggagtgcagccctggtgctacagattggagctgctggctgtatttgtggggatccaaagttgatggcctgggaggggagtgtagaggtggcaaaagtacttggggtagggtaatgttccacaaagaaaatgtaagggatggagtgggcggtgacatcagacttgcaaccatgccacttttagaaagtgactctccatagattgaccccattctaggatgggtcttcccaactttttattgatccgtgggcccccactttctccatgatttcccccccagaattcccagatgcaaaagattttctccctagctcaaaggattcccccttctttgggaccccaggaactgatttcctcaacaacaacaacaacaacaacaacaacaaaagtatgagctgatctgtcccaactagtccaccgtgaggagtctggccgcagccagtgagtggtgtcccgcacgcacccagggtctttcagcttcctgtgtccctgcaaggttccttctccacactccgcaacaacgtgcccaagagacacatgtccccccaacccgggtccggccatagtcaccaatagccctacaataaacagagaactaaagcgggggtctgcgtcctggagcgcacctgctggggtcaactcctcacccctggcgcacaatccgagggcacaaggagaggggagggaagggcaagcggcggggacaaggctggcagggacagcaggaggcaagacacagtgcggagctaagaggtgggctgcgggggacgccgagaaacggctgggatggcgcaggggcgggcgcccggggcgcgcgttaccttcgtcttgcccccgcagtggcagcaaacggtccacaggtacttgagcgtccgccagagcaagatgatgaagaggcccccgaagaaagtcaccatggaggaggccaagaaagcccaccacatgcgttggccccggctgtcgcacggcacctccatggtcaccggtatgatgagcgcatccatcttgggctcgtggaccgaggacgaggaggaagaggaggaggaagaagaagaagaggaggaggaagaggaggaggaggacgcgtctaggctgagatggttcgcgtggatattgctgctcattctaagaccgctgcctccgccgccgccgccgccgccgccgctgctgccgccgccgccgccgccaccgtttgccatagctagcaatgggcggcaggcgcaggggctcgagggagctcctcccgccgccagcgccaccccgaacacccatcaacagccatgttgctgctactgctgccgctgccgccgccgccgcggagcgccgggaggggggcggggaggcgcctgggctcggggcgctgtgcgcgacctggcagggtgtgcggagatatatacagccaagcgccgccgcccgccctcccccgggctgccggccggcccgggggggggaggggatgagggagggtggctcccactccccgaccccggccccgatcgcccccggggctgcgcggagcaccgagagcccagggggcgccgcgggcggtccgcgcccggggtctgtgcctcccgaagctccgtgagcgcgatcccgcgtaccctcggcgccgcccggcccgcctggcgtgcgccacgcgtgtgcgctgcgcccgggcccggggtctcccgcccgtccccgcacagctctctcgggtgatgaggcgacagctccttaggatcggagaatccgcgccctcccgaccgggcgtgcccgcgccacccttcctccccggggctgcgctccgctcctggatcgccgcctcctgtgctcgcggggccgcggcaggttggttgcggcggtctgccctgcctccgcggccagctagccgatgctctgcgggaccccttcgggccgggtctctgtgaccctgagcttcctcggcctccgctcgcttcttcctccttgcctcctcgggctcctcctcgtccccgttctcgcagcccgagcctcttcggcgcgcgccccgcgcgccccgcagccgccagcagtggcagctgcagcaactggagcgggcgcgggctcaaacagcccgaagcgggaggggaggaggcttaccgggctaactcgcctcggcttggggctgtgtaggggcagcaggtcatttggcagtggtggggcatgcggccccccatcttccaggatgtagagtatagcgccaccagcctagaggtaggactttgcaggtgttgcgcccctctaggctcagcagggtaccagaaggggaaaccaccaggtgtctggggtaggccggttttcccaaaggggcccctaatagggagaggagtggctggttgtcagctagattcagtggacttattgcccctagattctaaggcttggagactaaggaagaccctagccagtacagtacacctgctgacagagagttcactctttcgtttccaagatgccacgttgtgagttgctgatgaacaactggggcatctggaagtctgttggtagtctgtgacctctgacagctgcaggtgggtttgttggttgttgttgtttgtttgtttgttgtttccttattaagcaaagatgacagcagcctggtggttggtgtggaacaaactgggtagaaaaggaggtttcttaaagggctgcttcctagttctttagactcgtgtgggaagggcaaatggatgacgggtactctgcattcaggcttgcctttctacatttctggtctcccgtttctcccctttaaagggaaggagtccaggattgttcagcagcccctgtcccccgccccacccccagtccccctatcgttgcacacagaaacttcctccctctggacacttctccaggctggcagctggaccacaactttttcctgtgctaattaaaaccaagatgatcactctcccctcactgcccacagtgatttccccaaagtttccagctcattagttatagtctaattggaattctcaggttcctttcaagactcttcatatggtaaactggcccaaaggagcctccttacctgaacaagctgtctcgacctaaatcattggtcagccacaccctggccctaggatacagagggccaaagaaggccaagcctggcagacactgaaaatatgtgagtctcaaattggttggtacattccttgggctcagtatacatatccattagaaaagacttaaggtcaaaatcacctcccccataaaatagtacacaacagaaggccagcaaaatggctctgctggtaaaggtacttgtctccaaacctgaccccctgcgcctgatccctgaaattcacagagtcaaaggaataagctaactcctgttaaccattctctcatgtccatgtgcatgctatggggcacactcacatttacacacacagaaaggggggtgctaaagaagagagcaataaatggtgttttctagaagcagaaattgcctcagtctccccttcagcatcatccatccttctgcactcagagggctgcaacacaatccccatgcattcaatggccctggcgcttttccaacatcctggggtagttgaactttgaaaggctggggagaggtgcaagaggctgcggtactgagattcctttattggccttctcaccagctgggtctgtgccttgacacaagcctgagggactttccttaagtccaagaattaacatttaaaactcataacattcatagcataagtcagcaaaggacaggtactgtcctgccccaccatgggtcatcgagccttcagaatgtattcccataggagcaaaacttgaacctttgcagccagtggtaccctctaggttcttcctacctaatatctacaacctagatccccctgaaaactattatcatgatgacttaacaagatgctagtggctgctgtgccttctgtcctctcacatttgaagtccccacaccattaccattatcatcatcatcatttaaagggctccagaagtcccataagacacctactccagccaccactctgtctgctctcgcaccacccctaactttgctgactgaagctttcagcatctccagtgttgtccaaaaccatgacttgatcagaattcatcagagaccttcagggtcaatattattgcctgttcctgtgtgaactcagggtactcaggatataggcacagaatgagagtattcccaactaccagaagtagatatcatcaggcctttgcccatctctgaccagccttttaagaagaggctctccccctagacacagaggaacctcacattcaaaaggaaccttggacatcacaggcttgtgctgttcattccgagagctacaacaaaaacagaaaccagaggcaagagagagaacttggtgagaaaaatgcttgagttcagatctctagcacccacataaaatcaaggcatagtgatatgctctgatgctgggaggtagaaagaaatacagataccaggggagtttcaggatgaatagcaaagccaaaaaacaaaacaaaacaaacaaacaaacaaacaaacaaaattaaaccaggaggggtaagctccaaattgagccttcctcaattaaggtagaaagctgactaagtaaaacatctggcatcaacctatgccctccaagcactgtgcattagacccacacaccacaacacacacacacacacacacacacacacaccacacacacacactccataaactggacaaactgggaccagatcagatcttctggccccgggttttgctcatagagtgcaatccgtgggaagagcagcaattaggggcccctgcctccactttactgctctgtacacccacacagcccctcagaaagacagttggagcaggaccacacagctgcaggaatctctgagctcttctgtctgtagcctttatcccagagggccacataccaggctgtggccaagctccagaggaacagaacccatccagcttgcacaggatctgtcacccatgcctactgattgtctttttactctttcattagcctggaaaatgggaagatctagaagtatctacaaataaccccagagcatcatctctaccttctgtaggcgtgtctacagattgggtatctagaaggattgtacaagaaataaaagcaggagaaataaaagtagaaacttatagtgaggccattcatttgcctgtaaatacatttaatagcttcccagactcttcagcaaatgcacatgtgtctatggtcaccttcagagcaagcctgggttttcaaatctgttacctattctaagctgggtattcccccatgggacttaaaagaagtacatgagaggaagaccacaagcacacaaactaaaaaaacaaaaatgaagtccagggagactgaaaggctgtctacgcagatgtcagcagtgtcacagtgtcactgagcttcacctttctccagccccagcctggacctaatgaaccctgagactcacattacaaaaaggaattacgaatctgttgggagattcagtaatgcctccctaagtgatgtggcgtcctctggtggcgtcttctggtagaccactacttggtgactattcaaagggaggctgactcattcagttgagacctgaaaatcctgaagaacatttcacagtcaaacaaacaatgtaagcacgggaaagggaacgatgggtttgggtgatagtcgttagaggacacatgctgactacagttaataatggttagtaaacttgagaagggacaccaagggttctgaccacagatgcatacaagaaaaaggtaatatctaatcagcttgagttcaccagctattcatcccacaaaaaataaatatttcaaataatgctgtgcaatatacatacatacaatttttgtctgtttaaatgttaaagctggagagatgccccggcggctcagggcatgtgtggctcctaaaagaccctactttgtttcccagcacccacataatggctcacaaccatctggaactctagttctgagaaatccggtgccctctgctaatctcttaaggcatcaaccactcatgtggttcacatataggcatgcagataaaacgctcgcccataaaatgaataaattaaatgctttaagtaaaagtaaagagaaatatcatatccaagatgatatcaacttttcacttatgaattctgtaccatataaagtgttggtatgaaggtagatggcccagttcatgttctttccacaacacaatctaatgctccatcttggctatgactgtcattagtatctccacacttccttaaattatcatgatgtgaaaagctggagagagttggcaacatgagattggcgctcagaactaatgtgcacatttaaaaaaaataactgggcatgaggctcacttaaaatcttagatctggacagtctggagcaggcagatccctaggagtcactgaccagtcagactaaccactagatgagtgacagggaaaaagaaaactctcagagaaaagtgggatggtgtctgaggaaggacacttgaggttgccctctggcctgtgcaagtgtggtcaccaaacatatgtgtacacatacacacatgcacacaagcacatatacaaataaacacacatactatcgacaagcatatgtgtgcccatacacacatgcagacacacatacacaattaccatggtgcactgctgccttctcacctccttataatttatttgtggtagaagatgggaaagtagctactccacctccttacagcttcaagaaaaggaggctgagttctccatcgagctacttgacatgccaagagtcctctatctctggaacaatttctgatttatgacaaaggaggagaagcacagtggcccaactctcaaaactatatccaagggcctttgggtttccaaatgttcgttgggtggaaagagactaagaaagcagatctgagtaggttaggttttcttttcataactaattaatatttgctttgtatttatttctgtttaaatgattaattcaggcttattacaaaaaaaatcagactacagaatcttcataagaggatattgaatctccctagaatcccaccacccacagatcatctaaccacttttagactttttttagacttttcctgtgggtctgaacataaaacattcacgctactttcctttaacatcaaactataaggattttctctgtcattaaagagcttgggagacagcaagaaggacaactgagtggcagaccagcagatggcatactactgacatgtggcttatcctaaaaaattgatataaaagtaagctctaaaactgtgtgcaaatctctcacagtagctgagagatgtcagaaggcctccattgatattcttacatcctggcctcagtagatgtctagctgagaccagctggccagagggtcctttcctgccccttactacatcacagacctcagatcagcccatgcctagcaaagaacttgagtcagggcatgagagtctcaaagtaattgcccccttttctaacacatcaaaactattgccttagccaggcacagtggtgcacacccttaatcccagctttcaggaggcattcaggaggtagagatagccagatctctgagttccagacaagcctggtctaggcaagaactggtgagttccagggtaaccagggctacacagagaaaccctgtctcggggagagaaaccatggcctttggagaaaagtggcatgctcttgcaggtcctcagccatagacccttctgcagtccagatggaagctagcaggaacatacactctcctttgtccaagatggtaccaatatttagggtcatggttgatagagtcaactcagagatcacgccctgactggaaggcacctttcacttccattttgctggactgccagaagacaattctgctcatctctctgtccctgtcgactctgctaggattgtctcaagcagactaccagtgtcttgagtccttcctgagagaggcttctcgaaccagagagtctgctttcttctatggtgctgagagaaaacaaaaaggaagagtctctctgtgcttcctgtgtgtttcaggcttccagaccaaagcactggctactctttttatttccttcagggttcctagtttaatctgtgcagaagctctgcttccagagctggggagtccagcactcaattccttgtcctgaataaataaggactttggcacacgagacagcatatagatggggcagaggacttactcctgcccctcagatgagaatggtgttgagagcaaacttcctgcttagaaacactcatgggaataagaatccatgaagtcaaacatgtcagtggtggcccgggatgggcttcctggcttctgattctgatttgtgcatgctgcaccgtgttttgtgatgacacagtctaaggtagttcagaggataaagtgcctgcagcgcaagcatgggacatgagcaagttcagatcccttgcatctacctagaaaaccatatgtacttgcctgtaatctcagtgctggagaagctgaaagaagatccatgggactcactggccagcttgtctaggcaaactcttgaatgccaagttcacagagataccctatcttaaaaaataaggtggcctgcaatgcaggaagacactaaatgtcagcctctgttcatattcttgcacacatacacacatgcacattcacctgcaaacacacatctacacacacacacatctgtaacagctaacagctccctttcttggaagtctatcccatctttggcttcagtatccccacagttaccaaacaatctattttccaaaatgaagtacaattctaatggctcaaaaagattatgagccatgatattttatgaggggtgagcttgtttgtatgaaaccaagaaacacagctttgctcacatctttctaaaacaaaccaaccaaaatttcaatttagcagcgccctgggagattcaagagaatgagccataaaagggaaacacagcgataaactggtctctgagttcaagagggaagttcatcaaatatattcatgcaaggagctggccatgtttccacagaatgctgtgaacgtctcagaatgtattcaacctaaagcaaagattgttccctgtgcacaggaatcttagaggtggtctcacctttgccccagatttgcaaccttaagtctagcattggtggcattttccagggcatacggtgtggttatcttacaaatctaaaggacagctaaagatagaggtgacacagtcaattatctagacattctcgagaaagcccacacatgagagagagagacagaaagacagagaaacagagacacagacagagacacaaagatagagacagagagagaggtagagacaaagacagagatagagacagagacagagagacaaagacagacagagacatagagaaacagagagacaaaaagacagagagaaacaaagatggagagatatgaactctgcctattccaggagctaaagccttgacttttggcaatatctatagagaatgtcatcagctttttctctctggggacccgtttgaacacaagcattatgcacttccagaaagataccttaagcactgcacacataggtcaaggtggagttagaggcagaagtttccccgcatgctgtagtacttacctttaggaataggcttgatgggtgctaagaacactaggtgacatcagttttccagaagatgctcagctgaggaaaggcgtgcagacacttccttttaagtcagttatcaatctcattttgttctctccttatcacaaaattgaaagctgtaagttgagcaaagtaagccacagactgccctagccgccctgggaactcttggaatgatggatagttgtgggcttaaagctttttatctgacttgctctcagctcttctatcaagttctgacttggtgacaccgtacagagacagattggcaagtatgtgttcatggctttttatttcaagacatattctgtctgaagtccaatggtccaggtgggaattctagcccctctgttaagtgtttagaagtccagtgcttcttaatctgctagcctatcgagatggctgtccattaaatccaatggtccatcatagggtgggacctcctaaaatggctttccattaaagtcatgggagtacttgagtccatttgagaaccaatctaaagactatagaatttatctttcccatcacacagtccagagggctctgccccttctttcctagcttcctccacagagacttgtgtgagaacccctagagcagagatggcaggcagagaaaccatatgaagatacagcacacccttccttccaggccagcacaaacatgactggtagcccagcagtgaggtgggacactgccatggattcctcatggacttcaggattgaacacacacagttcccccattgcttgggtcacactggttctcagccaacacccttagttcacttcaaaagggatttccggacaccacatcttagactatcagcactgccacacatagtagttgaaaggctatggatgtcttgaaaataaaagtgcatgataagagtataagagctggtatgatgaaagagaatggtgtcattgcatcagaactcggtgctgagcacgaggccctttaacctgaggcaaaggccaacttgggggcaactgggtttgggagaactgaatggggtgcactgttctcatttaatctcgagatgggaacataggatgaagtcattcttcatgtgttgactccggagagagattgaactttcctactggcttgaactcatattgggtccactctgcagatgtggaaagagagatgctaacatgtgaagcaagtacctcctctgaactcagagagagagctgctactcacagaagtcttcccctgaggtcagtgcagagcatgcctggtggtcaccaggacctcctcggggagaggggaatggtagtgaggcttggtctgatgtgttcttttttagacttgagacagtgctgtttgaagatgattgacagaatgcccaaagcctctttgctgccttgcctaagctgaagttagaaacctttcctgtaccctttgtgccctctctaatgctacctgggcagcagatgggcctgctggggctggtgcaatgagtcttcctctcctcccccctattcccagcaggtctctgtagatgattctttaaaatgctaatctgggtctctagaattcatggagccttttgctcctacagaggcccagtgtggcttcacccagctgtgcaccagcatgcagagcctcacaagtccccaggctggtggcaggcatgcagggagtcttttcccatgtcatctgggactctgagcacctgctgaggcagggaccctggaacctcaggacatacctccactgggctttaaacacagtaggtacagctggccactcagctctgagcctctccctggaactgggtcggatgcagcatcagaccaaagcaagagctttgaagcacctctgtggttgggtcctgcggtgacaggaaaatcaggatcctctctaggttggggaggctggtaatgatgatggaggacgaaagggcaggtgtcccactgtgcctttggaggaaagttgtgggaaggggcaacatcctagaacagagaggaagagaagcaagagtaaatgtgaaataaaacaacagagagaactagagagaccccccaaaaaaaacaacaaagaaaaagggacatagaaccccagggttgaccacctcctcctggtagccttttctctagcacagatgggtatggctagaatagatgggccacaaagcttacaaagaatgagacaagtataaacaggaaaccacagaatcctgctggcagattcccaacacgtttctctgtctatctattatccatccctccatccatccatccatccatccatccatccatccatcatcggcttgctctcactgcttgatctctctctctcttctcactctctctttcctttctcaggaagaatgtatgcttgagatgtggggtgttcctgcggagcacatcctggggtacccctagaacatgggcagcctcaggctgtgagtgagagaggaggaaccctgggctgtgtgtgaggaggtgggggcatagcaagaatcccctttattgtgttcgcattagcaggatgaggcttagtgagagcaagagccagcagaaacaacatccagaaaagacagcccaggcaggctttgagcagccaggcaggcattatgccaataccagtagcctcaagtgtgacatctttcctgggaatcccacctgcatgggcctccttgccaggaaagtgtccaaaacataggtctctctaggttagtgggcagtgctttataaccaagggaagaagaggaagccagtgtctccatatgtgctgttctgctgctccatcatgaagttctcgggtctacaaaggaaaaagtgttacttatttattagggagagatttattaaataccctacactgttcctcaggcttggtactaacagcttccttgaacagggtcttctgtccgcagctgctgtgcccaccataacaaggacccccccaagccttgtgaagtaaaatacatgacatcataacccaactgaagtctatgtgtttctgcacacagctacactcagacatcactgctgctcctctctctagctatagggtatggattgggtttcttgcttcctcatagttcaatgtcctcttcagagcaggggcaataaatggcctccttgaggcactcctgtgagtattaggtggaagaacccaggtgccactctcagtatggcatttagtacatggtaggtgttggtctttcactgcctttgaccactgctagtaaaagcagaagagtggctctataagcctattgccacatctttgcatttccactgtctggtacacacagaggagtggtacctttcaccccatgaatcgtagtggtgatcagtccatctctgtggaccttcctagaagaagggtcagagagattataagagccagaggtggtgggtaacttcagggatgctgcttcccagatacaatgagacagatatacatacgaactcacagcgactgtgacagcatgcatgagacctgtgcaagctcaagccagacagagccctagcatagcaaggaggaggtaagtacggagtcttaccctagctgaggacttgctgaca

SEQ ID NO: 53 - DNA, 35472 bp, Homo sapiens
atgcgccaccatgcctggctcattaaaagaaattgtagagatggggtctcactatgttgcccaggctggtctagaactcctgggctcaagcaatcttctcgtcttggcttcccaaactgctgggattatagacatgagccaccgtgcccagattaaatgctgatttttaaaaaatcagtccttttatgctccttcacttccctccttagagacagagtcttctgggagatggtgctctgctgagaactcccagagaagattctagtgaagttcataataatattcactctgagtgtaaatgtagaccttgagctttgcaggagcaatcttattatttatggattacagacatacattttcattaatgtgtaacaaaaggggattaaaaagcctctctctgcagtgtgtctttgtaaatgcccacaggaagtagctcctgggactgccagccctgtaggcagctgaagaatctgtctcaggcacaaggtcctggctcagagagagtctctggctcaggattagcaaggcgtgttaggagggctattctgagtcccaccccaggctgaggtccaaggatggtaggggagccctcttcagagctgcctgagtcaggctatgatggagggaacagggaaacttaaggctccagagatacctatccaatatcactagttacatgtggctatttccatttacattaattaaggttaaaagtttagttctccacttacactgttcacatttaagtgctcaacagccataggtagctagtggctattgtatcgaatggcttaaagttatagaacatttccaccaccacagaaagttctgtttggaccacactgctcagacaagaaggaatgggggtttcggctctaaggtactaacatcatgaccttggacaagaaatgctgtgtttccacctcagtgtccccatctataaaattaggataaccacagtaaccacttcaaagggtcaggatcaaatgagatactgcagttcaagtacttagcacagttcttggcacatgttggtgatcagtaattgagagttctcactagtggagaaatattctacaaagaggaatgatatggctaggctctgtgtccccacccaaatctcatcttgaattgtaatacccaggtgttgagggagggacctggtggggggtgattggatcatgggggaagtctcccccatgctgttctcatgatagtaagggagttctcatgagatctgatggtcttataaatggtaatttcccctgggcttctctctctttttcctgccaccttgtgaagaggtgcctgcttccccttctccttcctccgtgattgtaagtttcctgaggcctccctagccatgcagaactgtgagtcaattaaacctctggtgcttataaattacccagtcttgggtagtatctttatagcagtgtgaaaacggactaatgcaaggaataaggcaagaatatggcataggagtcaggaagcatggactcctggctgggttctggcactcacgagaggctgtcgagacaggcctgaattccaatccctggtctaacaaagctatgtggctttgggcaaatcactgcacctgtctgagctcacatggctcaccaacagaacagaggtgtgtattttatcagatcctatgcttccagaaaaagagaagaggcagaggcttttaatggctaatattctttggctctgatcatgcttttaggaacctgttggaaggaaataatcagagaggtgagcaaagatgacatgaacagatcatcactggagagtagtttataatagcaaaacctggaaaatagcttaaatgtctcagaagaggaaatagtaaaacattttatgacatatctatatgatggactattatagggccatgaagtactggtattttgaaaagcaatattacataaatggggaaagtgtttctatttaaaataagaacacattttaaattgtatagtatattcctaagtttgtttttagaaaggatttgtatcaatctttagaacataatccactaatattttgactgtggtttcctcaggatattgaatcttgattgatttttattttcccccttttttacttttctgtattatcaagttctctatgacttacctctattactttgtaaatagaaaacattactcaaggacaaagtggtcatgtaggcctgttatagaaacccctgtttaccaggcctctggtttaataaaatgcgactagagtgactccatattgaagtgagcaggcaggcattcacaaagcgtgtttaaggttaatgctaatggtctgaaaatagccaaattctaagctgaccaccacttataattatgtaatatttatggccatacagagcatctcccagcaagcctgtacaatgtccggatatcttaagagtacagccaattttacttaaagataacatcggttagcaggcttagggtaaaagattcatggtcattgataacaccaatagcccttacctttggtaagcacatctacacattccaagtgtagagctccttctaatttcttgcaagtagacacactcacaaaggatggcatgctcctcctcctgctgaggatgccctactctgtaacaaagtagtttccaataaacttgcttctttcgctgtcctctgtgactctccttgaattatttcctgcgtgagatccaagaatccactctaggtgtctggatcaggaccctcttttccagcaacaagcctagatgacctctaagggcccttagagggctgacattctatggctcagcaaagaaagtttacagaataacctgtttataatctcaaaaccccctgcccatgctgagaggctgggagggattggggtggggcattcagcccctggagccggtcctgacctgaaccacttagagcagctgatgaagattgggcctctgaatcttgccagagaaaaaggacagttagaatggtctaaaacaggggcttcttatttattcctgatcacaatttgggacaaataaaatatttcacttccaatgaacatataaaggactgtacaatcttgctagtaatctaaagaaagcaaatttaaaaacagatgaaagagttttcacctagccaaaagacacatatttccaaatttaagagtgttaagaattggtgattatgtgtgaaattaaccagtctcctctaccagcagtgagtacaagaattggtatcggtattctggtaaaaggtgtgaaatatataccaaaatcttaaaaatgtagaaaccttttgccctagaattttggcttggaggtccagtctttattctagggaaataacaaaaagtgtgcaaacattcgtaaaccaaaaataaaattttaaggtcctcccaaccatctgaatggatcccttctctcaccagggcattccaaaagtaacctgaaaaactggttcaggtcatgatggaaagaggggtccagatatgcctcattatgccctcctcccttttggatttcaggaaaagctgaccagcatttaacgtcaacacaaaccttaagtctgataagaaacatctacaatctattctctctgaagcctgcttcctggaggcttcatctgcatcataaaacttcagtctccacaacctcttattataaccccaacatccctttctatagattataactctttcaaccaattgccaatcagaaaatgtttaaatctacctataacctggcagccccctcttcaagttgtcccacctttctggactgaaccaagccatctcttaaatgtatttgattgatgtctcccaaaaatgtataaaaccaagatgtgccctgaccaccttgggcacatattctcaaggtctcctgagggctgcatcatgggccattggtcactcatatttggcttagaataaatatcttcaaatattttacagagtttgactcttttcatcaacctattttatgcaaagaatatttaatgaggcactgtttatggaacctgagtttcctgagctcttaccagcctggggctccaaattagccacataaaatttgacttacaaatgtttagagtccctacctacatacctttcagacccctacaaatatttctgggggatttgcagggagtccccatgtgctcaagccctctttttttgctcttacctagttttcctgtcccaaagccacatacacagggagatggactgatatctatgtaagcccctcctgacccctcctcactctctagctggctctgccctggaaactgatcactggggactgcagcaacaagctctttgtctgtctaccagttggattcaaccaaaggagatcaggtgtctgcagaagggtctgtacgccaaaaatagaatgctaagccgcttgattgactgaatggatcccacctcttggccaaggggatttcaaagaaacctgaaaaactagttcaggccataatggggaggggatgttggacatgcctcttaataaaataccttcctccctttggtattcaggcacaacttaccagcattaacattaaaacagaggtcttaagatgacaaacagactctttgtagtaataaataccaaattccaacctgactgtagtatagcatcacatgacagatagcaggctctgaaagaaacaagtattttaaccccaaactatatttatttgacatattttgaaatagtcctgcaaagttgtcatttgtggggaaaatctacattctgcagagactccccttccctttctaagtctttttctcatcccagagagatttaactaagagtctaatcagaccttctaaggtctggtaagagacatttatcatttattctttctgaagcctgctacctggaggcttcatctatataataataaccttagtttccataaccccccttcgtggttctttctgttgacttcaactctttaggcaaaacttaattatttcaaccaattgctattcaggaaatctttgaatccacctttgaatctttgaatccaccaggaaatctttgaatccatccccatttgagatgtcctgcctttctgggctgaaccaatgtaaatcttatgtgtattcattgatgtctgcctgtagcttctgtctccttaacatttataaaatcaagctgtaattcaaccaccatggacacatgttctcagaactttctgaagccttgtcacaggtcatggtcctcacatttggctcagaacaaatctcttcaaataatttgcagagtttggctttttcatcaacacattccaggagagtgagcatagcagtccattccccagttccttccctgagggtctccccaggctgggagcatcccctctcaagaagattctcctgctgatcctggacagagctcccttccctcagccctcaaccaacattgcgagcccctaggtcactgttccctgtggtttcctataacctgtccacaccttcattcctaatacctcctcaggtttcccagttgaagtgtatcctctaaagtggtgtgctggcaaaacagctctccaaaaagacaaaagccctgatgtgtattgtttgtagatttccacagtatagctactcccatcactgtggtggattttcagctcctgatggttgaacacttggcttgcaaaggctctcacggtgccagtgtgagccagctgcagcacacctagggacaccgattcacacaggagtctacctttgctgcagctattttagatgataatgatggccattatctgtcagggccactgcccaaggccacagctaagcagaagtggaaacaccctcttcgtaggtcccaaagtggcatttcttgtgttctgagtcccacaagccctaacaacagctttctctctcttgctctctctcactcactaaggctcaagtcaggcctgggacagggttgagcaattgccaacctgtcaccatctcccacttctatgatgttgccatctctatccacctgttctggtccccaaactttgtgcttatagatacagtctcccttatacctgtccattcatgaaaaatgacatctgggcatgggtgtggttcaggggtagagaataaaacaggtctgcccatagcagaggcggactctgccttccgctaaacacaaacaagcatgcagggaagcaagtacccttcttaaatatctgacaacatggctttgatgaaatctatcccgacttagccataacctagaaaactgtatagcctttctagaaaaatgtttttgaaatgctcagcatcactaatcatcagagaaatgcaaattaaaccacaatgagatgtcacctcgtaccagtcagaatagctattactaaaaagtaaaaaaataacagatgctggcaaggctgcagagaaaagggaatgcttttacactgttggtggaaatataaattaatttagcccctgtggaaagcactttggagatttcttaaataactaaaaatagaaccatcatttgacccagcaatcccactgctggatgcatacacaaaggaaaataaagtattctaccataaagagacctgcacttgtacatttattgccgcactattcacaatagcaaaggtgtggaaacaaccttggtgcccaacaacagcagattagataaagacagtgtgctacgtatacaccttggaatattacacagccataacaaaggatgaaatcatgtcctttacagcaagatggatacagctggaggccattatgctaagcaaattaatgcggaaacagaaaaccaaatatcacatgttctcacttctaagtgggagctaatccccgggtagacacagacataaagacaggaataatagatactggggactccaaaaggaaggagggagtggggcaaaggctgaaaatcttctttttgggtactatgttcactctatcagtgatgggatcaatagaagctcaaacgtcagcatcacgcattacaccctcacaacaaacctgcacgtgtatcccccgaatctataattaaaattcaagaaagaaaagtgttttatgtacaactgtgaaactataatatatcaatttaaagaagaaaaatgtttcatggcatgggaaaatgattataatattctgttatgtaaaaaagcgagagattttttttcccgaaaaccaaagcacgatgacaacaaaaccgcaagatctttgtttattcctcctggcgctagagatgcggcagtgaataagaacggttccagtccctgattttagagagcttacccttgggttaggagacatgttaatggaggatgcacatgaataaatgttaaattacaggcggaggaagtgttctgcagaagaggcatgcggtgctcccagcatgcggaagcagagcttccgcctggcccaggaggcgcggagagtggctaaggggctgggggcgagggaaggccccagcggggagtcctgtggaagaggaagagctggccaggaggcaaggacagaggagacatgtgccatggaaggagagggcacatgcttcctttatgtgtgttgaaaaggccaccaccactcttacagcaactctctctgagcagtgaggctaacactgtacctcatcttctccctgcacttccacatcatgccactttcccacagagctgggatgatttgcactaaggaaaaagcatttttttaaaaaaaccaaccttaccacacagacagacagcagggctgtttatttatttatgctcctctttgtctcaaagaggattttcaaggtgcttacaattatgttaacagcatggcaggataaaggaagaaaaatcaggccaagggaaaatatggtgaaaagagtcagaggaaaaaggagtgagtatcaccctacacagcagggaacaactttaccatgttttttgtcgtgtcttgttgtgtgaccatttaattgtaatatcggcatttacttttgctgttgttatactttgtcatctcaactctactaaaaaacctcccaccgttatttcctctgccttttattactgtctctcatttaaaacacatctttcactttctgttctgtatttttgtagttgaggaaatctggcatcgcttttctgcagtgaagggaccgtgtctgagtcacctcggcacagtggtgtatccagagcctctgcatagcaagtgctgggatgtctgtgaacgcacagcttcgctaggactgagagtgactaacacccatccctgcagcactcagagaggcacacacaggggctcaagactcagttgccaatttgatttatgggacttattatcccaagtgtcagcagagaggagatattgattcagaaagacttaaataaacaagcaggtgcataatccagagaggggtacagactgagctgagggtgtctggaaagcagtggaagcagacatcatgaagaaacctggggtctcttgaaaactgctcccaagggagtcatggggtgacagaggggcagggacgggctgtggagtcagcgggcacaggtgcactccaggctccatcacatcacacgctaggggcgtgaccttgggaaaatcactttgccttgtgcttttacagaaagaacaaggccttttgtgggggattgtggagaggaatgtccatgtgtatgtgtatgtgtatgtattgcatatctatgtggtcattccctggtacatagtaggtgcttcataaacaaaaataccctcccatatcactgcccttctattccatttgtgccatagtgtgtgacctaagagtagataaagcactttttttgtttgtttgttttggtttagatggagtctcactctgtcgcccaggctggagtacagtggctcaatctcagctcactgcgacctccgcctcctggattcaagtgattttcatgcctcggcttcccagaatagctgggattataggcacctgccatcgtgcccagctaatttttgtatttttagtagaaacggggtttcgccatgttggccaggctggtctcgaactactggcctcaaatgaaccgcctgccttggtctcgaaaagtgctaggattacaggcatgagccaccatgccctacctagataaagcatttctaaactctcctgtaacactccatatagcaatctcaggtgttttaattctcactggtttaatcctaccactatcaccagcaactgtaacagtccccctttgaaatcacttgcaagtgtgttccagttactatgactgcataacaaattaccccaaaacgcaggggcatgaaacattagtttttttcttctcgtggattttgtggctctggaattcagagagagcacagagcaggtgggctgtctctgctccacattctctgaggcctcagctgggaggctggcaggctgggggctggaactgtctgcaggcttgttctctcccatgcccggtgagatttgctagctgttggctgagatctgagctgaggctgtcagctggagcacggggcctcggcttcctacaacatggtggctggttcccaggtacatgtcccgagagcgtgtggggggaactcgagcccccgtctatgacttagccttgaacatcgtgctgtgtccttctaccatattctactattgaggcccttacgaagctccacccagggtgaaggggaagagacatcaatgcccctcttgatggtggagtgttgatgccacactgtgaaaagggcacatggaatgggaagtatttggtgtgaccatctttggaaaggacaatctccatactatgtgtcaggtagcttaggtgatctctcattcctcaaaaacactgaggggctaggtataattatctctattttagagacagacaaactgaagcttagagaggcaaagtaacttgcttgggcaatttatttcacctctctgaggctcagttactccctctatcaaatgggtagaaaaatctccacctcagtggtctattgtgagcctattgtgctagtaccttaagaagctgttggaagagtcagagaagatattttgtgatctctgacaccccgtactaatgcaaaccgtcaatatttattgttgcagcattgttattttcttgccctccacctgtagccatctgtcacacacaaccccgcagccagcaaaggacctgggttttcacccacaaaccctcgaggacagggcttgtcaatgccttttggttgtggctcatttagggggagcagaagaccccacggccccccttccctgtttgttcccaccttcccttgggaagaatgctaaagtttgtttatgatttccaaataatatgtagcccttaataacttattcagagtatcacgagcaaggagcccttcggttatactcataaatggcagcctgttgcactgtgtatctctcccccagggaagcaggaggggggcctggcatttctggattagccccaggaggacttttcctgcttctgagtggacagaggatcatccttggaaaattgctcttctgagattgaattccagatcctacatccctctgtcaatctgcctgcaaggtctgaagctggtcttagaccctctggtgctatggtgcccattaaacagacactgtagtctcctgttaataagattcaattaggaaaggggtggagaagggcactcaccgcctgagagtgtgtcagggaggcctgagtggctgccttcatttcgcgcctgctggaggcaggagggaggaaggtggtgagctcgctcagcagggaaggccaggctgcacccacctccctgggggctggggaaactcagggtgacctccagagcctcaggtggcagcttactgtatgatcgaggtgatttttaatgtctcagagcagccccagggtcatcagagacagaccaagctgtgccatctggaagggccagcttcgaatctagttctggcccctagggttgcaccagtgacttcaagcctccaagtctcagtttcaggttctttgattcttgggtcaagtgaagggtggagataagctgccttctaccaccacgcctgatacttaggaaagccccaatatctgggattgtttttgttgttttgttgaaaatatatatatatatatatatatttgttttttttttttgagacggggtctcgctctgttcaggctagagtgcagtggcacaatcttgactcactgcaacctccgcctcccaggttcaagcgattctcctgcctcagcctcccaagtagctgggaccacaggcatgcaccactatgcccgactaatttttgtatttttagtagagatggggtttcgccatgttgcccaggatggtctcaaactcctgggcttgagcaatccatctaccttggcatcccaaagtgctgggattatgggcgtgggccactgtgcctgccctttgttgctgatttttaatccttacttccactttacagatgaagaagcagagatctaaaagcatgttttttgcctgcaaatgctgacattcacttgtcttattgctaggaagaaatctctgtactttcgcggtctctgggagggcccctggtgagcagactgtccctggacctggttggaagcagttgtggagctctcactactcccagcttcagctcagttggtccttaaaaagtcagttctctccccttgccataaatccccaccgtctctaactcccatcactaccctaaagcaaagtaggttttaaaaatgccagtaacacaagtgagaaaactgaggtcatttaacgataagtttgggagtaaaaccaaaaacaaaaaaggaaactgaggcccagagaggtgccataacttgctcagggtcacacagcacgtaagtgccaaaggcagggagctgtagctgctccagcgtggatatgccagggactagtgacaagcccaacccctccagcccaactccacccttcctcatgccaacaaaaggagaatcatttcctatttctggcatctttgccagcccacagagacagagagaagaagaaatatttccaaatataccaggctgatctttcgtagtttctcagtcttgctgtctgttgttgtttgaaatctgtttcccacgagactctgggaagatggaggtgcagggcttgggtaacagctgccttcctcagggctgggtacctgctctccgagtctgtgtctccaggctgtgtgctcagacttgaccatgtttgggcatggaggcttgccccagatggggaccaaaagctgcttccctggagacgggcggggaggccaaacttcctgctgaagctctgtggcctcttttggggtgggggcgggggtccaggcagaaagaaactgtctgctgctcaagacccacaggacgccgggaagactgtgagtaccgggcctgaaagcacttgggaagtgatttctctgaagaccgggctggagggagacaggggaaagcagcctgccacggggcagggagggaggcaggcaggaggactcccttcctctcggggctgtccttctggatggagggcccgtggtctggtggccagtggggagggtggcacagtggccaggttactctggtagtaagcgccctggccctctaggtcccagttctcagagtggccagaaggctgcagcctggagattaacaccaatgctggcacttgtcaccggtagagaggtgggacaaaaatagattcatcaagaggggtccagacttctgctccaaactttcagggtttccttcgttagtagtaatagctaatatttactgggggctgatttggggctaggtgctatgatacatgtctgatactcaatatggcatttgatctttagctgaactctctgaggcaggtaccatggttctcgtttcacagtcatgtggttgctaagtgtaagtggcagagccaggatttgattccatgtctgaggacctcagaatcgccctgtccacaccccaccaaactgttcaacaatgtactctattccttgtccttctaaggaaaaggatgtcgacccagctatcaggtcacccaggacactccaaagtcctgccttcctttgtccttctccatcttctctgaatctatcccagatctcaagtgacctttctaaatgggaagatatatcctggaacttcagagatatttagaaatgctcaaaactgggaagttcttcttacagtctaactgaaatccctcctatgatagctgaaacccacttcttccttttctttctgtcccttgggggatattgacagttcccatccttcctcccgccaaaggttctccctttggatgctgaatactaacttcttgctgaagtcatatctacactgaaccccacgcatggtcttaggaggatttatcatgactctataaactcactcagtgcaggcaacaatctcatcagaccattagagacgggtcagacctgaataagccaagtttccagacttctctgtgacagggaagcctctcctttcctttccttctgagctcctaaaactggtaaaaccaggttcctgccttcaccagcctcaggagtgcccaggggcctgagagggcactagaagccaaatagcagaggaggccatggccctgggcgctggggggggctgattagccaggaaggagccacaggaagcccccacaggtgcgatccagttcccccaggagagaaatggctttgttgtgggcactcagccctaggcttccaagatgggatttcccattggcttcaaatgatttatgtctcacagtatctggggtggggccaagtgccagtgacccttgcaggtcctggggaagcaggctgttggggcttttagcttacctccaggtgattctgttgctttacctgtgaatacatggagagtcttgttcaactgacgccaggtagaaaaaggcatgggctctcccattcccacaagatcacagaacaggaggaaaaggattgaataaaaagagttgaataaaacatctctctttgtcgggggcaatttctgcttgcttgtgcttttataatgtctccattagaatgcaggagaaactcacctcctggtgccaaataaaggagaaaaagttgtcattggatgtcacctctgccgatcgataggggaggtggaccagctcactgggaaggtgtgatgggtatccgtggtgcctgaccctggtctcttccctttagcggagatgcccgggtatgagggcagcctggctaaggggagggagtcaagaatctctgaatatttgaaacagtctagtagttaagagacgcctgagcagaaaatagagcactttgcagaaaatctctttggactaaggcctgtcacccggacactggctaattaaacaaacaaaaaccataatatgtttattactttagggacctggcaaggagaataaagtccccctgatatctggctaaaatttcccctaaattcccctaaaatttcccctaaaatggaggattacattgatagcttcctggtatttttggtagaaatggactctggttactttaaacaaataaaaacaacagcaaataaatttaccagaggctctaggacagcttgcggaaccatgggaaatcacgcggggaccatggctgggcatctctgtggctccaggcggcatagattgaggggctgtttcttgaagtctttgtcaagactcacactcctgggggagcgatcaggagcctagcaggggagggtggaatctttgcttgcattggggtggagtcaatgtccaggggaaaaacaaggagttgctgcctaaagaaagaggagagaaggaaagcaaccaccagcagaatgtgcccattctgctttgtcccaggtggcttcaagccctgaaataagaaagcagtcgctgaggccaccatgatgccttctttcttctttctttgcttgaagtaggggaatgttccttacaaaaaaaaaaaacaccggaatatggtaaacctcctgcctctcctgacaacctgcagctgccttctggggccctcctctcctttccctgcctgtgcccggcccagctagccctgccacagaactgtttctgggcagaaatactccaagtatccctgtgagataagtgccgtggaaggaggtgcatggatgatgcacatgtactgctcgctcaccgcatgggacctatgactgttgtagcaaatgatcataaacctgacggcctcaaacgacagaaatttcaccagaagtccaaaatcaccaaggtgtctgcaggctgcactccctgcagtggccgtgggggatgagccattgttccttgcccccgccagcttctgacgcactccttggcctgtggtcacatcactctaattgctgtctccctggtcatatcaccttagctttctcatctgtttaatctcccttcacttccctcttattaggacccttgggattacatttaggagctacatggataatccaatattgtctccccatttcaagagcctttatctttttttgttttttgtttttttttttgacggagtcttgctttgttgcccaggctggagtgcagtggcgcatctctgctcactgcaagctccgcctcctgggttcatgccattctcctgcctcagcctcccctgtagctgggactactggctcccacgaccacacccggctaattttttgtattttttttttttagtagagatggggtttcaccatgttagccaggatggtcttgatctcctgacctcatgatccgcccacctcggtctccgaaagtgctgggatttcaggcatgagccaccgcacctggccttcaagagcctttatcttaatcatttctgcaaagtcattgccacataaagtaacattgatagcttccagagactagaacatagacatcttggggggccattactgagcctattacatactgtgtgacctagggcaagtcactttacctctctgagccgtaggtcttttatctgcaattgcctctcaattgcacagggaaggcttacatggggtccaaaaagcaagacttctggaagttgcaaagctccaaatataaacaagagtgatattaatagttgagtaccttcccctctcacctgtcctctctttctgtggatcacctgtgaactgggctgatctcacttctgtttgcttctgtggacctagaaatgatcactgcccccagtgaatatggtgaagaagctggtgatggcccagaagcggggagagacacgagccctttgcctgggtgtaaccatggtggtgtgtgccgtcatcacctactacatcctggtcacgactgtgctgcccctctaccagaaaaggtactgagctctcccggcctgcccaccccccaaccctctcctaagggtctggcatctgtaaggaaccctggccttctactcacccctctccttgaccctcattcaaggcagcagggtcaagacgatgctcattcttaggttctagggttcaagtgcagggaaggtaggatgaactgagccccactggtctgagattctaggacctggtggtaacagacacatgatctaggacgtggtggtaacagacacatgatgcccttctcagaagaaatagcaaagaatcagagcaaaggttccagtgcaagtttgatcccaggaggaatcagagaattgcagatgtttacagctcagctgcataattctctcccctctgaagcctccctgtcaggtgggcatccagcctcctgatgaatacctcaagagacggggagctccttgcctcactgaacatacatttcatgtttgaggttttctgatgtgtctgcattgagccagcatctgcttccctgaagttctgctcaggaatctcagagaatggtccatgcccttgctccatgacatatcaaccacttgagattttaaggaaaagctgtgaattcctaattcgtgttctatttggaacaaagacactcagttcccccagcctgtccttaggataagtctcagacctgtgctctgggcacgttccagcagctgacagcccccttctgactggcaatgggtctcccacaggatacttgggagttgaagcacaactgatttactaatatgttgatgaacctgttagcctctcccgggcctgctgcagcctcactcttcacaacgctgaagcgattccaggctggactcttaatctggtgaagcaccatctagagactgtccccaccatctttcccatcctggctcaactcaaaccccttctacatctgctccttttaggggaaagaacacagctctccaacccactcagacctagcttcaggtcctgcaaggtctcagcaaagtcacttgacctttctgagtttctcttctgcctctgcaaaatgaagacgatatggataagaaagtctcaggtttggctgctcgtcagaatcacatcagggagctttgaaaaaacacccagggcctgggccaaaccacccaagaagttctgattcacttgctctggggtgtagcttggacacgggaatctttttagaagctccccaggttgttgcaagagtagccaaggttgagaaccagtcatatagataatgtctaagaccccatccagcttctacaattcctccctgtgtccggggactgtggggtcatgtgcctttattgctggatgctgaagacaagatgaggatcccagtcctggatccctctagaggctcccaggggataatgggttcaaatgggtgttctgtgtgtcacccagttctgagatgtgtatgtgtgcatgtgtgtggtctcctcagcgtgtggacccaggaatccaagtgccacctgattgagaccaacatcagggaccaggaggagctgaagggcaagaaggtgccccagtacccatgcctgtgggtcaacgtgtcagctgccggcaggtgggctgtgctgtaccacacggaggacactcgggaccagaaccagcaggtactgaactggagggatggggacacatccctttatccctgtcaggtgtgtgagcctgttcctaactgtccctgtccccgaggctgagaaagatcaacccacttgaccaggtctcacagctggaatgagactgagccagccctagctcttctgtgttggagtcacacagacctgggtttgaatctgccgctaactggctgtgtaaacataggcaggccacttagcctctcacctcctcagtttccacccttgtaaagtggaatgctaatgctgcaccttgaagagctgttatcaagtcagagacgctgtatataaagtgccacgcttgatgctgagtggatagtgggcactcaaacaaaagcagtgattagtgttagtactttcattctacaacctcagtcaaatgagggaccaggcccagggccagatcctcaaagtggaatcccggtgactccccaggaaaccagggactcagggctggagtaacctccataaacaaacatttagatggtttttccatccttgcatcccaacatcccaccctccccctccaaaacacaaaactcaccaccatatcctttcctaaagcgatcagttggcccatattctgtctctcttccttccttctttctttccttcttttttccctttcttccctccttctttcttttcttttttttcccctccctccttccctccctctctccctcccttccttccttccttccttccttccttgtttccttctttcctcctctcatttatttattcaacagccattgagcacctcctgtgtcaagcctgtaggactcaagaggagagagctcatgcatgaacagtgcctagcagggaagaattggcaccggggagaagaacagaggaagttacaggggttagaggagggggatgttttccagctgacaatgatgggggtatcagaaaggctcttggtgagattgcaccattgcactccagcctggcaacaagagtgaaactccatctcaaaaaaaaaaaaaaaaaaaagaaaggctcttggattaggcttttaacatcaggcaggcgcaggatgcaaggcatagagaatgaggtgatataggaagcgggtatgcctataggacgaggcatggcggagggaagggctaggtggagacagggatcagagggctgactacagaaaatgacccatgatggggtgtatgcagctggaaaaggctgtcagggcagactaaggtctgttcccagaggcctttgatcaccacaatatggaattaaaatgtgagtgtgtatgtctcaagatatgtcaactttggctatgcattagaaccctgtaagagtcttaaaaaacaaaactagggtccaacactagacatatcaaggtggaatctctggtcagagatccattcatggagctcccaaggtgattctaaggttggaaattattgctgttggcaatgggaatctttagggcatgatcagagtttcagagttgggctgggaagatggagcctacaggtgtgtgggtccagttactagacagaggagccaaggccgcagcaagcactcacgaccaagatgtggcctgcagcaggggagatgctgacagtccggacttgatggctgatgggacgggaaggggcagggtgcctgggatggggcgtggaggctgggggatcttgagagtgctgaaggtcaatgagaagtgggtctgggcagtgcaggatggtcaggtgttctgtcatcgctagtatgactcggccccacccggtggagagaggtctcagggcccactggaggcagctcctacccatgacccctgcctctgcgttggcattcagtagcccttgatttatcccaatgcaagaaacaaattttcaataactggtaacattctccgggagtgatatgggccagagcaggctggttttcaggctgcctccctggtcctgagattgccagctcagaggagcatcccctgaatgaactgtcagcaggatgtgaaggaaggacatgctggagccactgctgtcctctcccctgccgcccaggcttgaccaggtgtggtgctgatagcaggctgcaggagctgggaggaagcagtggaaatgcccttcgtgtttttgccaagcagctgggttgtgggctagctgctccttccgcctatgtccatcataggggttcaagtggctggggctccaggctagctgggtgtcctctggaatcactgtgaagggccaagaagactctcatcccaccctccaactctgaaggtaggggccatagtctgccctcagcttttcctgtgagtcttagcctggagcaggtgagttctaaattccctcccattgtctgtcctggggaccttacactgcagggcttgggaaaaagctggttggtttcagatcattcagataactcaggcttagctggacccaggacaggagagaaaggatgcattcaggccccggcttctgggtttggccatgaagagtgaattcctgcccagtgtcttgccaaacaggcccagcataaaagatccagaggaaccctgagcaggcagaggatacactaggcccaggatggacagaagcctctacttcagagctcatccatagacctctttttaagaaggtaaagaaggagctgttgttgcaatttcatagataagtcaaaacatattattattaataatagcatcttccacttttttgagttcttatcgtgtgctgggcttctgtgctcagtgctttacatgcatcatctcatttaatccccatgacagttctcctaggcaggtagcctcacaaacccattttacaaggcccagtgaggttgtggcagttgccaaggtcacacagctcagaactcaggcctgtctgactccatagccacactgctatttaaggagctaggttagccaaggtcacagtcagaggcattggagagactcaggccaggccccctcaccgtcagctcaggatgctggattatatgctactgaggacctggcagtgtccaacagctctgaatgccagattcctgaggagccagcgtctccccagcctcagctactccctggctggctggggccctagatctgagtgcagcatctgcatttcccaggctgtgagaactacagtgcaaccctcctctgtgttgctggagtgaatgccctcagggcaggcagcttccagggtggcacctcatataaatccagggagtggccgaggcctgcaaggaatctggctcaacacctgccatttgggtctcagttttacacattttgatcttgcacatgatttcactagggcaaaattaagtgcatgaaggaatcacacattcctgggtctcgccctcagtgatgcagagtgggtagggacctgggctatgggggccctgtaggtattctgctgcagatgggggcaccacacttgcagctcagaacagagataaaaccagataaaactccgctttatgactgctttgcatcactttccagctggcctcatctgaacagggcagaaagttcctaataacaataatcaacgtcagaattaaatgtgtgtcatgctctgctggcacaaaactcttttcaatgcattctttctttcctttggatcccagtgtcaaatacccgcttgccaacatagtttgtttgctgtacacaggttgaaactgcaaaggttttcaattttaaatttagctaatattttactttttttttttttttgaaatgggatctcgctttgttgccttacctggagtgtagttgcgagatcatagctcactgcagcctccaactcctgggctcaggtgatcctcccacctcagtctcctgtgtagctgggactacaggtacaccaccatgcccacctggataatttttaactttttttgtagagataaagtcttgctatgttgcctaggctagtctcgaactcctgggctcaagggatccttccccttcggcttcccaaagtgttaggattacaggtgtgatctggtttctaacttctcttaaagtgttggaggtctggctattatagatcttctggatggcctgacatccattgcctggagggagtggtgactgcctgtctggaggcagctggctctctccctattgacaggccctgccacaccctggcaattcttcctggcaccaaggcaagagtcagtgggcacctgtcatctcattgctttgcctgcttcaccctctgacaataccttcatgagccctgtaggcaattgagcacatgatctcgatttcaaatacacagcccacttggcctgtgtccctccctggtttccttagatagctctgtgtgaagtccttctttcataatatcctttgaaaccgatattcacccatttaagtgatgaagcttcagggctcagaaagagtgagaaatttgccaaaaattctacagccaatccaagcagagccaggactccaaggtaggacctgcgcccaggtgtgtagcctgtaccccgagcagctccagcaccgccatccacacacaagacacaaatgagagcgtgctctccagacctgtacagcgcatggcctgccaagctttagaccaaagccccgactccaatccaggggcccgactacaaagctggtatttttctttactccatatcaagcccttggctaagaaatggggatttccaagcccacagctgctcttgtttctccccacagtgctcctacatcccaggcagcgtggacaattaccagacggcccgggccgacgtggagaaggtcagagccaaattccaagagcagcaggtcttctactgcttctccgcacctcgggggaacgaaaccagcgtcctattccagcgcctctacgggccccaggccctcctcttctccctcttctggcccaccttcctgctgaccggtggcctcctcattatcgccatggtgaagagcaaccagtacctgtccatcctggcggcccagaagtagagccatccatccatgccataccacttgtcagggcacaggggactggctgggcccccagggctgctccccacttgcagcacaatgccttctccacctgccctcccactcttccagtccaatccacgctgtcttctgttgcaggactaacctttgagaaatccttttgtgaagtcattgcctgctcaagaatgtacagtggctccccaatgccttggaggccataaggccagccagttctagctctctattacctgtccccactcaactgactcatacctgtttccggctgcatcactatgtgccccacagagaacgatgatcgtcacctctgtgcctgagttctccctgttgtctcaaagcggtacccatcctcccccagaagctgtccccagcgagcctcccttctttgtttgaattctctaataagagcaacagcagctcccatttctagaacacatttacagtattactattttctaggatataaagtgccatatatatttttaattccaatattaataaatgtatgccaaacaacaatcagctgcaaggaaacacatgagaactcatcaaaattttagcggtgggatggtggttaatttctgttttcttccttatcccctttttatttttgctgcttttctaaatttttgattataggaagggtgtgtttcgtttgcttttaatcagaaaagccatggtagatgccattttggaaaagttgaaagagtgtgtccccctcacagaaaaagatggaagtgggtctggggacggagttgggttccagtcagagacaggccattcagaacacacaatcttaaaaacccctctgggccgggcgcggtggctcactcctgtaatcccagcactttgggaggccgaggctggtggatcacgaggtcaggagatcaagaccatcctggctaacatggtgaaaccccgtctctactaaaaatacaaaaaattagccaggcgtggtggtgggcacctgtggtcccagctactcaggaggctgaggcaggagaatggcgtgaacccggggttcggagcttgcagtgagccgagattgtgccactgcactccagcctggtgatagaacaagactccgtctcaaaaaaaaaacaaaaaacaaaaaatgaaaaacaaccctctggaggaaaggtcatgatatagaggaggatttgttatttaaattgagggtatggactctggcactgagcctgctggggaagcctatctcagatttgaaaagggcaaaatgggaagaagccatcacctttaccattcccactccaggaagttttcctagaacgatgactgtccaagtgtggtccctgggccagcagcatcaggatcctgtggcagcttgtgagaaatgcacactctcaggcccctgtcccagccccaccacgccagaagccctgcacggggtgggggtagcaatgttctgtgttctaacaatgcgtaggggattctgtggcacacctcgagccagagaactaccggtgtaggaagtgagcgtcctgtcgcgaggattttcagagcaggtgagtgaccattcggcagggccagtcctgagctgggtgtgaagttaggctggtgtctgaagtttcttccagtgttgtgagtccaagatgcagatcttgggtttgaatcctgtctctactctgcccgatttcatctctttgattcttagttttttcatctataaaagaaggactctttctggatagttgggagggctgaaggaatgtttgacacatcataggtgtttaaaatggcaactatagttttttttgtttgttttgtgtgtgtgtttttttcttaactttcattttaagttgcagggtacacgttcaggtttgttacataggtacacttgtgtcaagggagtttgttgtgcagattatttcatcacccaggtattaagtctagtacccattattaaagaaaatgtggtacgtatacgtcatggaatattatgcagccataaaaaggaaggagatcatgtcctttgcagggacatggatggagctggaggccaaatattatccttagcaaactaacacagggacacaaaactaaatactgtatattctcacttataagtgggagctaaatgatgaaaacacatggacacaaagaggggaacaacacacactgaggcctattggagggcgggaggtaggaggagggagaggatcagggaaaaagagctattgttagtaacaagaaaaagtcggccgggcgtggtggctcacacctgtaatcccagcactttgggaggccgaggtgggcagatcacgaggtcaggagatcgagaccatcctggctaacacggtgaaaccctgtctctactaaaaaatagaaaaaatcatagccgggcgtggtggtagccgcctgtagtcccagctgctcaggaggctgaggcagaagaatggcgtgaacccgggaggcggagcttgcagtgagccgagatcgcgccacggcactccagcctgggtaacagagcaagactctgtctcaaaaaaaaaaaaaaaaaaaaaaaaaaaagaataagtcatgaatactcagaaacttccagaagttatactgacaatgttatctggcatgtatgggtgcttatttattctgtgccaggcactgtactaattagtttgccttggaaaaaaaaatgagatactcctgaacctgcctcacagatgatgagaagcaacagaggacagtggctaagtatgtggacttgggatgtgcactgtttgggttcaaattccagctgtgctgttcacaagctgggtgactttggacgaataacctttctgtgcctgtttcctcgtttgcaaaacgaaactgataatagtatctttccatagagttttggcatgaaacaaatttttatgtaaatttcctaggatagtgacatatggtaagtgctatctaagttactatgaaaaactgaggctgtaagaggtaactggccaaggccatctgtaaagtgaggggctaggactcaagcctggagctgtgtgttccagtacctggcatctcaaccacagaactcagcagagccagctgtgaagggctgagggacagagccagctgtgaagggctgaggggcagagccagctgtgaagggctgaggggcagagccagctgtgaagggctgagggacacagccactcaaagccacaggggccaggcagggagctgcgttgcatccctggaacccaggtgccctcatgcaggttggagttctgaggggaggccctggcatctgcaccagcatctgccaattccagccagggagcccagaggtatccctgtggcctccagtttcttacctggtggaccttccttccaaaggcaggcagctcatcattccctggaattttttccttctggggtcagggaagtctcaaaggtcctcatgtgagtcttttaagaaagtcttaattgtaatattgtactatagttttgcaaaatattaaatattaccattggggacattaggtagagggggcacggaatgtctctgtattatttcgtaaagcttcatgtgaatctacaattatctcaaaaatttaagttaaaaaaggaagaaaaataagaaaggaagtcccaacttggagtctgatttaaagggtctattttgtcaatggtttccatgcacctgaatttgggactaaaatacacagaaactcagaatacccaaacaatccctgcaggggaaaaggccatgttcctctagaaaaattagtatgtgaggatgcctaacccccactgtcccataaattattaatgatgaccttcatttgcttgagatagatgttctcctcctgtcaataaagactggccttctagcaaatgccacaactgtctgctgctcacagaactttatgcacgggataagcatgaaataatgggaatttaggcatgatggagttagaccctgtgcctacgtgtttttttgcaataatatctgcctgggagcagagaaccttcatcagttcttaataaaccactctgctaatgagtgtctagtgcttccatcatttattattgtcctctcatggactagtgactcatacctggagaggtgcacctggatggttctcccatgtgccgtcctccagaactcagacaaagcggtggaattcagaggcaaggggccacctgagctccagaactggggtggaaagaaccctgggggacatcctaacagtgccaggtctcagacagagcttcagctcatcagtccaagctgcaaccagaggaggaaagaaatgagggtttcttctatttatgaagatctcagaggactggaatttcacttcacttttatgatgtatctatttgcttgcctgcaaggaacttggtgtcttcttgccattctccctccctacccctcactaatcattgtgaggggcttccttcttcacagtgaagactcagcattatgcagatttaaaataatgcaatataaatattaatataatcttattttctgtgacttactgaagtgataccagctcctcctctaaatcaacaactcatccaaaatttatcttaaactccttgggtcagggcattgcaaactgcatttattttattgttcattggcagcacaggctgttatgtgagaatatccagtattctttgaattggtcttgtgtttgggggagtttgaattctatgaaatatttaagaagacactgtttgagcaaagtgccaccttcctgtacctcaccagccattgccctgtcacatggaagggaaagaaaatgaccaaagaaagatcagagagacatggagaaattcactacagtccagtgtagcagttctcaaagtggaggcttgcaaagtcaaaactctgttcataataatactaagacattatttgcctttttcattttcattctcttatgagagtgcaatggaatgttccagaggtcatgtaacatgcattgttaaaacagtctgaatgccgaggtagcaatgagattctaggtgcctttctaaagctggacattagagatttgtgaaaaatgtaaaacaataccacttctcccaatatactttttgccacgcataattgtttttcaaaaaaatatgttatttttgttagcaactaatggatgtattattattttaaaataagtaaattcaaattaaatatttttaccattcttagttctaatctctaaaatggtaactgttaatagatataacccatatacaccaaagctcttaggatccttaatattttttaagcatgtaaaagggtcctgatgatgaaaagcttcagaactgccagcctagtgcatccagagacaaggcctccaggcccctcccacaccgtgccctgtagaaatgtgaggctctccaccaggctccatcagattcccactgggggccaggaggagggctttagttttctccatcacctctggctcccagatcctgtcccccagatgagtcagttgatgggtcatcctcctctccacagtgctttcctggttctttctcatgtcacctctgatgcagaactcagcttcttcctagctttgcacaactctccctccccacttacataagtacattttcaccagccaacttcctcaaaggatttgggagatgagaaagggaggtatatggaagcaaagccaacaactctaaactgagtactggaccacgtttgtgattccttcccaggccagctgcatctcccccagttgcagagtcaaaagtggcttagatggactctgttctcccataatctccatcattccataccaacctcccctatccccagtacacataaaacaaaagcaggggcttgagaggcacatgaagctttgggatgtgtcttctgtccccacgccccatgagattgctgcactgagtcctcctcctgtgtcaattctggagccccttttactcaactcccctttgattccgcatgttcaaatacaaacacttgttctccaagtgccagtaagactttagagatcatctagtgcttctccactttatatttggtgcttgaactctctgttgtctcacagaaagatatttggtctttggtacagaggtcctttaggggcgataggagtgtcttttttccagtgagataactcttggtgggcctgtaaatagcttcggcatgggagctgcttgccagaaggaccaagccatgattagagagttagaaccttcagctctacccggcaacctctgcagagggaagaggggctggaggttgagtttaatcaccaatggccagtggtttaacaatcatgcctatgtagtgaaatcttcataaaaccccctaaataatagggtttggggggcttctgggttggtgaacacgtcaaggtgctgggagagggcccggaaactctgcacctccaccctgcatccctcataccttgccctgtgtgtctcttccgtctgcctgtttctgagttatatcctctgtaatcaacatgtaatagtaagtgtcaatagtaagtaaaatgttcttttgagttctgtggatcactctagtaaattattatatcctatctggaggtgtaggggaggttgtaggaatgttctgtcagtcaggtggaagtgtggatagtcaggacaccctattggtggctggcatttgaatgggggcagtcttgtgggactgagttcttaacctgtggggtctgagctaactctgggtagttagtgtcagaattgaattaaattgtaggacacccagttggtgtccaaactagttggtatcagtaggggggaagaaaaccctcttacgtggtgtcagaagtattgtcggggagaacacagtcacactctttctacaatagttctcttcaatgacaacctgcagcaacacctctttggatgaataactcactatagcaagatggagccactttcatttgggcatatatttagctgatcacttgctgtgcaagaatctatcattcctaacggtaataagggctagcatttgttgaacacctacctgaatgccaggatctttccaggcacagctcattgaacagtaacaacatcctttgaggttattattagtatctccatttcaccaatgagccaatggaggcacaaggaaaagatttaacttgccccaaggcagaagttagcaaatagcagagctggaattcaaatctaggtggtattgctccagaaaacactctaaccactgggaatcctgttcttgtctttaccccatatcaaaagtggaaaatgccaagcaggtcaaggtcaactattgagagcttgttagatgcttccagatacctttccatcacagagcccaggctctcaattgactccctggggccacacctctgaagtctcaatagatgtgggggtgatggccaagcagaaggatctgaaaatgtcccacaaaggttctgctgtgggcactgccaagacagacaggaccacgaggccagctggcacctgcctaaatctatgctttccagcccatagctcatcacacgcccaactggaacccaggcacaccatggttgcagcgatccttgaactggtcactatgcaaaagcagaacagaagggagactggtacaccggcacagctccttctcagcaaatgcacccgcctctcattcatctctactttctttcacaagtgttcccaaaccatgggtttaatcatgcgctctagaatttgtccaggagttgacagcatgcttgcttacatattgcctcagagtcctcttttactatcgttaactaaacttaggccatgtcataccttcttggcacctaactaaattttctgtggctccactggtcatgatccctcattcccctctgttgtttctttccaacccttctgaattgaaatcccctcagccacaagccagaaccccgctggtttgaagcagtctgagctgtgggaggagatcctgacctcacaggagcctctcagccatgctgggccattgcgcccaggtctcaggtctccctccttgagggacagatgggagcaaaaacaacacccaaaagagaagtagatattgttagctcttccatcagatcattcgccccaagcagcctcagccaccatttattttcactctctcaggacttgtttgaaaggcctttttctcatgcttacaattttggtgggtaagatacagctgagtatggcattatccttatggccctaaatgatgtttttgtatttgtctttgagagggagcctgcagggagaaaagctcaggaaaacaagagtttgaatctgccttgttcatgactttgggcagtttatttaatcttcctgaatctcagtttcctcaattggaaagtgagcctcacagtgtttgttttacagggtgcattgtatcatcaatcatgaatgtgaagtactcagcacggtgcataaaagatgcttcacaaatgtctgttctctcttcaagtaagtgtgtctccttcaaccgataattcagattcttttcgatttgggctcagagaactacctcctgccgtctttttcttactagcaacttcccgcctctcttgcttgtgggcctgattgatgactgcctcacctccctctctctctcccctcttgcttcatttctaggggtaccctgacttaacaattttggccacaaacagactgcctatctttgctttgaacttccctgactctacttgtataaacttaattcctggggaaaaagggtcctacccacagaggccgtatttctgcctcactgaaccattccaatggttgaaggaccagcttccttgagagtccacttcatgggagaatcatgacccgtgataataataggcctggccagaataatccttccagtgcgaggtaggccaacctcctggcccagaaatcaggcttaattggaaattaaattgctttcccatgccaactgcaagacgcctatatctacagctaatttatcaaggtgatgccttatctcaaggaagcccatgggaatagagtggctgcatcagcaaaagtgcaaacttggtcctgatgagaagagttttctttaaagtacagcttgaaccctttgagattctcatttggggttcagtgcatttaatggcttcttcccccttgccaggctctgtgccagggcctggaggtatggataccagcggggcaggcaccgcattggagcagcttccagggctagtggcagaaaaagaaccgtgcaagaaaagtttccaaagctgtagcactttacttagttgtccagggatgagcagcttatggaggtagagaatatcatgaatagagtcacggttaataaattgatttctatatttagcactgatactaacagttcatgatcaagggtgtgtggcactcttcgccaagccctttacacacatacattccattctctgggcaactgtaggaaacaaatacaccaggattttcattatccccattttactgatgaagaatctgagtcttagaaagtaagtaccttgcctaatgttactacttcccaactaataggcagtgggactggaacttgaaataaggtaatttcatgcagaatttatgcccttaaatactatactacactgctcctttatttccccagctttttattttgaaaatatccaactacaatgcaaattgtaagcatgcctccccttcatctaggttcaccaatgatgatcagtattttatcatatttggattttctctctgtctctgtctctctctgtgcacatgcgaatttgtgtttctgaaccatttgagagttaggctgaggagcacagaacagaaggctggtttggaaacatgtggggaccagtttggctggaggagaatgcgtgtgtgggtttggtcacggggacacaggactagggagtgggctgaggtctgagactgtggggttagggctgggagtgccaaatctggtagttcggggtgtattgccacatggcatgaacagccagtgatatgccagtgaaagcagaactttcatgcgttcccatactgagaactgtatgattgaagatgtgtatttagtgaatgatatgtttgtggtttctgattaaatatggatgcttattgaagacaattcagaaaatgcagagaagcatcaagaagaactttaggccgggcacggtggctcacaacagtaatgccagcactttgggaggctgaggcgggcggatcacaaggtcaggagatggagaccatcctggaaaacattgtgaaaccctgtctctactaaaaatacaaaaattagctggctgtggtggccggcacctgtagtcccagcttcttgggaggctgaggcacaagaatcacttgaacccaggaagcagaggttgcagtgagctgagattgcgccactgcactccagcctggtgacagagtgagactctgtctcaataaaacaaacaaacaaacaaacaaacaaacaaaaactttaaaaactcacctttaatccaagctaaaacctaaactaatgtttcagtgtatttcttctctattttacttttccatacacatctattcccacagactggaactgcattcatcatacagttttttttctcctggcttcctacttgatacgatatcaatagcatttctctaggttattaattagttcctaaaataatttttcaacagtttaatattgttccatcagacagatgaaccaaaatttatttaatacacaattttttccattgacacttagattgcctccagtttttcactgttataaataatgcaataataccataatgaatacctctaaataaaagtccgtatgcacagctgtgatgatttgcttagaatagatttctagaagtagggcttctgggtcaatgggttagatgggccatctctttggaatggtgtggaggagtcagaaagggaagaaatgggaagaaacgcagtctgcaggctgctgcagcaaagcgggtgagaggttagaaaggttcagatttcaggaacggttctgagagtggaaagggagtgacagatggaaagaacaaggctcgagactgggacatgtaaagagaaagagtaaaatcaggagagagaggtctcctttggttttacaaggattgagtaggggctatagaaagacattcaactggaagggtctagtggtccttcctcccatcctccatcaatccatccatttgttaggcccctactctatgccaggtcttgtgctgggtgctgcacattctttctttctttctttctttcctttctttcctttctttctttctttcctttctttctttctttctttctttctttctttctttctttctttctttctttctttctttctttctttctttttctttccttctttccttctttcttctttttttttgagacggagttttgctcttgttgcccaggccggagtgcagtggtgtgattgtggctcactgcaacctccacattctggttcaagcgattctcctgcctcagcctcccaagtagctgggattacaggcatgtgccaccatgcccagctaattttgtatttttagtagagacagggtttcgctgtggtcagaatggtctcgagctcctgacctcaagggatccacctgcctcagcctcccaaagtgttgggattacaggcgtgagccaccgtgccagactgcacgttcttaaataactaaaatgtagcccctgcccttccaacaagttcacagtccagccaaggagtcacctgcaggcctggagcttaagaaaagagccaaggcaagagagagagacttgggagtctcccccagaggtgaggccatgaaggggagagtgcagagatgaagggaggaggcgaggggtcttgcttgggcttagtctatgagtcatcggctgtgtggcaatgaagagccatctgctgggtggccaccacttccaggaggggccaggctaccctccatccctgtgcccccagctaccagccagaggaggctccgttttgagggtagcttactcaagggtgttccttgctctggcctcagtttccccacccttacactgaggacatttggaggagtctcacgctggtcactgtgccatgtggccttgacttccagtcacatactggccaccttcaggctctcagaagctcccttggccagactgaaatttccagatataatgaacatgggggagcctgtgcctgatgtctttttacctcatgtgccctgtgagacaggccagcaggcacagcagatgctcaaaggtagtgccagagcttgcttgtccatggggctttgtggttccagccagcttctcccttccagggtggtgtcctcagggggctctgacccagggtgcagtgactgccacgacatccaggtctgaggcctcctccacctcctctgttgagcccccggtggactctatacaaagacaaggttttactgccccttcttattttttcatccgtaggagagtgtgggctgggagtggggcaggagtgtacaggagattttaaaggttctggacatgaagagcttgctcaatg

SEQ ID NO: 54 - DNA, 35472 bp, Homo sapiens
cattgagcaagctcttcatgtccagaacctttaaaatctcctgtacactcctgccccactcccagcccacactctcctacggatgaaaaaataagaaggggcagtaaaaccttgtctttgtatagagtccaccgggggctcaacagaggaggtggaggaggcctcagacctggatgtcgtggcagtcactgcaccctgggtcagagccccctgaggacaccaccctggaagggagaagctggctggaaccacaaagccccatggacaagcaagctctggcactacctttgagcatctgctgtgcctgctggcctgtctcacagggcacatgaggtaaaaagacatcaggcacaggctcccccatgttcattatatctggaaatttcagtctggccaagggagcttctgagagcctgaaggtggccagtatgtgactggaagtcaaggccacatggcacagtgaccagcgtgagactcctccaaatgtcctcagtgtaagggtggggaaactgaggccagagcaaggaacacccttgagtaagctaccctcaaaacggagcctcctctggctggtagctgggggcacagggatggagggtagcctggcccctcctggaagtggtggccacccagcagatggctcttcattgccacacagccgatgactcatagactaagcccaagcaagacccctcgcctcctcccttcatctctgcactctccccttcatggcctcacctctgggggagactcccaagtctctctctcttgccttggctcttttcttaagctccaggcctgcaggtgactccttggctggactgtgaacttgttggaagggcaggggctacattttagttatttaagaacgtgcagtctggcacggtggctcacgcctgtaatcccaacactttgggaggctgaggcaggtggatcccttgaggtcaggagctcgagaccattctgaccacagcgaaaccctgtctctactaaaaatacaaaattagctgggcatggtggcacatgcctgtaatcccagctacttgggaggctgaggcaggagaatcgcttgaaccagaatgtggaggttgcagtgagccacaatcacaccactgcactccggcctgggcaacaagagcaaaactccgtctcaaaaaaaaagaagaaagaaggaaagaaggaaagaaaaagaaagaaagaaagaaagaaagaaagaaagaaagaaagaaagaaagaaagaaagaaagaaagaaagaaaggaaagaaagaaagaaaggaaagaaaggaaagaaagaaagaaagaaagaatgtgcagcacccagcacaagacctggcatagagtaggggcctaacaaatggatggattgatggaggatgggaggaaggaccactagacccttccagttgaatgtctttctatagcccctactcaatccttgtaaaaccaaaggagacctctctctcctgattttactctttctctttacatgtcccagtctcgagccttgttctttccatctgtcactccctttccactctcagaaccgttcctgaaatctgaacctttctaacctctcacccgctttgctgcagcagcctgcagactgcgtttcttcccatttcttccctttctgactcctccacaccattccaaagagatggcccatctaacccattgacccagaagccctacttctagaaatctattctaagcaaatcatcacagctgtgcatacggacttttatttagaggtattcattatggtattattgcattatttataacagtgaaaaactggaggcaatctaagtgtcaatggaaaaaattgtgtattaaataaattttggttcatctgtctgatggaacaatattaaactgttgaaaaattattttaggaactaattaataacctagagaaatgctattgatatcgtatcaagtaggaagccaggagaaaaaaaactgtatgatgaatgcagttccagtctgtgggaatagatgtgtatggaaaagtaaaatagagaagaaatacactgaaacattagtttaggttttagcttggattaaaggtgagtttttaaagtttttgtttgtttgtttgtttgtttgtttgttttattgagacagagtctcactctgtcaccaggctggagtgcagtggcgcaatctcagctcactgcaacctctgcttcctgggttcaagtgattcttgtgcctcagcctcccaagaagctgggactacaggtgccggccaccacagccagctaatttttgtatttttagtagagacagggtttcacaatgttttccaggatggtctccatctcctgaccttgtgatccgcccgcctcagcctcccaaagtgctggcattactgttgtgagccaccgtgcccggcctaaagttcttcttgatgcttctctgcattttctgaattgtcttcaataagcatccatatttaatcagaaaccacaaacatatcattcactaaatacacatcttcaatcatacagttctcagtatgggaacgcatgaaagttctgctttcactggcatatcactggctgttcatgccatgtggcaatacaccccgaactaccagatttggcactcccagccctaaccccacagtctcagacctcagcccactccctagtcctgtgtccccgtgaccaaacccacacacgcattctcctccagccaaactggtccccacatgtttccaaaccagccttctgttctgtgctcctcagcctaactctcaaatggttcagaaacacaaattcgcatgtgcacagagagagacagagacagagagaaaatccaaatatgataaaatactgatcatcattggtgaacctagatgaaggggaggcatgcttacaatttgcattgtagttggatattttcaaaataaaaagctggggaaataaaggagcagtgtagtatagtatttaagggcataaattctgcatgaaattaccttatttcaagttccagtcccactgcctattagttgggaagtagtaacattaggcaaggtacttactttctaagactcagattcttcatcagtaaaatggggataatgaaaatcctggtgtatttgtttcctacagttgcccagagaatggaatgtatgtgtgtaaagggcttggcgaagagtgccacacacccttgatcatgaactgttagtatcagtgctaaatatagaaatcaatttattaaccgtgactctattcatgatattctctacctccataagctgctcatccctggacaactaagtaaagtgctacagctttggaaacttttcttgcacggttctttttctgccactagccctggaagctgctccaatgcggtgcctgccccgctggtatccatacctccaggccctggcacagagcctggcaagggggaagaagccattaaatgcactgaaccccaaatgagaatctcaaagggttcaagctgtactttaaagaaaactcttctcatcaggaccaagtttgcacttttgctgatgcagccactctattcccatgggcttccttgagataaggcatcaccttgataaattagctgtagatataggcgtcttgcagttggcatgggaaagcaatttaatttccaattaagcctgatttctgggccaggaggttggcctacctcgcactggaaggattattctggccaggcctattattatcacgggtcatgattctcccatgaagtggactctcaaggaagctggtccttcaaccattggaatggttcagtgaggcagaaatacggcctctgtgggtaggaccctttttccccaggaattaagtttatacaagtagagtcagggaagttcaaagcaaagataggcagtctgtttgtggccaaaattgttaagtcagggtacccctagaaatgaagcaagaggggagagagagagggaggtgaggcagtcatcaatcaggcccacaagcaagagaggcgggaagttgctagtaagaaaaagacggcaggaggtagttctctgagcccaaatcgaaaagaatctgaattatcggttgaaggagacacacttacttgaagagagaacagacatttgtgaagcatcttttatgcaccgtgctgagtacttcacattcatgattgatgatacaatgcaccctgtaaaacaaacactgtgaggctcactttccaattgaggaaactgagattcaggaagattaaataaactgcccaaagtcatgaacaaggcagattcaaactcttgttttcctgagcttttctccctgcaggctccctctcaaagacaaatacaaaaacatcatttagggccataaggataatgccatactcagctgtatcttacccaccaaaattgtaagcatgagaaaaaggcctttcaaacaagtcctgagagagtgaaaataaatggtggctgaggctgcttggggcgaatgatctgatggaagagctaacaatatctacttctcttttgggtgttgtttttgctcccatctgtccctcaaggagggagacctgagacctgggcgcaatggcccagcatggctgagaggctcctgtgaggtcaggatctcctcccacagctcagactgcttcaaaccagcggggttctggcttgtggctgaggggatttcaattcagaagggttggaaagaaacaacagaggggaatgagggatcatgaccagtggagccacagaaaatttagttaggtgccaagaaggtatgacatggcctaagtttagttaacgatagtaaaagaggactctgaggcaatatgtaagcaagcatgctgtcaactcctggacaaattctagagcgcatgattaaacccatggtttgggaacacttgtgaaagaaagtagagatgaatgagaggcgggtgcatttgctgagaaggagctgtgccggtgtaccagtctcccttctgttctgcttttgcatagtgaccagttcaaggatcgctgcaaccatggtgtgcctgggttccagttgggcgtgtgatgagctatgggctggaaagcatagatttaggcaggtgccagctggcctcgtggtcctgtctgtcttggcagtgcccacagcagaacctttgtgggacattttcagatccttctgcttggccatcacccccacatctattgagacttcagaggtgtggccccagggagtcaattgagagcctgggctctgtgatggaaaggtatctggaagcatctaacaagctctcaatagttgaccttgacctgcttggcattttccacttttgatatggggtaaagacaagaacaggattcccagtggttagagtgttttctggagcaataccacctagatttgaattccagctctgctatttgctaacttctgccttggggcaagttaaatcttttccttgtgcctccattggctcattggtgaaatggagatactaataataacctcaaaggatgttgttactgttcaatgagctgtgcctggaaagatcctggcattcaggtaggtgttcaacaaatgctagcccttattaccgttaggaatgatagattcttgcacagcaagtgatcagctaaatatatgcccaaatgaaagtggctccatcttgctatagtgagttattcatccaaagaggtgttgctgcaggttgtcattgaagagaactattgtagaaagagtgtgactgtgttctccccgacaatacttctgacaccacgtaagagggttttcttcccccctactgataccaactagtttggacaccaactgggtgtcctacaatttaattcaattctgacactaactacccagagttagctcagaccccacaggttaagaactcagtcccacaagactgcccccattcaaatgccagccaccaatagggtgtcctgactatccacacttccacctgactgacagaacattcctacaacctcccctacacctccagataggatataataatttactagagtgatccacagaactcaaaagaacattttacttactattgacacttactattacatgttgattacagaggatataactcagaaacaggcagacggaagagacacacagggcaaggtatgagggatgcagggtggaggtgcagagtttccgggccctctcccagcaccttgacgtgttcaccaacccagaagccccccaaaccctattatttagggggttttatgaagatttcactacataggcatgattgttaaaccactggccattggtgattaaactcaacctccagcccctcttccctctgcagaggttgccgggtagagctgaaggttctaactctctaatcatggcttggtccttctggcaagcagctcccatgccgaagctatttacaggcccaccaagagttatctcactggaaaaaagacactcctatcgcccctaaaggacctctgtaccaaagaccaaatatctttctgtgagacaacagagagttcaagcaccaaatataaagtggagaagcactagatgatctctaaagtcttactggcacttggagaacaagtgtttgtatttgaacatgcggaatcaaaggggagttgagtaaaaggggctccagaattgacacaggaggaggactcagtgcagcaatctcatggggcgtggggacagaagacacatcccaaagcttcatgtgcctctcaagcccctgcttttgttttatgtgtactggggataggggaggttggtatggaatgatggagattatgggagaacagagtccatctaagccacttttgactctgcaactgggggagatgcagctggcctgggaaggaatcacaaacgtggtccagtactcagtttagagttgttggctttgcttccatatacctccctttctcatctcccaaatcctttgaggaagttggctggtgaaaatgtacttatgtaagtggggagggagagttgtgcaaagctaggaagaagctgagttctgcatcagaggtgacatgagaaagaaccaggaaagcactgtggagaggaggatgacccatcaactgactcatctgggggacaggatctgggagccagaggtgatggagaaaactaaagccctcctcctggcccccagtgggaatctgatggagcctggtggagagcctcacatttctacagggcacggtgtgggaggggcctggaggccttgtctctggatgcactaggctggcagttctgaagcttttcatcatcaggacccttttacatgcttaaaaaatattaaggatcctaagagctttggtgtatatgggttatatctattaacagttaccattttagagattagaactaagaatggtaaaaatatttaatttgaatttacttattttaaaataataatacatccattagttgctaacaaaaataacatatttttttgaaaaacaattatgcgtggcaaaaagtatattgggagaagtggtattgttttacatttttcacaaatctctaatgtccagctttagaaaggcacctagaatctcattgctacctcggcattcagactgttttaacaatgcatgttacatgacctctggaacattccattgcactctcataagagaatgaaaatgaaaaaggcaaataatgtcttagtattattatgaacagagttttgactttgcaagcctccactttgagaactgctacactggactgtagtgaatttctccatgtctctctgatctttctttggtcattttctttcccttccatgtgacagggcaatggctggtgaggtacaggaaggtggcactttgctcaaacagtgtcttcttaaatatttcatagaattcaaactcccccaaacacaagaccaattcaaagaatactggatattctcacataacagcctgtgctgccaatgaacaataaaataaatgcagtttgcaatgccctgacccaaggagtttaagataaattttggatgagttgttgatttagaggaggagctggtatcacttcagtaagtcacagaaaataagattatattaatatttatattgcattattttaaatctgcataatgctgagtcttcactgtgaagaaggaagcccctcacaatgattagtgaggggtagggagggagaatggcaagaagacaccaagttccttgcaggcaagcaaatagatacatcataaaagtgaagtgaaattccagtcctctgagatcttcataaatagaagaaaccctcatttctttcctcctctggttgcagcttggactgatgagctgaagctctgtctgagacctggcactgttaggatgtcccccagggttctttccaccccagttctggagctcaggtggccccttgcctctgaattccaccgctttgtctgagttctggaggacggcacatgggagaaccatccaggtgcacctctccaggtatgagtcactagtccatgagaggacaataataaatgatggaagcactagacactcattagcagagtggtttattaagaactgatgaaggttctctgctcccaggcagatattattgcaaaaaaacacgtaggcacagggtctaactccatcatgcctaaattcccattatttcatgcttatcccgtgcataaagttctgtgagcagcagacagttgtggcatttgctagaaggccagtctttattgacaggaggagaacatctatctcaagcaaatgaaggtcatcattaataatttatgggacagtgggggttaggcatcctcacatactaatttttctagaggaacatggccttttcccctgcagggattgtttgggtattctgagtttctgtgtattttagtcccaaattcaggtgcatggaaaccattgacaaaatagaccctttaaatcagactccaagttgggacttcctttcttatttttcttccttttttaacttaaatttttgagataattgtagattcacatgaagctttacgaaataatacagagacattccgtgccccctctacctaatgtccccaatggtaatatttaatattttgcaaaactatagtacaatattacaattaagactttcttaaaagactcacatgaggacctttgagacttccctgaccccagaaggaaaaaattccagggaatgatgagctgcctgcctttggaaggaaggtccaccaggtaagaaactggaggccacagggatacctctgggctccctggctggaattggcagatgctggtgcagatgccagggcctcccctcagaactccaacctgcatgagggcacctgggttccagggatgcaacgcagctccctgcctggcccctgtggctttgagtggctgtgtccctcagcccttcacagctggctctgcccctcagcccttcacagctggctctgcccctcagcccttcacagctggctctgtccctcagcccttcacagctggctctgctgagttctgtggttgagatgccaggtactggaacacacagctccaggcttgagtcctagcccctcactttacagatggccttggccagttacctcttacagcctcagtttttcatagtaacttagatagcacttaccatatgtcactatcctaggaaatttacataaaaatttgtttcatgccaaaactctatggaaagatactattatcagtttcgttttgcaaacgaggaaacaggcacagaaaggttattcgtccaaagtcacccagcttgtgaacagcacagctggaatttgaacccaaacagtgcacatcccaagtccacatacttagccactgtcctctgttgcttctcatcatctgtgaggcaggttcaggagtatctcatttttttttccaaggcaaactaattagtacagtgcctggcacagaataaataagcacccatacatgccagataacattgtcagtataacttctggaagtttctgagtattcatgacttattcttttttttttttttttttttttttttttgagacagagtcttgctctgttacccaggctggagtgccgtggcgcgatctcggctcactgcaagctccgcctcccgggttcacgccattcttctgcctcagcctcctgagcagctgggactacaggcggctaccaccacgcccggctatgattttttctattttttagtagagacagggtttcaccgtgttagccaggatggtctcgatctcctgacctcgtgatctgcccacctcggcctcccaaagtgctgggattacaggtgtgagccaccacgcccggccgactttttcttgttactaacaatagctctttttccctgatcctctccctcctcctacctcccgccctccaataggcctcagtgtgtgttgttcccctctttgtgtccatgtgttttcatcatttagctcccacttataagtgagaatatacagtatttagttttgtgtccctgtgttagtttgctaaggataatatttggcctccagctccatccatgtccctgcaaaggacatgatctccttcctttttatggctgcataatattccatgacgtatacgtaccacattttctttaataatgggtactagacttaatacctgggtgatgaaataatctgcacaacaaactcccttgacacaagtgtacctatgtaacaaacctgaacgtgtaccctgcaacttaaaatgaaagttaagaaaaaaacacacacacaaaacaaacaaaaaaaactatagttgccattttaaacacctatgatgtgtcaaacattccttcagccctcccaactatccagaaagagtccttcttttatagatgaaaaaactaagaatcaaagagatgaaatcgggcagagtagagacaggattcaaacccaagatctgcatcttggactcacaacactggaagaaacttcagacaccagcctaacttcacacccagctcaggactggccctgccgaatggtcactcacctgctctgaaaatcctcgcgacaggacgctcacttcctacaccggtagttctctggctcgaggtgtgccacagaatcccctacgcattgttagaacacagaacattgctacccccaccccgtgcagggcttctggcgtggtggggctgggacaggggcctgagagtgtgcatttctcacaagctgccacaggatcctgatgctgctggcccagggaccacacttggacagtcatcgttctaggaaaacttcctggagtgggaatggtaaaggtgatggcttcttcccattttgcccttttcaaatctgagataggcttccccagcaggctcagtgccagagtccataccctcaatttaaataacaaatcctcctctatatcatgacctttcctccagagggttgtttttcattttttgttttttgttttttttttgagacggagtcttgttctatcaccaggctggagtgcagtggcacaatctcggctcactgcaagctccgaaccccgggttcacgccattctcctgcctcagcctcctgagtagctgggaccacaggtgcccaccaccacgcctggctaattttttgtatttttagtagagacggggtttcaccatgttagccaggatggtcttgatctcctgacctcgtgatccaccagcctcggcctcccaaagtgctgggattacaggagtgagccaccgcgcccggcccagaggggtttttaagattgtgtgttctgaatggcctgtctctgactggaacccaactccgtccccagacccacttccatctttttctgtgagggggacacactctttcaacttttccaaaatggcatctaccatggcttttctgattaaaagcaaacgaaacacacccttcctataatcaaaaatttagaaaagcagcaaaaataaaaaggggataaggaagaaaacagaaattaaccaccatcccaccgctaaaattttgatgagttctcatgtgtttccttgcagctgattgttgtttggcatacatttattaatattggaattaaaaatatatatggcactttatatcctagaaaatagtaatactgtaaatgtgttctagaaatgggagctgctgttgctcttattagagaattcaaacaaagaagggaggctcgctggggacagcttctgggggaggatgggtaccgctttgagacaacagggagaactcaggcacagaggtgacgatcatcgttctctgtggggcacatagtgatgcagccggaaacaggtatgagtcagttgagtggggacaggtaatagagagctagaactggctggccttatggcctccaaggcattggggagccactgtacattcttgagcaggcaatgacttcacaaaaggatttctcaaaggttagtcctgcaacagaagacagcgtggattggactggaagagtgggagggcaggtggagaaggcattgtgctgcaagtggggagcagccctgggggcccagccagtcccctgtgccctgacaagtggtatggcatggatggatggctctacttctgggccgccaggatggacaggtactggttgctcttcaccatggcgataatgaggaggccaccggtcagcaggaaggtgggccagaagagggagaagaggagggcctggggcccgtagaggcgctggaataggacgctggtttcgttcccccgaggtgcggagaagcagtagaagacctgctgctcttggaatttggctctgaccttctccacgtcggcccgggccgtctggtaattgtccacgctgcctgggatgtaggagcactgtggggagaaacaagagcagctgtgggcttggaaatccccatttcttagccaagggcttgatatggagtaaagaaaaataccagctttgtagtcgggcccctggattggagtcggggctttggtctaaagcttggcaggccatgcgctgtacaggtctggagagcacgctctcatttgtgtcttgtgtgtggatggcggtgctggagctgctcggggtacaggctacacacctgggcgcaggtcctaccttggagtcctggctctgcttggattggctgtagaatttttggcaaatttctcactctttctgagccctgaagcttcatcacttaaatgggtgaatatcggtttcaaaggatattatgaaagaaggacttcacacagagctatctaaggaaaccagggagggacacaggccaagtgggctgtgtatttgaaatcgagatcatgtgctcaattgcctacagggctcatgaaggtattgtcagagggtgaagcaggcaaagcaatgagatgacaggtgcccactgactcttgccttggtgccaggaagaattgccagggtgtggcagggcctgtcaatagggagagagccagctgcctccagacaggcagtcaccactccctccaggcaatggatgtcaggccatccagaagatctataatagccagacctccaacactttaagagaagttagaaaccagatcacacctgtaatcctaacactttgggaagccgaaggggaaggatcccttgagcccaggagttcgagactagcctaggcaacatagcaagactttatctctacaaaaaaagttaaaaattatccaggtgggcatggtggtgtacctgtagtcccagctacacaggagactgaggtgggaggatcacctgagcccaggagttggaggctgcagtgagctatgatctcgcaactacactccaggtaaggcaacaaagcgagatcccatttcaaaaaaaaaaaaaaagtaaaatattagctaaatttaaaattgaaaacctttgcagtttcaacctgtgtacagcaaacaaactatgttggcaagcgggtatttgacactgggatccaaaggaaagaaagaatgcattgaaaagagttttgtgccagcagagcatgacacacatttaattctgacgttgattattgttattaggaactttctgccctgttcagatgaggccagctggaaagtgatgcaaagcagtcataaagcggagttttatctggttttatctctgttctgagctgcaagtgtggtgcccccatctgcagcagaatacctacagggcccccatagcccaggtccctacccactctgcatcactgagggcgagacccaggaatgtgtgattccttcatgcacttaattttgccctagtgaaatcatgtgcaagatcaaaatgtgtaaaactgagacccaaatggcaggtgttgagccagattccttgcaggcctcggccactccctggatttatatgaggtgccaccctggaagctgcctgccctgagggcattcactccagcaacacagaggagggttgcactgtagttctcacagcctgggaaatgcagatgctgcactcagatctagggccccagccagccagggagtagctgaggctggggagacgctggctcctcaggaatctggcattcagagctgttggacactgccaggtcctcagtagcatataatccagcatcctgagctgacggtgagggggcctggcctgagtctctccaatgcctctgactgtgaccttggctaacctagctccttaaatagcagtgtggctatggagtcagacaggcctgagttctgagctgtgtgaccttggcaactgccacaacctcactgggccttgtaaaatgggtttgtgaggctacctgcctaggagaactgtcatggggattaaatgagatgatgcatgtaaagcactgagcacagaagcccagcacacgataagaactcaaaaaagtggaagatgctattattaataataatatgttttgacttatctatgaaattgcaacaacagctccttctttaccttcttaaaaagaggtctatggatgagctctgaagtagaggcttctgtccatcctgggcctagtgtatcctctgcctgctcagggttcctctggatcttttatgctgggcctgtttggcaagacactgggcaggaattcactcttcatggccaaacccagaagccggggcctgaatgcatcctttctctcctgtcctgggtccagctaagcctgagttatctgaatgatctgaaaccaaccagctttttcccaagccctgcagtgtaaggtccccaggacagacaatgggagggaatttagaactcacctgctccaggctaagactcacaggaaaagctgagggcagactatggcccctaccttcagagttggagggtgggatgagagtcttcttggcccttcacagtgattccagaggacacccagctagcctggagccccagccacttgaacccctatgatggacataggcggaaggagcagctagcccacaacccagctgcttggcaaaaacacgaagggcatttccactgcttcctcccagctcctgcagcctgctatcagcaccacacctggtcaagcctgggcggcaggggagaggacagcagtggctccagcatgtccttccttcacatcctgctgacagttcattcaggggatgctcctctgagctggcaatctcaggaccagggaggcagcctgaaaaccagcctgctctggcccatatcactcccggagaatgttaccagttattgaaaatttgtttcttgcattgggataaatcaagggctactgaatgccaacgcagaggcaggggtcatgggtaggagctgcctccagtgggccctgagacctctctccaccgggtggggccgagtcatactagcgatgacagaacacctgaccatcctgcactgcccagacccacttctcattgaccttcagcactctcaagatcccccagcctccacgccccatcccaggcaccctgccccttcccgtcccatcagccatcaagtccggactgtcagcatctcccctgctgcaggccacatcttggtcgtgagtgcttgctgcggccttggctcctctgtctagtaactggacccacacacctgtaggctccatcttcccagcccaactctgaaactctgatcatgccctaaagattcccattgccaacagcaataatttccaaccttagaatcaccttgggagctccatgaatggatctctgaccagagattccaccttgatatgtctagtgttggaccctagttttgttttttaagactcttacagggttctaatgcatagccaaagttgacatatcttgagacatacacactcacattttaattccatattgtggtgatcaaaggcctctgggaacagaccttagtctgccctgacagccttttccagctgcatacaccccatcatgggtcattttctgtagtcagccctctgatccctgtctccacctagcccttccctccgccatgcctcgtcctataggcatacccgcttcctatatcacctcattctctatgccttgcatcctgcgcctgcctgatgttaaaagcctaatccaagagcctttcttttttttttttttttttttgagatggagtttcactcttgttgccaggctggagtgcaatggtgcaatctcaccaagagcctttctgatacccccatcattgtcagctggaaaacatccccctcctctaacccctgtaacttcctctgttcttctccccggtgccaattcttccctgctaggcactgttcatgcatgagctctctcctcttgagtcctacaggcttgacacaggaggtgctcaatggctgttgaataaataaatgagaggaggaaagaaggaaacaaggaaggaaggaaggaaggaaggaagggagggagagagggagggaaggagggaggggaaaaaaaagaaaagaaagaaggagggaagaaagggaaaaaagaaggaaagaaagaaggaaggaagagagacagaatatgggccaactgatcgctttaggaaaggatatggtggtgagttttgtgttttggagggggagggtgggatgttgggatgcaaggatggaaaaaccatctaaatgtttgtttatggaggttactccagccctgagtccctggtttcctggggagtcaccgggattccactttgaggatctggccctgggcctggtccctcatttgactgaggttgtagaatgaaagtactaacactaatcactgcttttgtttgagtgcccactatccactcagcatcaagcgtggcactttatatacagcgtctctgacttgataacagctcttcaaggtgcagcattagcattccactttacaagggtggaaactgaggaggtgagaggctaagtggcctgcctatgtttacacagccagttagcggcagattcaaacccaggtctgtgtgactccaacacagaagagctagggctggctcagtctcattccagctgtgagacctggtcaagtgggttgatctttctcagcctcggggacagggacagttaggaacaggctcacacacctgacagggataaagggatgtgtccccatccctccagttcagtacctgctggttctggtcccgagtgtcctccgtgtggtacagcacagcccacctgccggcagctgacacgttgacccacaggcatgggtactggggcaccttcttgcccttcagctcctcctggtccctgatgttggtctcaatcaggtggcacttggattcctgggtccacacgctgaggagaccacacacatgcacacatacacatctcagaactgggtgacacacagaacacccatttgaacccattatcccctgggagcctctagagggatccaggactgggatcctcatcttgtcttcagcatccagcaataaaggcacatgaccccacagtccccggacacagggaggaattgtagaagctggatggggtcttagacattatctatatgactggttctcaaccttggctactcttgcaacaacctggggagcttctaaaaagattcccgtgtccaagctacaccccagagcaagtgaatcagaacttcttgggtggtttggcccaggccctgggtgttttttcaaagctccctgatgtgattctgacgagcagccaaacctgagactttcttatccatatcgtcttcattttgcagaggcagaagagaaactcagaaaggtcaagtgactttgctgagaccttgcaggacctgaagctaggtctgagtgggttggagagctgtgttctttcccctaaaaggagcagatgtagaaggggtttgagttgagccaggatgggaaagatggtggggacagtctctagatggtgcttcaccagattaagagtccagcctggaatcgcttcagcgttgtgaagagtgaggctgcagcaggcccgggagaggctaacaggttcatcaacatattagtaaatcagttgtgcttcaactcccaagtatcctgtgggagacccattgccagtcagaagggggctgtcagctgctggaacgtgcccagagcacaggtctgagacttatcctaaggacaggctgggggaactgagtgtctttgttccaaatagaacacgaattaggaattcacagcttttccttaaaatctcaagtggttgatatgtcatggagcaagggcatggaccattctctgagattcctgagcagaacttcagggaagcagatgctggctcaatgcagacacatcagaaaacctcaaacatgaaatgtatgttcagtgaggcaaggagctccccgtctcttgaggtattcatcaggaggctggatgcccacctgacagggaggcttcagaggggagagaattatgcagctgagctgtaaacatctgcaattctctgattcctcctgggatcaaacttgcactggaacctttgctctgattctttgctatttcttctgagaagggcatcatgtgtctgttaccaccacgtcctagatcatgtgtctgttaccaccaggtcctagaatctcagaccagtggggctcagttcatcctaccttccctgcacttgaaccctagaacctaagaatgagcatcgtcttgaccctgctgccttgaatgagggtcaaggagaggggtgagtagaaggccagggttccttacagatgccagacccttaggagagggttggggggtgggcaggccgggagagctcagtaccttttctggtagaggggcagcacagtcgtgaccaggatgtagtaggtgatgacggcacacaccaccatggttacacccaggcaaagggctcgtgtctctccccgcttctgggccatcaccagcttcttcaccatattcactgggggcagtgatcatttctaggtccacagaagcaaacagaagtgagatcagcccagttcacaggtgatccacagaaagagaggacaggtgagaggggaaggtactcaactattaatatcactcttgtttatatttggagctttgcaacttccagaagtcttgctttttggaccccatgtaagccttccctgtgcaattgagaggcaattgcagataaaagacctacggctcagagaggtaaagtgacttgccctaggtcacacagtatgtaataggctcagtaatggccccccaagatgtctatgttctagtctctggaagctatcaatgttactttatgtggcaatgactttgcagaaatgattaagataaaggctcttgaaggccaggtgcggtggctcatgcctgaaatcccagcactttcggagaccgaggtgggcggatcatgaggtcaggagatcaagaccatcctggctaacatggtgaaaccccatctctactaaaaaaaaaaaatacaaaaaattagccgggtgtggtcgtgggagccagtagtcccagctacaggggaggctgaggcaggagaatggcatgaacccaggaggcggagcttgcagtgagcagagatgcgccactgcactccagcctgggcaacaaagcaagactccgtcaaaaaaaaaaacaaaaaacaaaaaaagataaaggctcttgaaatggggagacaatattggattatccatgtagctcctaaatgtaatcccaagggtcctaataagagggaagtgaagggagattaaacagatgagaaagctaaggtgatatgaccagggagacagcaattagagtgatgtgaccacaggccaaggagtgcgtcagaagctggcgggggcaaggaacaatggctcatcccccacggccactgcagggagtgcagcctgcagacaccttggtgattttggacttctggtgaaatttctgtcgtttgaggccgtcaggtttatgatcatttgctacaacagtcataggtcccatgcggtgagcgagcagtacatgtgcatcatccatgcacctccttccacggcacttatctcacagggatacttggagtatttctgcccagaaacagttctgtggcagggctagctgggccgggcacaggcagggaaaggagaggagggccccagaaggcagctgcaggttgtcaggagaggcaggaggtttaccatattccggtgttttttttttttgtaaggaacattcccctacttcaagcaaagaaagaagaaagaaggcatcatggtggcctcagcgactgctttcttatttcagggcttgaagccacctgggacaaagcagaatgggcacattctgctggtggttgctttccttctctcctctttctttaggcagcaactccttgtttttcccctggacattgactccaccccaatgcaagcaaagattccaccctcccctgctaggctcctgatcgctcccccaggagtgtgagtcttgacaaagacttcaagaaacagcccctcaatctatgccgcctggagccacagagatgcccagccatggtccccgcgtgatttcccatggttccgcaagctgtcctagagcctctggtaaatttatttgctgttgtttttatttgtttaaagtaaccagagtccatttctaccaaaaataccaggaagctatcaatgtaatcctccattttaggggaaattttaggggaatttaggggaaattttagccagatatcagggggactttattctccttgccaggtccctaaagtaataaacatattatggtttttgtttgtttaattagccagtgtccgggtgacaggccttagtccaaagagattttctgcaaagtgctctattttctgctcaggcgtctcttaactactagactgtttcaaatattcagagattcttgactccctccccttagccaggctgccctcatacccgggcatctccgctaaagggaagagaccagggtcaggcaccacggatacccatcacaccttcccagtgagctggtccacctcccctatcgatcggcagaggtgacatccaatgacaactttttctcctttatttggcaccaggaggtgagtttctcctgcattctaatggagacattataaaagcacaagcaagcagaaattgcccccgacaaagagagatgttttattcaactctttttattcaatccttttcctcctgttctgtgatcttgtgggaatgggagagcccatgcctttttctacctggcgtcagttgaacaagactctccatgtattcacaggtaaagcaacagaatcacctggaggtaagctaaaagccccaacagcctgcttccccaggacctgcaagggtcactggcacttggccccaccccagatactgtgagacataaatcatttgaagccaatgggaaatcccatcttggaagcctagggctgagtgcccacaacaaagccatttctctcctgggggaactggatcgcacctgtgggggcttcctgtggctccttcctggctaatcagccccccccagcgcccagggccatggcctcctctgctatttggcttctagtgccctctcaggcccctgggcactcctgaggctggtgaaggcaggaacctggttttaccagttttaggagctcagaaggaaaggaaaggagaggcttccctgtcacagagaagtctggaaacttggcttattcaggtctgacccgtctctaatggtctgatgagattgttgcctgcactgagtgagtttatagagtcatgataaatcctcctaagaccatgcgtggggttcagtgtagatatgacttcagcaagaagttagtattcagcatccaaagggagaacctttggcgggaggaaggatgggaactgtcaatatcccccaagggacagaaagaaaaggaagaagtgggtttcagctatcataggagggatttcagttagactgtaagaagaacttcccagttttgagcatttctaaatatctctgaagttccaggatatatcttcccatttagaaaggtcacttgagatctgggatagattcagagaagatggagaaggacaaaggaaggcaggactttggagtgtcctgggtgacctgatagctgggtcgacatccttttccttagaaggacaaggaatagagtacattgttgaacagtttggtggggtgtggacagggcgattctgaggtcctcagacatggaatcaaatcctggctctgccacttacacttagcaaccacatgactgtgaaacgagaaccatggtacctgcctcagagagttcagctaaagatcaaatgccatattgagtatcagacatgtatcatagcacctagccccaaatcagcccccagtaaatattagctattactactaacgaaggaaaccctgaaagtttggagcagaagtctggacccctcttgatgaatctatttttgtcccacctctctaccggtgacaagtgccagcattggtgttaatctccaggctgcagccttctggccactctgagaactgggacctagagggccagggcgcttactaccagagtaacctggccactgtgccaccctccccactggccaccagaccacgggccctccatccagaaggacagccccgagaggaagggagtcctcctgcctgcctccctccctgccccgtggcaggctgctttcccctgtctccctccagcccggtcttcagagaaatcacttcccaagtgctttcaggcccggtactcacagtcttcccggcgtcctgtgggtcttgagcagcagacagtttctttctgcctggacccccgcccccaccccaaaagaggccacagagcttcagcaggaagtttggcctccccgcccgtctccagggaagcagcttttggtccccatctggggcaagcctccatgcccaaacatggtcaagtctgagcacacagcctggagacacagactcggagagcaggtacccagccctgaggaaggcagctgttacccaagccctgcacctccatcttcccagagtctcgtgggaaacagatttcaaacaacaacagacagcaagactgagaaactacgaaagatcagcctggtatatttggaaatatttcttcttctctctgtctctgtgggctggcaaagatgccagaaataggaaatgattctccttttgttggcatgaggaagggtggagttgggctggaggggttgggcttgtcactagtccctggcatatccacgctggagcagctacagctccctgcctttggcacttacgtgctgtgtgaccctgagcaagttatggcacctctctgggcctcagtttccttttttgtttttggttttactcccaaacttatcgttaaatgacctcagttttctcacttgtgttactggcatttttaaaacctactttgctttagggtagtgatgggagttagagacggtggggatttatggcaaggggagagaactgactttttaaggaccaactgagctgaagctgggagtagtgagagctccacaactgcttccaaccaggtccagggacagtctgctcaccaggggccctcccagagaccgcgaaagtacagagatttcttcctagcaataagacaagtgaatgtcagcatttgcaggcaaaaaacatgcttttagatctctgcttcttcatctgtaaagtggaagtaaggattaaaaatcagcaacaaagggcaggcacagtggcccacgcccataatcccagcactttgggatgccaaggtagatggattgctcaagcccaggagtttgagaccatcctgggcaacatggcgaaaccccatctctactaaaaatacaaaaattagtcgggcatagtggtgcatgcctgtggtcccagctacttgggaggctgaggcaggagaatcgcttgaacctgggaggcggaggttgcagtgagtcaagattgtgccactgcactctagcctgaacagagcgagaccccgtctcaaaaaaaaaaaacaaatatatatatatatatatatattttcaacaaaacaacaaaaacaatcccagatattggggctttcctaagtatcaggcgtggtggtagaaggcagcttatctccacccttcacttgacccaagaatcaaagaacctgaaactgagacttggaggcttgaagtcactggtgcaaccctaggggccagaactagattcgaagctggcccttccagatggcacagcttggtctgtctctgatgaccctggggctgctctgagacattaaaaatcacctcgatcatacagtaagctgccacctgaggctctggaggtcaccctgagtttccccagcccccagggaggtgggtgcagcctggccttccctgctgagcgagctcaccaccttcctccctcctgcctccagcaggcgcgaaatgaaggcagccactcaggcctccctgacacactctcaggcggtgagtgcccttctccacccctttcctaattgaatcttattaacaggagactacagtgtctgtttaatgggcaccatagcaccagagggtctaagaccagcttcagaccttgcaggcagattgacagagggatgtaggatctggaattcaatctcagaagagcaattttccaaggatgatcctctgtccactcagaagcaggaaaagtcctcctggggctaatccagaaatgccaggcccccctcctgcttccctgggggagagatacacagtgcaacaggctgccatttatgagtataaccgaagggctccttgctcgtgatactctgaataagttattaagggctacatattatttggaaatcataaacaaactttagcattcttcccaagggaaggtgggaacaaacagggaaggggggccgtggggtcttctgctccccctaaatgagccacaaccaaaaggcattgacaagccctgtcctcgagggtttgtgggtgaaaacccaggtcctttgctggctgcggggttgtgtgtgacagatggctacaggtggagggcaagaaaataacaatgctgcaacaataaatattgacggtttgcattagtacggggtgtcagagatcacaaaatatcttctctgactcttccaacagcttcttaaggtactagcacaataggctcacaatagaccactgaggtggagatttttctacccatttgatagagggagtaactgagcctcagagaggtgaaataaattgcccaagcaagttactttgcctctctaagcttcagtttgtctgtctctaaaatagagataattatacctagcccctcagtgtttttgaggaatgagagatcacctaagctacctgacacatagtatggagattgtcctttccaaagatggtcacaccaaatacttcccattccatgtgcccttttcacagtgtggcatcaacactccaccatcaagaggggcattgatgtctcttccccttcaccctgggtggagcttcgtaagggcctcaatagtagaatatggtagaaggacacagcacgatgttcaaggctaagtcatagacgggggctcgagttccccccacacgctctcgggacatgtacctgggaaccagccaccatgttgtaggaagccgaggccccgtgctccagctgacagcctcagctcagatctcagccaacagctagcaaatctcaccgggcatgggagagaacaagcctgcagacagttccagcccccagcctgccagcctcccagctgaggcctcagagaatgtggagcagagacagcccacctgctctgtgctctctctgaattccagagccacaaaatccacgagaagaaaaaaactaatgtttcatgcccctgcgttttggggtaatttgttatgcagtcatagtaactggaacacacttgcaagtgatttcaaagggggactgttacagttgctggtgatagtggtaggattaaaccagtgagaattaaaacacctgagattgctatatggagtgttacaggagagtttagaaatgctttatctaggtagggcatggtggctcatgcctgtaatcctagcacttttcgagaccaaggcaggcggttcatttgaggccagtagttcgagaccagcctggccaacatggcgaaaccccgtttctactaaaaatacaaaaattagctgggcacgatggcaggtgcctataatcccagctattctgggaagccgaggcatgaaaatcacttgaatccaggaggcggaggtcgcagtgagctgagattgagccactgtactccagcctgggcgacagagtgagactccatctaaaccaaaacaaacaaacaaaaaaagtgctttatctactcttaggtcacacactatggcacaaatggaatagaagggcagtgatatgggagggtatttttgtttatgaagcacctactatgtaccagggaatgaccacatagatatgcaatacatacacatacacatacacatggacattcctctccacaatcccccacaaaaggccttgttctttctgtaaaagcacaaggcaaagtgattttcccaaggtcacgcccctagcgtgtgatgtgatggagcctggagtgcacctgtgcccgctgactccacagcccgtccctgcccctctgtcaccccatgactcccttgggagcagttttcaagagaccccaggtttcttcatgatgtctgcttccactgctttccagacaccctcagctcagtctgtacccctctctggattatgcacctgcttgtttatttaagtctttctgaatcaatatctcctctctgctgacacttgggataataagtcccataaatcaaattggcaactgagtcttgagcccctgtgtgtgcctctctgagtgctgcagggatgggtgttagtcactctcagtcctagcgaagctgtgcgttcacagacatcccagcacttgctatgcagaggctctggatacaccactgtgccgaggtgactcagacacggtcccttcactgcagaaaagcgatgccagatttcctcaactacaaaaatacagaacagaaagtgaaagatgtgttttaaatgagagacagtaataaaaggcagaggaaataacggtgggaggttttttagtagagttgagatgacaaagtataacaacagcaaaagtaaatgccgatattacaattaaatggtcacacaacaagacacgacaaaaaacatggtaaagttgttccctgctgtgtagggtgatactcactcctttttcctctgactcttttcaccatattttcccttggcctgatttttcttcctttatcctgccatgctgttaacataattgtaagcaccttgaaaatcctctttgagacaaagaggagcataaataaataaacagccctgctgtctgtctgtgtggtaaggttggtttttttaaaaaaatgctttttccttagtgcaaatcatcccagctctgtgggaaagtggcatgatgtggaagtgcagggagaagatgaggtacagtgttagcctcactgctcagagagagttgctgtaagagtggtggtggccttttcaacacacataaaggaagcatgtgccctctccttccatggcacatgtctcctctgtccttgcctcctggccagctcttcctcttccacaggactccccgctggggccttccctcgcccccagccccttagccactctccgcgcctcctgggccaggcggaagctctgcttccgcatgctgggagcaccgcatgcctcttctgcagaacacttcctccgcctgtaatttaacatttattcatgtgcatcctccattaacatgtctcctaacccaagggtaagctctctaaaatcagggactggaaccgttcttattcactgccgcatctctagcgccaggaggaataaacaaagatcttgcggttttgttgtcatcgtgctttggttttcgggaaaaaaaatctctcgcttttttacataacagaatattataatcattttcccatgccatgaaacatttttcttctttaaattgatatattatagtttcacagttgtacataaaacacttttctttcttgaattttaattatagattcgggggatacacgtgcaggtttgttgtgagggtgtaatgcgtgatgctgacgtttgagcttctattgatcccatcactgatagagtgaacatagtacccaaaaagaagattttcagcctttgccccactccctccttccttttggagtccccagtatctattattcctgtctttatgtctgtgtctacccggggattagctcccacttagaagtgagaacatgtgatatttggttttctgtttccgcattaatttgcttagcataatggcctccagctgtatccatcttgctgtaaaggacatgatttcatcctttgttatggctgtgtaatattccaaggtgtatacgtagcacactgtctttatctaatctgctgttgttgggcaccaaggttgtttccacacctttgctattgtgaatagtgcggcaataaatgtacaagtgcaggtctctttatggtagaatactttattttcctttgtgtatgcatccagcagtgggattgctgggtcaaatgatggttctatttttagttatttaagaaatctccaaagtgctttccacaggggctaaattaatttatatttccaccaacagtgtaaaagcattcccttttctctgcagccttgccagcatctgttatttttttactttttagtaatagctattctgactggtacgaggtgacatctcattgtggtttaatttgcatttctctgatgattagtgatgctgagcatttcaaaaacatttttctagaaaggctatacagttttctaggttatggctaagtcgggatagatttcatcaaagccatgttgtcagatatttaagaagggtacttgcttccctgcatgcttgtttgtgtttagcggaaggcagagtccgcctctgctatgggcagacctgttttattctctacccctgaaccacacccatgcccagatgtcatttttcatgaatggacaggtataagggagactgtatctataagcacaaagtttggggaccagaacaggtggatagagatggcaacatcatagaagtgggagatggtgacaggttggcaattgctcaaccctgtcccaggcctgacttgagccttagtgagtgagagagagcaagagagagaaagctgttgttagggcttgtgggactcagaacacaagaaatgccactttgggacctacgaagagggtgtttccacttctgcttagctgtggccttgggcagtggccctgacagataatggccatcattatcatctaaaatagctgcagcaaaggtagactcctgtgtgaatcggtgtccctaggtgtgctgcagctggctcacactggcaccgtgagagcctttgcaagccaagtgttcaaccatcaggagctgaaaatccaccacagtgatgggagtagctatactgtggaaatctacaaacaatacacatcagggcttttgtctttttggagagctgttttgccagcacaccactttagaggatacacttcaactgggaaacctgaggaggtattaggaatgaaggtgtggacaggttataggaaaccacagggaacagtgacctaggggctcgcaatgttggttgagggctgagggaagggagctctgtccaggatcagcaggagaatcttcttgagaggggatgctcccagcctggggagaccctcagggaaggaactggggaatggactgctatgctcactctcctggaatgtgttgatgaaaaagccaaactctgcaaattatttgaagagatttgttctgagccaaatgtgaggaccatgacctgtgacaaggcttcagaaagttctgagaacatgtgtccatggtggttgaattacagcttgattttataaatgttaaggagacagaagctacaggcagacatcaatgaatacacataagatttacattggttcagcccagaaaggcaggacatctcaaatggggatggattcaaagatttcctggtggattcaaagattcaaaggtggattcaaagatttcctgaatagcaattggttgaaataattaagttttgcctaaagagttgaagtcaacagaaagaaccacgaaggggggttatggaaactaaggttattattatatagatgaagcctccaggtagcaggcttcagaaagaataaatgataaatgtctcttaccagaccttagaaggtctgattagactcttagttaaatctctctgggatgagaaaaagacttagaaagggaaggggagtctctgcagaatgtagattttccccacaaatgacaactttgcaggactatttcaaaatatgtcaaataaatatagtttggggttaaaatacttgtttctttcagagcctgctatctgtcatgtgatgctatactacagtcaggttggaatttggtatttattactacaaagagtctgtttgtcatcttaagacctctgttttaatgttaatgctggtaagttgtgcctgaataccaaagggaggaaggtattttattaagaggcatgtccaacatcccctccccattatggcctgaactagtttttcaggtttctttgaaatccccttggccaagaggtgggatccattcagtcaatcaagcggcttagcattctatttttggcgtacagacccttctgcagacacctgatctcctttggttgaatccaactggtagacagacaaagagcttgttgctgcagtccccagtgatcagtttccagggcagagccagctagagagtgaggaggggtcaggaggggcttacatagatatcagtccatctccctgtgtatgtggctttgggacaggaaaactaggtaagagcaaaaaaagagggcttgagcacatggggactccctgcaaatcccccagaaatatttgtaggggtctgaaaggtatgtaggtagggactctaaacatttgtaagtcaaattttatgtggctaatttggagccccaggctggtaagagctcaggaaactcaggttccataaacagtgcctcattaaatattctttgcataaaataggttgatgaaaagagtcaaactctgtaaaatatttgaagatatttattctaagccaaatatgagtgaccaatggcccatgatgcagccctcaggagaccttgagaatatgtgcccaaggtggtcagggcacatcttggttttatacatttttgggagacatcaatcaaatacatttaagagatggcttggttcagtccagaaaggtgggacaacttgaagagggggctgccaggttataggtagatttaaacattttctgattggcaattggttgaaagagttataatctatagaaagggatgttggggttataataagaggttgtggagactgaagttttatgatgcagatgaagcctccaggaagcaggcttcagagagaatagattgtagatgtttcttatcagacttaaggtttgtgttgacgttaaatgctggtcagcttttcctgaaatccaaaagggaggagggcataatgaggcatatctggacccctctttccatcatgacctgaaccagtttttcaggttacttttggaatgccctggtgagagaagggatccattcagatggttgggaggaccttaaaattttatttttggtttacgaatgtttgcacactttttgttatttccctagaataaagactggacctccaagccaaaattctagggcaaaaggtttctacatttttaagattttggtatatatttcacaccttttaccagaataccgataccaattcttgtactcactgctggtagaggagactggttaatttcacacataatcaccaattcttaacactcttaaatttggaaatatgtgtcttttggctaggtgaaaactctttcatctgtttttaaatttgctttctttagattactagcaagattgtacagtcctttatatgttcattggaagtgaaatattttatttgtcccaaattgtgatcaggaataaataagaagcccctgttttagaccattctaactgtcctttttctctggcaagattcagaggcccaatcttcatcagctgctctaagtggttcaggtcaggaccggctccaggggctgaatgccccaccccaatccctcccagcctctcagcatgggcagggggttttgagattataaacaggttattctgtaaactttctttgctgagccatagaatgtcagccctctaagggcccttagaggtcatctaggcttgttgctggaaaagagggtcctgatccagacacctagagtggattcttggatctcacgcaggaaataattcaaggagagtcacagaggacagcgaaagaagcaagtttattggaaactactttgttacagagtagggcatcctcagcaggaggaggagcatgccatcctttgtgagtgtgtctacttgcaagaaattagaaggagctctacacttggaatgtgtagatgtgcttaccaaaggtaagggctattggtgttatcaatgaccatgaatcttttaccctaagcctgctaaccgatgttatctttaagtaaaattggctgtactcttaagatatccggacattgtacaggcttgctgggagatgctctgtatggccataaatattacataattataagtggtggtcagcttagaatttggctattttcagaccattagcattaaccttaaacacgctttgtgaatgcctgcctgctcacttcaatatggagtcactctagtcgcattttattaaaccagaggcctggtaaacaggggtttctataacaggcctacatgaccactttgtccttgagtaatgttttctatttacaaagtaatagaggtaagtcatagagaacttgataatacagaaaagtaaaaaagggggaaaataaaaatcaatcaagattcaatatcctgaggaaaccacagtcaaaatattagtggattatgttctaaagattgatacaaatcctttctaaaaacaaacttaggaatatactatacaatttaaaatgtgttcttattttaaatagaaacactttccccatttatgtaatattgcttttcaaaataccagtacttcatggccctataatagtccatcatatagatatgtcataaaatgttttactatttcctcttctgagacatttaagctattttccaggttttgctattataaactactctccagtgatgatctgttcatgtcatctttgctcacctctctgattatttccttccaacaggttcctaaaagcatgatcagagccaaagaatattagccattaaaagcctctgcctcttctctttttctggaagcataggatctgataaaatacacacctctgttctgttggtgagccatgtgagctcagacaggtgcagtgatttgcccaaagccacatagctttgttagaccagggattggaattcaggcctgtctcgacagcctctcgtgagtgccagaacccagccaggagtccatgcttcctgactcctatgccatattcttgccttattccttgcattagtccgttttcacactgctataaagatactacccaagactgggtaatttataagcaccagaggtttaattgactcacagttctgcatggctagggaggcctcaggaaacttacaatcacggaggaaggagaaggggaagcaggcacctcttcacaaggtggcaggaaaaagagagagaagcccaggggaaattaccatttataagaccatcagatctcatgagaactcccttactatcatgagaacagcatgggggagacttcccccatgatccaatcaccccccaccaggtccctccctcaacacctgggtattacaattcaagatgagatttgggtggggacacagagcctagccatatcattcctctttgtagaatatttctccactagtgagaactctcaattactgatcaccaacatgtgccaagaactgtgctaagtacttgaactgcagtatctcatttgatcctgaccctttgaagtggttactgtggttatcctaattttatagatggggacactgaggtggaaacacagcatttcttgtccaaggtcatgatgttagtaccttagagccgaaacccccattccttcttgtctgagcagtgtggtccaaacagaactttctgtggtggtggaaatgttctataactttaagccattcgatacaatagccactagctacctatggctgttgagcacttaaatgtgaacagtgtaagtggagaactaaacttttaaccttaattaatgtaaatggaaatagccacatgtaactagtgatattggataggtatctctggagccttaagtttccctgttccctccatcatagcctgactcaggcagctctgaagagggctcccctaccatccttggacctcagcctggggtgggactcagaatagccctcctaacacgccttgctaatcctgagccagagactctctctgagccaggaccttgtgcctgagacagattcttcagctgcctacagggctggcagtcccaggagctacttcctgtgggcatttacaaagacacactgcagagagaggctttttaatccccttttgttacacattaatgaaaatgtatgtctgtaatccataaataataagattgctcctgcaaagctcaaggtctacatttacactcagagtgaatattattatgaacttcactagaatcttctctgggagttctcagcagagcaccatctcccagaagactctgtctctaaggagggaagtgaaggagcataaaaggactgattttttaaaaatcagcatttaatctgggcacggtggctcatgtctataatcccagcagtttgggaagccaagacgagaagattgcttgagcccaggagttctagaccagcctgggcaacatagtgagaccccatctctacaatttcttttaatgagccaggcatggtggcgcat

SEQ ID NO: 55 - DNA, 34626 bp, Mus musculus
tgttcagtctgggattatagcccatgagttaagctctgtggccttaatcaaatcatttaacttttgtgggcctacatctcctcttctaaaagaaaagaaacaccagaatgaattataggcataaggaagaaatggatgaatacagctgaggcagatgtggctggccagccaacaaaagctgacacttttttcttgaaaaacttacaagtgccgttcaagctgagaagcaactgtcagatcagggcccacatttccagatttcccttgcatctggatgggatcaggtgaccattgcctggcaacggtagacaaagagaagctttgtatactactcgcaggccaatgtgcatgccaatcttttaatcaccactttctttctcaaactctcgactctaatcaactgctagatagctccagagttgacctcagggccacagcatgcaggagctacaagatggaaggagtttagtgttcctctggagagaagttccttaggcaggactctatcccgaactttgcaagagtgagatattcagggacactgggcaaagccatgaaattagacagtggtggcagaggttccttgatcttaataaatcacctctagcctggccttggtacccagattaaataaggtgagtataatgacttgaatggtggcctccaaaagcatgtcacgcccaaagccatgagactattagatagcatctcatcgatgtaattagggatgttgagtgttctttttttctgtgatgaggattgaacgcaggcctttgtatggctaggcaagcactgtgcactcgagccacacccttagtcctttgagatcattgggttactgaggtgagtgctcagtctgatgctaagtgtctctgtaagagaccaacgagcaggtgatcctgactactgctagacagctccagagtgacctcatggccacaccaggcaggagctacaagagtgtctgagaagagagctgtgagaggatggaggtgcaggttgaggcgatgcagatgcaagcaacagagacaaaggatcccccagaagctgggtgaggcaggggagaccctagcgccttctgaggaactcagaactgctcagttcttgatttcatctttcctgcctgtttctcagactcttgagaagacccgaggagagtctcttctgtggtttaagcctcttggtgtgtggtctgtgtggtcacatgttccagtgcttcagtgaagagcttgctgggcctggctcagcacctggcattaggaaaacactcaggaattggcacattttaggaatctgtttccaacacctgtccactggcctccttagagacagggtcccagagggaaggcaggactaaagtctcctgtatgaactcccagggaagcttctagcaaatcaaatagtatttacaatgagtggaagagggcaaaggctggtgcttgctgagtgatttttttatgatttatagatcacagacagaagttttcattaatgtgtaacaaaagagattaaaaagtctctccctggagtgtctcttttgatcatcctgagcaagcaggtcagcaccactcaccctgaagatggccctagggcacagaacctggttcaaagcatcgtgagaagactcaggccagctgaattctccccgagacagaggtccagagggacaccaggacttgcttgcttcaccagagtctgtttcctaggtcactagccacatgtggctgtttccattaagatgaattaaaattgaatgcatttcaaggcttagtagagtcctgtgactactgtgttggaaatctcctgtccacagtgaagtcccacagtcaaagaatgttcttcaggagttctcagacagcaagggctagaagttctacatatcaccagccgttgtagcctcagacaatgttttggctctgactcaatatccccatctctaaaaggaggatcatcaaagaactgaccttatggggtcgaattgagggctgtgtctcagcccaggtgtttggagcagtgcctaacacacatgtaaatgctgagagacagagttctctgatggaaaaatctacagtggaggagaggtgagaatgcagcctaggagtaaggaggccagaagtcctggctggattctgatactccagaaggctgcagagtcaggcttgagttccaacccatgcttcaaagctctgtggctctgagccaacccatcctctttgggctgttggttcactggtagagcagagtgtgtgctgtgttgaatcccatatttacagcaaaaagacaagtggcagaactattttagaaactaatattctttgaccctgattcctggtgttagggatgtattagagagaaatgataaaaatgattgctggacaactaaagattgttactgaagaatagtttacaacagtcaaactctaataatagtcatactttctcatcagaggaaaataacaatattgtaggcactcccagaagatggactttcccagaagcacgcaatgctctttggtaagatactattgcatgaatgggaacatgtctctattgaaaccaagaccacaatgtataattatgcagtctattttatacaatatcctaaatttgtttctagaaagaaatttgtatctttagagcatagcccactgatggtgacaatggtttccttgattggaccttgatttatatttatattcttctttttgttttgtctttaccaaattccttgaaacatgcatgtgttacctttgaatgcaaacactgcccatagagaaagctgtgagccccagtactcctgaaggacccacccaaggctggcattccacgagttgataatgaataactatagaatggtctgctgtgtgtcaggggatgaggagactgtcttcagtgttttcttgctttgacacttaagaaaggaaatctggggacaaatgaaacatttctctactgatatgcagatgaagtatgagtgcttgttgtttaaagaaagcaagttaaacctggcatgaaatagttgccatttttctaaactcaaaagtgtcaagtaaaaccatccttcaggtctatgggggattagccccaggatcccactgatggcccattctgcagatgctcacggtcctcttatgcaatagccttccctcctgccttcatgaactgtacactacacactgttatgttgacattgtgtggcattggtctatctcacatccatactgtgagggcatacatgggcataaatatattgaaaagggaatgtgatgtatgccataatctaaatatgataagaacacttggccctagaatcttggctttgccagcctggtatttattaaagagaaataacctggaatgtttcaacctattctgcaggtatcagtgaaaccctggctatgtaatctatgtttcttcagctcttacctgcaggggctacaaaggaacaacttgaatattgatatgcaagctcacagagctttgagcccttactcctgtctctgaggggtgcagattctccatgggctcagactctttgatccacccttgcttgtaggtgttcatgttgcagaggctcacaggggagtctggctgttagatgtatgtgccctacagacctctccatacccctgcagtatctcagccctgcaagctgatcacagcggccataggagtagctgctacccatctaccagttacatccagctaggatccacctaggattgagtgactgactgagagagaagacccaggatcaggtgagacagagaagggtcccaggagtgtgaggtgccctgctgaggaagaacccttgctgattccgggcttagctcccgttcattccctcatcctctaccccagtctgactagcacctaggttgttctattagcctctgtgttcccctacatatcagactcagtgttgcccatagtcggtatgaattcacagtatttatcaagagcaagcatatcttatgaagtggagtgatgatgaaccagttctccaaagacaggaaaaggaaaaagaaatggtgtcgctttgctctgctatttttactgtaaaggtgtaaattctccctagactgacggcctgtaacattgtcttacaaaggctctcagggcatccttaagactcagctgcagagtctatggccctgacagatgtgggagtctcctgccccgtcaatggcaggtactgccttgaggctacaggtaggcagaagtggagaaatccactttgttgtctcaacttcaaagtggcatcccttgtattttgagccccacaagccatcgttagagatgaattccctcagcttccagcaatgttcatgccaggcccctctggcccacatcaggctgggacagtgctaggaaggtttccttaggtctcaaacccagggcaaaagactaactgaggtgcctattaacatgccaaagtggactctggactctagtttctttggcctccggacaagaggaagcaggaccatcaaggatcattctctgtctgtctgtctgtctgcctgcctgcctgcctgcctgcctgcctgtctgtctctctctctctctgtctctctctctccctctcgctctttctcactctccccctctctctgtatccgtctctctctctgtagttgctgccataattctacccaccgtgttataaggcagacaaggaggacctccaccagagattgatggatggagccacccagtcttagacatctagctttcaaaactgtaaactagatatatgtttctctgtataagttcccaccctcaggtgctttgttagaacatcgaaaactggactattggaattttacacctctatgtcattctcatttctacccctgagtacctctgaaatctaaccttataaatatattgtaccttgtaccagtcagttcatgagaaataacatgtatatgcacatatgaactgggtatatatggcgaaaaagacctactgaattccactagacactaatattgttctaaggatgattaatcttcatggttaaatttggctgcatttagaatcaccttagcaacataactttacaccaaggagggtgttttgagacactggacaaggaaggaccacccatactgtatatagctgtgtctgtggcctaggggctcagaatgaataaaacagagaagctggctgcacaccaacgttcatctctctcccattcctgcctaaggacactacatggccagctgcctggtgctcctgatgcctccccttcccctttaacagactacaatcacgcagactgtgagtcaaagcaaaccttacgttgctgctgccaattcctacagtccttacacatccaccggcatagcttgaatgatgtctatcccgaactagtcacataatggaaactgtgcaacctccttaggaagatgttttgggcacacacacaaaaatgatgataatattctgtgacacgaaacaaaaagattttctccaaccaagtgaccaccacatcaaaggaccagggatcttggtgtatttctcttggagctcaaaattgtgatgcagaatacgaacagtgacagtccctggtcttagtgggtttgcattctgatggagacaggctgatagagaatgtatactggtcaatgtgacattgcccagagaaagaagctgggcaaagcgtgtgccaagggaggctagggcacttgagtccttcatatgactatgggtacacatgtgccgcctagggcttggcaacatatctggtcttcttcctgcactcttccttatctagctttcccacaaagacaggagatgctgcaacaaggaacggacattgacgcacagtcagcctactgtgcttcagctgtgctctgcctctcccaaagaggggccctgggctgttaaagaacactgtgttaataccatcaggttaaaatgcctggttatgaaggaagaaaagtcgggctgaggggtgtgtggttaaacaaggcagagagagagagagagagagagagagagagagagagagagagagagagagagagagagagagatcatactagggagttaccacacagggctgctttctgtgtcttttcatgatgtttaattctcctgctgacgtttaattttgctgcacctcacagtgctacaagcattctcccatagcttttcccctctacatttgtttttgcagtagttgcacttgtctgtggatcaggaattgcaagacccctgtggatgtctgccactgcaaattctatacatactgtaatgtttctgatatacacacatctatgataaagtttaatttgcaaattacgtatgggaaaaattagccataactaacagtaaagtagaacaatgatgatgacgtaaggtaatgaaagtaattttcaaacctatgaattatttatctctggaattttccattttcagactgctgctctgttgaccatggggaagggaagccgccaatacccaaaccatggctcagggagaacactatgctctcgtaaatacatcattctcttttttcttttgtagttttagcagtctgacctcctacagaggataaggctgatggtatttgcctcagcagggtgatgtacccagagcctaggttcaatgggcactgcgatgtctgtcctggggccaccagctcaacctccctgccacacactgacacacacagggcagaggctccagacatggctgatttatgggacttattcaccgagtgttggtggagactagctgctgactcaaagggacttacataagtaagcagttgccaaatcagaaagggggtctgggggaatgagaggggcggtaaaccagctgcgcatgtgcactgatgctcccggcaattgttccaatgggagtcctaagtgacagaaggtctgtggagtcagtgggcacagattcagatctgagatccatttcgtcccattctgggcatggttctgggaaaatcacttggctttctgtgctgacagaaaacacaggcctttgtggggtttgttggtaggaatgaatgtgtgtgcactttatgagactttccttggataactaaaatcacagagatcaccaaaccccaagtagaatcagtttctctgtacatgcacacctatgataaaattaaatttataatttagacccagtaaagataattactagtaattaaaacaatatgccataataatttttttaaacttatgaattatttatttctggaatattctactaatattttatgaccatggttaaacaaggtatggtggtttgaataaacacgaccccccacagacccatagggagtggcactatttggagatgtggccttgttggaggaagtatgttactgtagaggtgagttttgagtctcctatgttcaagctatgcccagtgtgactcagtcacttctactgcctgtggatcaagacataggactctccattcctactccagcaccattctgcctacaccccaccatgacgataacggactaaacctctgaaactgtaagccagtcaagtaaacattttcctttgtaaggggtaaatcggtcatggtgtgccttcacagcaatagaaatggcatctaaaccacgtgggtaactaaagcagcagaaagcagatccttgaataaagggggtcggtgattcctaacgatttgtgttccgcccggcgtggtgcacgcctttaatcccagcactcgggaggcagaggcaggcggatttctgagttcgaggctagcctggtctacaaagtgagttccaggtcagccagcgctacacagagaaaccctgtctcgaaaaacaaaaaacaaacaaacaaacaaaaagatttgtgttccgattcagatcttgagtgtctcccatgtttagaaagattggctaccagcaggtggcgctactggaaggttgtagaattgttaggaagcaagacctcctgggagaaagtggatcaccaggggtgtgattttgaagggtgtatagtctatgtgttcctggaccctttctctgtttgtatcctgttcctcacgaagcaagcagagccctctaacacaggctcctgtctgtagagcctctgaacacacagccatgaaaagctgactagcccgccacctggcacaatgaaattgctcagtaaatataaatactgttctgttctaactgtgtagcagtgtgagtcgatgggagggaagctctcatgtttctaagctccagattgcttcccgacaatcatctcaaggttttgattcctcccaccagcagcaacagggaccaccccatttaaaatcacttgccgcactcttgctccagttacaatagctgttcaggaaatcacgctgtggtggtttgaatatgcttggcccagggagtggtactattaggaggcatggccttgttggagtaggtgtggccttgttggaatgtgggcaatgggctatgtgcagacagcctggtttccagtcgaggctagatccccaggacccagtaatgataattcacttacttgggacagaaggagttctctcatgtctcctggaccctggctcctgttggagttactgcccccacaacctccacaggagaggagtggctaatcagccatttaggaacagcaccaaaccctcccacatgcaaataaggttttccccaaactctcagtccaagccaatgagaggtgcctgctgtcaaaccctgaatcaccccagaactgtatatcagccatgcagggaattaaaggtacatgagaactattcctttgtctgagccttttgttcccagagctgtatgtaacacttgggaagagatcttctctcccaaagagccacccagtgtcccaccgcactcctcattggattgtcggcttttcccaggcccagcctgacccgactcagttgaactcagagagtcttggagcaacctggaaggcatggcagagacttcatctccctgcctgcactcacttcccttctctggagccttcccacccggcctggacagagatctccgtggaaaacctctggtacccaggcccacattggaggaagtgtgtcactatgggttttggttttgtggccctcctcgccacatggaagccagtcttctcctaaagagtggccttcagataaagatgtagaactctaagctattcctgcaccatgcctgcccagatgctgccatgttcttgccttgatggtaatgaactgaacctgtcagccagctccagttaagtgttgtactttatacaagttgttgtggtcatggtttctcttcatagtgatggaaaccctaactaagacacaccccaaagcatgccctgagacaaaacactcatttactctgctcttagatttgtggatttggatttcagtgagcctaaggtgaccctctgcactgtgctccaaggcctcagctaggaaacttgaatcctgcccaggtcaggatcggaccactctctgggtgtggtcattcccatatatggaaagagatgctcacttcttacaacctgcattcagcttcctgcagactggtggctggttcccggggaatgtcacaagagaaagtgcccagtggatgctgtagccctagcagaacttagctgtggcaagcagtgtcctgcccaccaggaaattctgttttctgggtgggcagtgacagttccacccaggctaaaagagagtatcgttctgtaggatggtatgagggattgctgtctccgtccaaaaagtacagttttaacattatgtgccagtttctcagatgagctcccattccttaaaagttacagggggcagttggtgtggttatctctctcctgggtgctcagagcaccactgtactgctacagaggtggtcagaaggctgaagttggagatgtttcctgatttctcacatcccaagatccatcagcatttccaggcatggcaccattgtctccttcccctgtggccatcattactcatactaaccccaaccctcccgtactcagccatgatccaagattttcactagcttaccctagaggcagagcgaagcttgcccttgttgtttggttgtggctcagtagggtgcaccaggtgccttccctgcttcatccccatcttccaaaggaaagaatcattgggaacctcactggtgtttataaaatctgattgtgtaaccttcccagcccgtcgagaggattatgaatggccctctgctcacacttgtgaggaaccatctagtgcccatgtctctcccaaggcaggagtttctaagtaattttgtaggtgccacgagaaagctgctggtccttgaaggaaccatggtccatcactggaaaatccttctcctgaagaactggtctcagatccatattcccccttccttgtcagtggtcctgacccctatgctttaagacgtccttgtctgtggggctggtgggcaagaatcagtgttgcacctacagaggactaagttcaaatctccagtacctgtgtaataaactgttcatagttaggtgccccagcactcagctccaggctcagtgaaagaacccttcccccgtttttttcatgacaaggttcctctgtagccctggctgttctggaactctctataaggggcagcctcgatctcactgagatccacctgcctctgcttcctgagtgctgggattaaaggcgggtcccactgctgctcagccgaaaggtccttcctgaggtgggccagatggagaaaaacacccaatgtctccctttggtttccatgaatgcatgcatgtgtgaaaatatcaagtacacacacatatacacaatatcatacacacataatacacacaccatacctatccaaacacacacatatcacacacacatgcacaaatcatttaagcaccacacacacatgcaggcacatgcacactaataaatctccagttgctatgaggcaactaaacaggtagttgtctctctagttagagtcagtgactaaagggggatggggtgctgttcaccccccagagtgtcaaggagccttgagtgacaactttctttctgggccttagagggccctgattatcaggtgttaggcttaggtgagaggtgctaacacctagtgatcaggaatatctaagatgcacccactgccctgggcctggggacaccagaggctacttctagaactttaggtggctggagacataacagaggtatggtttgaggtgttagaacagtcccttggtggcagagatggctgggatttgacactgggaggggccaacttccaatctgtctctgttcatcaagtagagaaactctggaccaggcatcaagttctgtgcagatgactagcagggcaccaaggtgtaaggagggcggggcgggggcggggccggggttggggcaggggtggggcggggcttgttcttgctttcccaactcttacagtgctctctttatccacaaggacccggagtgcaaaagcaggtttgccccccacccctacctccagtaccaatgttcagttgtcgtattggctgcaataactttctgcctatgaagcagagtcagtctgtgggaggtccccagcatggcactgtccctggacctggacggctggccggaagcagctgtgggacccaccgctaccagcctcagccccagtggtctttaaaaggcggaatttcctcctttctctgaactccatctctaacttaacaatccagaataaagttaagttttcaaaatgctattaattatagaagggagaagacagaggtccagagaggttcagtgacttgttcagagtcacacaggaagtcagggacaaaggtgggaggctttggctgcactggtgtggatataacatgggctagtgacaagcccaacccctctacctccctcccctgcactacacaaggaagatcatttcctattcctggcttctctgccagcctgaaagacggagtgtagaagaaacatttttgtacatatatcaggatggccttgtggggtgggtaatggcttttgctgtttgacatctgtttcccaggagactctgggaaatgcaggggcagagtccccaacagcagctgagggctgtgaggctaggtacctgcttgtggagtttttatcccggggcaagctgtgtgctcagacttgaccatgtttgggcatggaggctcgacccagatgggactgagactgcttccctggagaccagctgggagaccaaacttcctgctagagctcccaggcctgacttggggtgggggtgggggtggggcgagtggagagaaaccatctgccagccagcggagacccagagaactgtgagtgctacatcccagagagcttgggaagggcttctaggaagccggggctgaggggagatggtgggagacagcagcctgtgatggcatggatagggtggtgaaaatccctacctctcctgatgcccatcagagttctggcaccggagggcctgcctggcctgttgaccctggtctgggcgtctcttttgtggccagccagtcaggaccagtgttgtcacttgtcatcaggatagggatcgacaaacaggcctggcagagtgcaccaagctccttcaattcctcagttaatgatggcgcctgtttatggagggcatcacttatttatgaggtgacgctcagcagtgttggtgggtctacatcaggaccctgaggagggcactattgttcttgttttaacagtcatatggttgctaagtagaaaagccaggactcggtcttatatctgatggcctctcttctctaaactcccccaaaacccttacatactctatccccagtccttctaaggaagagatcaacaacccaacagttatgccacataggactcttctttaaccctttccaactttcctagatcaagcccagacctcaggtgacttttctacagaattccatccaaggagtcctgagatacttaatgtttcacatccggcatagtctccctgaaatctcttctgttatcatggaaacccatttcttcctgtctcaggccacagtgcatatcagagcttcatatccttcttgctggaggttctcattaggcccatcccagattcccacctaagctttacatttaaactgaactcacttcatgtagctggtgagccatcgggacattacaggcacaaccagtcacaggagcgagacctctcaggaacaggtgacatccttccttcctttcccttctgagcttccatgctgtagccttgagcagactcctgctgtcatttatcttgggaatgctcaggagtctaggagggctcactggaaaaagccagcaccacaaggaaatcccctcaagtgtactgggcttctcctggagataattggtgataatggatcctgagtatttaaaagctaactgtaggctgttaccagaggccagagcagacctctgtaagaaagctccatgtaagttgcaaagctccacgtattatcatacttaaataagagcaatgttgttatttggttgcatcccctcatgcctgcctgccttccttccttccttccttccttccttccttccttccttccttccttccttccttccttccttccttccttccttccttcttatgaacctatcacttgggctaatctcacttctctttgccttcttggtgctagaaatgactgttgcctccagtggccatggggaagaagctggtgatggcccagaagcgcggagagacacgagccctctgcctgggagtggcaatggtagtgtgtgctgccatcacctactacgtcctgggtacaactgtgctgcccctctaccagaaaaggtatggatgtctccacttcctggattgacctaccctacccttgacccgtcacggtagtcaggacagacgaggcattcgtcatcttcaggctcaggggttccagttctgggggagcagaggagtgagagactccccagttgggactggtgatgacaggtgcaggattccttgggggtgggggtggagctcacaatggcagactctggctgcagtctgcacaaatgcctctgagatgggagattcctctttgatgagcatgcctttccttacctgggttttcccaataagcagagagtctttgcactgtgacatctgttcccacgaagtttatggaggaatctcagagagtgcagtgtaccctcgtgcctcacactctgtgacatgtcatccctccagcctttaaagaagagctgtggaattcctgatggctcttgtctttggaacaggcacacagtgctctctcagctcacccttagctgagtctcacgccctccctctgtgcatagtctggctcctgaccatcctctcttgtctgacagtgggtctcccacaggatacagggagctgagtcacgatccatttgcttaagagttgatgagcctcttgggctctcctgggcctggtctgcatccttgctttataatgctgcagttgtgccaggccagagtctcacccacgtggggcactgctgagcaactgtgtgcctccccagctctctcctgccaccctccaactctgatcagatcagacccctcatgtacttcctcttttttaggggaaatagctgagactctgaagctactcagcccttgcctcaggtgctgtgtcccagccccactccccaaatcacctatcccctgtgaggtttccatttctacctgtgacttggagataatatggttaagaaggcctcagacttggctgctcatcacaatcttatgaagagcatttaaaacaccactagtgcctgggcccaagcacctgagaaattctgcctcactttctgtagagtgggactcagtaagctatagggatcttaaaaaaaaaaaaaaaaagtcaggtgcggggtggctagcaaggtcagagaaccattatgtagaaaatgtccaagagccaaccagtctgaaattattgtgatttatcccagagtccaggactctagggccatggattcagttaatataacatgtttgtggcaaaatgaaggtcccatccatggatctctcaaaagcctctcagggtgtcagggattcaaagtgggtatgtgtcatccttgtctctaagggatgtttgtgtgtgtgtgtgtgtgtgtgtgtgtgtgtgtgtgtgtgtgtgtgtgtgtgttgtctccccagtgtgtggacccaggaatccatatgtcacttgattgaaactaatatcaaggaccaggaagagctggagggcaagaaggtgccccagtacccatgcctttgggtcaatgtatcagctgtgggcagatgggccatgctgtatcacacggaagacactcgggatcaaaaccaacaggtaacaaatgggggctgggtatattagcctgataggtctgtgagcttgtccccagctgcccatgtctctaaagccaagatatagtaatccacctgaatggaatcttatggctagcttgaggtggagtcagccttggatcttccatgtttgaactgacctggacagacctgggtggtttgaattgcccctattggctgtgcggtgggtgctgaggtcctgtgagtctctgtttccatccttgtaaatggatgctaatgccatacctgaaattgctacagtaacgttcagtgctataactaagcttaacactggttttgttaagcttagatggttctcatacatagccagaattgggatgccccagtttataggctaagctggcaaatggtgggtgctcagagcagagaaacagttgttactgttaattcttctgtcaacaaagctgggtgaatccatgggccacctgggagtcagggctatagcaacctccataacaagcatttaagagatttcccctcatctgcacctcccttcctgtcaattagccctccctattgcacagacaggttggttcccttccctcctttccatttctttacttccctcatttatctaacaaccagagtcttcccaggcctggcccatgggtcttaagaggagagaacttatataggcgtactaacattagggagggtgggctggtgcctcagacaaccgacaggagatggatgggctcaagggaattgccaatgtggcccagagcaaagaagtgttaggctgggcttttcaaaataggcaatcctgtagccacagaaacaagaggtgagggatacagagtatcccagtgtgtggtgggacctagtataggcatggagaaaaggctagacaaaggcagtggctagaagcataggcatgggagaaggctagatttcagaaatgccatctgatggagtggccagaagagactaaaggtttacggtctgttgcccgaggacctcttctgcataactatggaattaataataggatataaattggggcgtcgcaactctagctatatatgagagtcatctagacttaacaaaaccagaattctacactaaccaacggaggcagaatagatcagtaggtggagccccttcgataaatctaaggtcagatgctattgttaggagccactggaggcccagagtgaccattcaaacaatgctgggaagacagagccagcagccacgtagtgtcatttacctgatggaaaccaggccacagcagttcccagtatgggtgtggacctgtcacaaggataatgtaacagtcagaattgaggctgatgggatagaaagggcaaggtgccttgtgtgtatgtttggggctgggctctgtaggctccctgatgctggggacatggaaggaaagggtgggagtatgtagaattcagatatgtggtcatcgtcagtatgactctgtgtgggagaagaacctcaagaaccacaaagattagctcctaccagaggtttctgcttcctcttgggcacccagcaaccataatgtattccaggagtgagaaaaacctcttgaaagatgacgtgccacggtatagtgctctactccaggcacactgggttagggctgcttcctcattctgaagagctagaggtagtcagaaccctgtgtgagttgtgagcagcgtgcattctttcttctctagtaagggggctgttaaactacacacccacagaccacaaacagagagttaagagcagccaaccgtgctgggacagtcaaacccatttcattctctggcccagcatcagggtgtatggctggctgatgctctggcttggtagcctgccttctggacatgctaggctcttattcctcctccatggcctgctcttttctccttccatcagcttcagtctagggaaggggttctaagtccctctttgcagcgtatgctaacacaagtgaagcctcagactagagacagggtctttatcattccagcccatgcaaataactcagggctggttgtatcaggccaggcagagacgggtgaaatagcccagtccttggcttgaccctagagagtgaactcagggctaggattttgaccaacagatcaagaatgcagaatctagaggaacctcaagcacacaaaagacacagcagtgccctgggatgggtgcaaatccccacatcagagctcatgctttaaatgggaaagcagcagttattccagcttcgtagataagacagcattatattatttttgttgttgttgttattatttttttcttccattttgaacttataagatctgggctcttgctaaatgctttatataagtttcctactttagtccccagggcaggtctaggtaggctccaccacaaatgacttcacaagatttaggagtgtgtgctagttgccaaggtcacacaacttggaagctgtggttgaacctgggcctacctggctgacaaagaaatctgtgcacagcggtcaaggttacctagtgacaatgctgctactaaacagcctgcaatgctcaacacctctgaaggccagattccctaggactcttcctggctcgctggggacttgatcagcctgcagctcccttagttcccagatattagcaccacagtgaagcttttccatgctgctgggttgggaagcttaggcggtaactgagtcccaggggagacactaactcaacgcttgcgcactggcatcaggtttacacatttgaccctggacatgacttcactagaacatggtccttgaacatctccacttcccctcagtccaaaccccacagggcaggagcctgtgctgatggggacccctctggtgttccactgcaggtctacagagaggtccacccttgaggttcacaggcggcacccagacctggtagagaaagataaaacgcaggtctccactctgggatgtctttccagagctttgcagctgggtctcatcatctccgcaggccagaaggttcctaatagcaactaccagtgccagagtttaaatgtgtgctgggctctgcctgcctggagctctttactgcactttctctctttcttttggattctgtcacagagctgcatgccaacatattttctttggttcacacaggattagacttcaaagagtcttctatttgaattttagccaggattttgaaattatgagagtttgtattaaaatcaggttttctggcttctctggatgtattgctgcatggtgtggtatctcttctccagagggagtcacggtgacaattctgacaccaaggcacatgccaggtggtccctgtcaccccccatgtctagcttcacttctcagtgttacctgtatgagcttgcatatagaaccccaccttgtgcctggacttgtattactcaggattttctctagctcatcaccgtgacatcactaaaccatctcagtaatgaaaccatgaaggctcagagagggtgagcaatctgcctaagatttcacagcaaataaaaacagatgcaggtctccaaccgagccctgcatccaggtgtgcagcatcatgtgagtgataccaaggccaccatccatacgcggatgccaaccatgctcgccagtggctgactcctgagcccaaatctttttctcataccccaaagcctcaccccaggcctcttcgaagtgtgtatttacaagcctaagcactcctgcttctcccccacagtgctcctatatccccaggaacctggacaactaccagacagccttggcagatgtgaagaaggtcagagccaatttctataagcaccatgaattctattgcctttctgcacctcaagtcaacgagaccagcgtcgtgtaccagcgcctctacgggccccaagtcctcctcttctccttcttctggcccaccttcctgctgaccgggggtcttattcttattgccatggtgaagctcaacaggtccctatccatcttggcggctcagaagtaggccagtcccctctgcaccacagcagagactcaccaaggaactgcagagtccctagcaggctacccatcactctcttcctttgtctcctatttcatttgttcaacatctttggaaagctgtttcttgctcaagaatgcgtatccgattcccagtgactttggaggaccaagaagctcccagttacagcttcccatccctgacttcagttggttcatatctgttacctgcaatgacgctgtctgctaccaggatgatgaatattgtcacctctatccctacgtgctctctcttagctccccaaatacccacccatcacattcaggatgttgtccttggccaaattcagcttctttgaattgtcataaaaacaataattcccattgacagggcaactgaatgtactgctttttgttaaggacattaagtctctctctctctctctctctctctctctctctctctgtgtgtgtgtgtgtgtgtgtctgtctctctctctctgtctctctctctgtctctcacacacacacacctctaaaatttaaaaatactgctatccttcagtatccacagggaccagttctgcgacttgctcagatgtcacaaatcccttctataaagtgatgcagtctcggttgcggaagctctgtccacctttctccatgctgcagtgtctccagatgactagtaaacacccactacagcgtcagtgctgaaaatgatttcattctagggaccaatgatggggaagggtccgtccatgctcacagcagatgcaattattacccaaatactttcaatctgcccttgattgaatccaatggggcagaacctgccgatacagatccaagcatatacatacacacaggaaaaaaaagtctacgaggaaataaatacaaatgcctcaaaatattaaccatggcatggtggttaattttaattttcttccttaaccccgctccattttcttttgttattttcattcttcaataataggaagatcatacagtgttttgttttgttttaatcagaaaagtaatacatagctgttattttggaaaatattgaaagggacagcctttagggagatgaggatgggcttcgagaggctgtttctcccatcagagacaagctgggaagacacagttgttaggccccctggatggaaggaaggcgcttacttagttgagcatttgtagcttcctgttgctgatgctttcaccatgtcccctataaacacaggtgttgggcatttgacacagttaatgttcacagcattcagatgcaatcggggttagaatgatgcccctaagatggcaccgttggctttacaggcacagtaagagagaaagaggcaagacctgaggtaacaggttgtgctgccgtgccttttggtgttctctccacatgcagatgatgtcaccacactggatttgacacttctctccaggcagccctgatgtcgcctgtggccctccagtttcttatccgtggcccctcctctcaaggaaaaatagctcatcattccccaaggcatctccctccaaggtcaggaaagccatattctgacattatggtagagtttgcaagatgctaccaccggggagattcacatgtggctagcagggctctttcttacaactaccatataaatctataattatctcccaaatttgaattcaacttaaaaagagaaaccaaaggttccaaaagggagtctggctttaaggggttgctttatgaaggtttccaggtccctgcgtttggggctgaaagacagaaaaactcagaatatccaaacagcaggagaaaaggacacacccttctagaagaatcagtgtgcagggatgcccagctcccttgccccatgcattagtcatgacgaccttcgtttcctttgggaaaatttttgccgtcctgtcaacaaggactggcctacttccatcaaaagccacacccatccgtggtcacagaactgcatgggcagcgtgagtgtgaaactgtgggcatttgagcgtgatggacttagaggtgggagaaagatgatcttggcagcaatggctgcctgggaacagagaggcctcccctgtcctgaataggtcactgctaatgagtgtcaggtgctttctgtattcttgcattgattcttataggccatgactcatgtctgcaaaggagtacccggtccatttctcaggtgtccttttttcctaaatcggcctccacatggggatcagagtcatcaggacccctgggcttctgatctaatgtagaaaggatccctgtgagatgctctaataatgccaggcctcacacagctccagctcttcagccaaggctgtgactcaattcatgacttgaagaaagccggcctcttccatgtgtgaatgttacaagggaaaagcttgttctgtgctctctaatggctgaagcctggaagggccagggatatgagtcaggtgtatggatgccttcaaggagctgtctattttcctgctctgcccccaaccccatcaccgtcactgtggtcgcttcttcgtggtaaagaaccagattgcatttaaaatcatgtaatataaaaatcttaatttttgtgattcaccaaaatgattccaagttcctcattaaaacagtaattctcaatctgtaggttgcgacccctccaggtattgaataacccttttcacaggagtcacctaagactattggaaagcacagatatttacattacaattcataacagtagcccttgggtaaggatactgagatggaaatctcatcttttcttaactgttctcgtaaaaatatgttgtcagacattccagatcaaggcagcatgatatacatatcatagctgatcaaatatggaacactgattggagtccagctgcttggttaactagacattaaatatattttcaaaaattatacaacagaggcaggagagatgcctcagtggctaagggtgtgtgtgtggctcttgcagatgacctgggtctgattctcagcgcctacatcaggtagctcacagctgtctgtaactccagctgcagggaggttgatacctctcggttccatgggcacctgcactcaagtgcacacacatgtgtacacacacacacacacacacacacacacacacacttaaaaataaaaataaatcttttaaaatgcaaaacgataagctttctcttggttggaaggtaaaattatttttcataaaatatttttgtaacatgtgataggtttattactttgaaataaagcaagtgaaatgaaacgttttcaagttcctagttttaatttgtaaaatggcaatgcttggctcctcagtatttttaagaagtagaataggtcctgagcctagatagctttagaaggttgggttagtgcatctgagataaggatcggtctctccctatcgtggccacagaaatctaaagctctcctctatagcagcagttctcaccctgaggtttgcaacccctctggaggtggggggggggacgtcaaatgaccctttcacagaggttaccaaagatcatcagaaaacactgatacttacattatgattcacaaaatagcaaaattacaattgtgaagcagcaatgcaaatagttttatggttgggggtcatcacaacatgaggaactgtactaaaggatgcattaggacggttgagaataactgctctgtagagtccttcagagtctcactgaagcatggagagaaggttttgcttctctgcattgcccctgtgtctcagaagggtcaatgcatagattatctccttacctacaagaatcatttcccgaatcattttcatgtcagataaatgcataactagggggtcttcttgggtacccagctctttccctctgtactgatataacgtacaccatcatcagccagatcccctaaagggtaaagaaatggggaaaggaggtatgtcagagcagcaaactccaggctgaatgtggatcaagtgtataatatatccccaggtttgttttatctttggagctgaagtcaaaggtagattacaaggactttgatcccccttaaccaccatcattccacacaatctccactcccaacgcacggggaataaaaagagaggctcactaagcatatacgtcatcaaaataagtcttctactcctgtacactgtgaggggagatcgatctgtgagtgccccagcagcgtgtggagtccctcgctaactctggataacatcaaaactgcattacattgtaggaagctcagatagtgccagaactagttggtgtcagaagagaaatagctttcccatcttgcgtcagaagcatcgccagggagaaaaacccttgtatttccacatttctctttagtgacagtctacatcaacacttttgatgaataactcactggaccaagctgtagcccttccattatgggatatatttagctaaccattccccgagcgacaatctgtcatccctaatagtgataagaactaacatttgtgcagcacctgtgtgtcgggatgtcggccaagcctttccacgtatggctcatttaacactaatagcatttgaggttgatactgccatctgcattcatagatgggttaactgaggcacagggaagcggtttaacttgccccagatgttagcaagtaggagagttgagaaaaacaacaacaaaaaactctagacactgtagcttcagtatggccctcaccactgagaacctgttctcctcctcctgtttcttctccttaccaagtatgcaaaggccaggtgctgagagccttccagatgtctccatagcaccccatagagcccaggctctcacagcttctctatgtattcttctaaagagccaataaccgaatctgtatcccaaatatggacacttgaaatgtgggtgctgccaagaaaataactaggctgtctacaatttgccagaagccacaatttctggcccagaacccatttggccactaggaacccaggcacgctgtaatctccccaaaccttgcattgctggccactacaaaccagcatagaagggcagcagagttagtgagactttcttagtgatcccactctttccacaaagttcctttcctttctttagtcagtgtttacctaccacagacttaattatctgctctagaattgtcccagtagttgacagcataatcacttatatttatcttaatcactaataacaatttggccatgagacatctttttggcatccaactaaattttctgtgaatatgttggccatcgtccttcagtccattttttttttattttttgcgtttttccaatccttgaaagtgaattctctgtgtcaccaggaagaacactagtgtggaacagccaggacccttgatgaagctcctggccccattggagctctgcgtgctacactgcaccactacatgcctcactcagatctcacttcccaatggaagttggaaacacattcaatcagagttgggtcttgtgagccccactctgtgaccatcgcaccaagaatgggtaggcagcattcattttcagtctctgggggcatcctttcgagggcttgttctcattcttatatttctggagctaagtgcacctcatttgtagggccctcgattctaagtttgcatttgtctttggtgataactcttgaaggaaagacatttttgaaaaatcaagagtccaaattggcttgtctatgacctcaggcagttcatttaacttccccgaggctcactctcctcaactgggaaatgagagaaacttcatttgttttatagggcgattaggatgattgagtgcaaatagtcagccaggatgcctggtgcattgaagatgttctgcaaacgtttgctttgttctagcaagccagcctccacactccaaccatgcagattattttctgttgagagctctgaggactctccattgtcacccccttctcactagcaatcatctttcttgagagtatgactaaggactgccatgcccatctttctttccctgttcacttaaaaatgtcaatggactgtctgtgcttaaacgttcttgacgatcccctgataaacttagatcttgaaggaaggcagttttgcccttggaacccacacttctgccatcacaacatctcaagaatcaaaggacttttgctctgaaagtccacttcatggcagaatcgttacccataataatgataggtctggacaaaataatcttcccagtgtgaggcagccaaatcccttggcctagaaatcaggcttaattggaaattaaattgcatttccatgccacctgcgggatgcctctatccacagctaatttatcaatgtgatgccttatctggagggagcccatgggaatggagtggctgcctcagcaaaattgcaagcttttacccaatgaaagaacttcctttgctatttaggctgaactcttggagtttctcatttgaagctttatgtgcccattagccactttttctgccaagtgctatgacaggatctaggaatatgggcaacaattggacctggctccatgttgtagtgttcatggtccatcgatggaagactcatgcaggcaaaacattccaaagccacagcacttagtcatctggtgctgagcagcactgagaggtagaaaaggacactgaatggactcggatacaggattccatctttgtctacttgtcttgaacagtgatgctgatattttgcagtggttggggctttccagcttcttcaccaagctctgaacacttcattgcatcctgtgggcaactgtgagaaacagatagactaaggctttcattatccctgggatctttactgatgaagagcccaaggcttagaaagtaagttgcttgcttgaggtcactaccttgtacagaactgggattgaaactcaggtaatttctacagagcctttgcctttgaactttatactctagtatactcttatttccatcaactttcagatttgaaaatgtctgactatgtcgggggttattagcatgtgtagcgcttttcctgattcagagattatcagttctttactagaattgcactctctggctttctgtgactctctttccctctatgtaactcccctcttctctgtctgtctgtctgtctgtctctgtgtgtgttcatgtgtgtatatgtgaatatctgtatataatttgagaattaaattcacaaatataaaacccaggacacagagatcaatttgtctgaataaaatatgcatgtaagagggacagactgatgtcatggtttgggctgggaagaccagaccaactcttacatagagtggacagcatatatttaacaagattatagcagagaatttcccagatccagggagagagatggctaccagaccaaagggtcttagaactccaaaccgacaacacagcaaagacataaacacattatgctttagttaaagcactattaatatggaacaaagaaagaatatggaaaatgacagaagagaaactccaagtcacatataaagacaaattcatcaaaatatagagatttctgaagagaaactctaagagccatcagggcatgaaatgatgtatttcaagatctgaaagacaataactgccagccttgatgattatacacagcaaagctactcctaatgatagaagaaaatggaagactttctgttaaacacaaactagaagactctatgattacagaagatacagaaggaatcttacacactgaagagaaatataaacacacccatgaggtcacagggaagaataaattgcaccaaaatagaaaagcaactaagggttagtaaagcaccaaccaatatgaaaacaacaaagcaacggaaattagcacatacctttcactagcaactcgtgatggttcctgttctctgattataagacacacaacagcaggttgcatagaaaataggacctaactgttagttatctttaagaaatgtaccttattgccaaagacaaggaagccttagggtgagaggttggaaaaaggtattccaatcaaattgaactgaaaaaaaaaaaccaggtatagttatactagtatttcacaaactagatgtccaactaaagtaaaagagacaaagataatgtaaggggaaaaaaacctcctaaatttctaaacctacacacatcaaactcagtgtagtcagctttataaagcaaacactacttgctggaaaggcactgactgacctcaaaaaatatttttttatgagtgactacaataatccacccttaatagcagactggtcagtcagaacaacagacaagcatacgaacaaacaaacaaacaaaatcttcccagagctaaatgatatcacagattaaatggatttaatagcatctacagaatattatacccaagtactacagaatacacaatatttttctgaagcccatagaattttctctaaattgaaccatattttagaacatgaatcatttcctaacagagacaagaaaattaaaatgatttcacatatcttatctgatcacaacaaaacaagataggacatcaactagaagagaaactacaaaaaatattgaaatccttggagacttaagaagacactatttaaagttaactaatgggttattaaagaaatcaggaaggaaaatgtaaaacttgtagaatcaaataatgatgaaaatacaacatagcaggacctgtgacttcccatgaaaacagttttatgagtgaattttatagctatatattttaaaaatcaaatgatctcgaacaagcaacttaatgatgcacccagtgtctgagaacattatgaagctaaacccgtaatcagtgtatggaaagaaataagaaacaccaatgcagaaattaatgaaacagaaatgaaaataacacaacaaagaaccatcaaacaaagagttcttgaaaaaaataataaataaacaagacctcacaaagccttagttaaacttccacaaaaaaaagaccccaattaattaaattagagatgaaagggaaaaccatataacaagtaccaatgaaatgtagaagctcattagcgcatactctgcaaagccactttcatataaatctgaaaacctaaaagaaatgaacatatttctagactaacctactaatgtcagccaacaggacttaaagcacttcaacagatatattgcaagctgtaaatttaaatcagtaataaaattgtctcctaactgtaaagcccaggcctggggcgggggagtatttcacagatgaattctaaaaagtctttaaagaaaaattaatatcaatgctttttaaattcttctacaaaacagaaaagaagggaatgccaccaagctcattttatgaaatcaggattatcccgataatcaaactggatctggacataaccgaaaggaaaattatcagcaaatctgcctgatgaacatgaatgtaaaattattattattagtagtaaaattcttacaaatcaaactcaatgatacatcaaaagatcattcatcatgatcaagttccatttattccagagatcaaagatggtttcaatgtagacatagattgaaggacagaaattatatgatcatattgctaggtaaagaaaggccttggacaaagtccagcctcttttcataaaaacccgaggaagctaagaaaagagtgagcctagatccaacatcactctaaatgcagaaaaactcaaagcacctcctcgaaaatcaggaataagacaggatccttccctttctttacttttgttcaatagagtacttgaagtcttagttagagcaataagacaagatgtgtaattaacagggacacaaataggaaagaactctggctatataaaaatgaacttcaaataactcccactcccaactagaacttaggttaatttagctcgtttcttttctaatacacatttcccacatgcacatctgttcactgattggaaacacgtgctacaagggatttttacctatagctctccactgggcttcacactctgcagttccataagttctgttgtcgaagtctatgttcagaggtgaaacaaaatacatgttaagcactagtttgttttactgacgtttagatcatctctaactttcccttaaacaatgtgacaatattatggtagacacctctgaatgctggtcaacatgcagtacacgtcttgtggtaagcctaggagacagtgcctgattaaagttggatgaacagtctcctgtctggcccaggctttgtctggtagtggtgggggaagagagaaatggaaaggactagggctgcttaggcagagctgagagaagtggtagcactggagttcagggatgattctgggaaaaaaaggctaaagtggcagacaggagatgactcatggttccagtcaggaacttctaagagaaatagtgaagttaggagacaggaagattggctatggctttctgaggggtcagcagaggtcacaggtgtccatttaagtagaaaggtctaatgactttctccccttttctccttttccctctctccccctccttttctgtccctctccccatcctctgagctcccctgtgccagaccttgtgttgactgatgagcatccctaagtaacaagacatggcccctgccagaccacaggcttccagtctaaccaaagagtcacctgtaggcctggcatgtaaggaaagagtccagggaaggggaacttgggagtcccttctcaggtaagttcgatgactggagttgggtggggtggttgctgtgtctgaggtatgaagagtcttctggagagctaccatttgtgggaggagccaagtcatactatccccacaccccaggcaccttttggagaaggctctgccttgagggcacgtagctcaaggagctagcttgttttgtcctcagtttccctgtaccaaggaggctgatagtagagctatcttgactgtgcaatcatggccttgactttgctctctcatagccatctcaggctctcaggagcatgtttgtactccaaagtctaagatgcagtcatcatggagacaatgtctctcacctgctctttgtctacgtcatggtgccctgggagactgacgccatcaggggctggcagatactctcctgggtccagctttcagtttgtagagtgtgtgattgttctgccaggagacttcatgaatgaggctggctcttttgataagggcagcagtcccatgggatcagggctggtgcctgagtgacctcattaaatacttcgttcaaggtcccttctccaaatataaccacattggcgggttaaaacttcagaatgtgaattttatgagggggcactgtttaatctacaacagaagtctgttcctctaaaacaagtcacagctctgatcttctatgtgacattggcaagtgctccaagcttccaggcatggccgataagaacagaaagctcccaaggggaactggagttaagttccttctaaagccacaggagcaattgtcattcctcttgtttctgtcacacttggaatagcaggccaccagtccaattcttgtgagtggtgagcagaactcaccagcacatctgtgaatctctgcaaatccaatatgcctcatgacttagagatatcccgaacactgagcgacagttccaagctgatgtgtgcagatactgagaagcaagcctgtggacttggtttggccggctaagcacgggaggtttgagaactgtcactcaaactgacccaggttaatcaaaagattacataaaaaatgtgagataggctaaccccagcctctttgagaaaagctccagggttctatctccctactggttcttgcttatttctcttccaccaaacaacttcatctaagcatggaatgaaaattggtcagactggactcccagctggaaatacttgctgagtggtgttttctcccttctccctgaagttctgactgcttggccaattttccctcactttctgttatttgactgaaaccaacctgtaagtaatggtgttgagagctcaggactggaggctggcagccttctctgaaaatgtgattcttcagtctcaatgaagctcttgacagcaaaactccagattccaaagtaagcctgtacgttgcctcttgccttctctaaaatgtgtgtgtgtgtgtgtgtgtgtgtgtgtgtgtgtgtatgtggtgtgtgtttgatgtctgtggtgtgtatatgtgtggtgtctgtgtttgtgcatagtgtgtgtgatatgtgtttttgtggtatctgtgtgtgttgtgtatgtgtggtgttgtgcggtgtggtggtggtggtgtgtgtgtggtatgtgcatgtggtgtggtaatggtgtgtgtgtgtttatgtttgtggtgtctgtgtgtgtggtgttgtgagtgtgtgatctgtgtgtgtatgtggtgtgtgtgtgtgtgtgtgtgtgtgtgagcgagagagagagagagagagagagagagagagagagagagagagagagagagaggctggaacaagataaacctttcagatctgtatctccattaacctcattccttccactaccaccctactaattccattaaagtatggaatctacccatggtttaatccatcgatgtagttaactacccacttcctaatgactagatgtgctggctgtggacaaagccttcaacactggagtcattgagggcattttatatctaagttgcaatacccttcttgtttctgcagcttaggtctccatttatgtttttgtttttgtttgttttttttaaattagcctttggaatttaatatctagaaaatatggggttattttctttatttacatttcaaatgttctcccctttctaggtctccccttcagaaacccctatcccattccccgctttccctgcctctatgagggtgctcctccacccacccactcctgtcctcccgccctgacatttccctacactgaggcatcgaactacctcaggcccaagggtatctcctaccactgatgtccaacaaagccatcctctgccacatatgtggccagagccatgggtcgatccatgtgtactctttggttgatggtccagttccagggagctcctgggggtctggcctgttgacactgctgctccctccatttctgtaaatggggctcaggtgagctctccacctttgaggttcttgtgcatggtaagatggtggatgaaacagtgggcgttgttgggtgcagagctcatgggcacattgagtgcagagctcatgtacaatctttgcttcacgtgtaggtgttacatactaaatcccaatcccaaatctggaacagttctttgaaaccagaagttccttcatttgggagatgaacacatggaggccaagcatagggaagctgctatttagtgaaacagagagagatttatcttctcatcaaaaaaaaaatcacatgatgcaactctatgaagtcattgtgggagtatttagtgctggggtctctgaaatattgttgatttatatttattggcatacataagctgtacacagtagtgggctttatgcagacatttgaactctatcatgtagtttgaccacattcatccctcctgtacactctacttctccctcccctctctttctagtccctttttttgatcagatagaccaacatctacttcatgtcatatatatgccaatgcgcacgtgcgtgcgcacacacacacacacacacacacacacacacacacacacagtgtagttttattgaaagaatgaaagtgcatcattttcagaattgcagatgggattttagggtaagtctttggaggggattaagtcatgaaagtggagcctttataaacgaaactatcggccatctcctctgtccattgatgtcagcgcacaaacaacagaagagaagacctaacagcactgtgggtcacctccatctcagaattccaactctagaatggagaactaaatgactcacagccaatcagttggggccattcagtacagcagcacaaggtctaagaaaatgtgacaatttggattcatgatcatgtctgattccaaagttgttgctcttggaactccaaaggacacaaaatgcagtctcagtcatgcaggcagagaactggctgatgttcacagtctttctccccctatcctaacagaggaagaaggctttcttccgcctccagactgcaggtctgcggatttcagaagcatggtcactcttgagtttcccctggggtcttggcttctttctttcccccaactggtccaggagtctctactatatccccaccactgctttctcctttgataagatctccttagtttccatatcatctgtgtggtcctcaggcactaggttcttcagattggggtgtagatagacaatggggagatcatgaccccagctgagctgtaatgggcatcgctgcaggcacagcaatagacagccacatggacaaccagtgcagactgctgccaggaagcccagagtagacagagcatgaggaaaactcagatgggtacaagataggggccatgatcttgacacccaacctcatcaaaggcatgctaccttatcacttgtcaaacttcagcacctagggtaggaagtctgtggatttggggtgctgagaaacagacaaagacaagacagacttcaaaaagggatgtcatgaaagggtactgatactctccctaccaagttgtcattgctcaactctcatgtaagtacttgaggtatctactatcacaagtagaaggtctgtgtggggaatctgttcagccattgacaaactctcaattagagaacaagccatcaattggggatggcttaaaagactttggtagtatggagcttggagccagaaggaggacctggctcattaccaatttttctcccatgtttggcctcccatcttcttgctattagacagagctgaagcacgtgaggcaagaaaaatggccctcttgagctttaccaggaccctgctatatgccaggcagtgtgtgtgtgtgtgtgtgtgtgtgtgtgtgtgtgtgtgtgtgtgttatatgctgtctcagacatgggcatcactggcttcattgtataaaggaagaaggggttcaaatggtgagtggcttgcccagggaagttctgtcagacttggcagatttgaacccagttgtctggcattggctctgtgtgtctttctttataccttgtgttcttctatggttaaaacagcactgctctgcct

SEQ ID NO: 56 - DNA, 34626 bp, Mus musculus
aggcagagcagtgctgttttaaccatagaagaacacaaggtataaagaaagacacacagagccaatgccagacaactgggttcaaatctgccaagtctgacagaacttccctgggcaagccactcaccatttgaaccccttcttcctttatacaatgaagccagtgatgcccatgtctgagacagcatataacacacacacacacacacacacacacacacacacacacacacacactgcctggcatatagcagggtcctggtaaagctcaagagggccatttttcttgcctcacgtgcttcagctctgtctaatagcaagaagatgggaggccaaacatgggagaaaaattggtaatgagccaggtcctccttctggctccaagctccatactaccaaagtcttttaagccatccccaattgatggcttgttctctaattgagagtttgtcaatggctgaacagattccccacacagaccttctacttgtgatagtagatacctcaagtacttacatgagagttgagcaatgacaacttggtagggagagtatcagtaccctttcatgacatccctttttgaagtctgtcttgtctttgtctgtttctcagcaccccaaatccacagacttcctaccctaggtgctgaagtttgacaagtgataaggtagcatgcctttgatgaggttgggtgtcaagatcatggcccctatcttgtacccatctgagttttcctcatgctctgtctactctgggcttcctggcagcagtctgcactggttgtccatgtggctgtctattgctgtgcctgcagcgatgcccattacagctcagctggggtcatgatctccccattgtctatctacaccccaatctgaagaacctagtgcctgaggaccacacagatgatatggaaactaaggagatcttatcaaaggagaaagcagtggtggggatatagtagagactcctggaccagttgggggaaagaaagaagccaagaccccaggggaaactcaagagtgaccatgcttctgaaatccgcagacctgcagtctggaggcggaagaaagccttcttcctctgttaggatagggggagaaagactgtgaacatcagccagttctctgcctgcatgactgagactgcattttgtgtcctttggagttccaagagcaacaactttggaatcagacatgatcatgaatccaaattgtcacattttcttagaccttgtgctgctgtactgaatggccccaactgattggctgtgagtcatttagttctccattctagagttggaattctgagatggaggtgacccacagtgctgttaggtcttctcttctgttgtttgtgcgctgacatcaatggacagaggagatggccgatagtttcgtttataaaggctccactttcatgacttaatcccctccaaagacttaccctaaaatcccatctgcaattctgaaaatgatgcactttcattctttcaataaaactacactgtgtgtgtgtgtgtgtgtgtgtgtgtgtgtgtgtgtgtgcgcacgcacgtgcgcattggcatatatatgacatgaagtagatgttggtctatctgatcaaaaaaagggactagaaagagaggggagggagaagtagagtgtacaggagggatgaatgtggtcaaactacatgatagagttcaaatgtctgcataaagcccactactgtgtacagcttatgtatgccaataaatataaatcaacaatatttcagagaccccagcactaaatactcccacaatgacttcatagagttgcatcatgtgattttttttttgatgagaagataaatctctctctgtttcactaaatagcagcttccctatgcttggcctccatgtgttcatctcccaaatgaaggaacttctggtttcaaagaactgttccagatttgggattgggatttagtatgtaacacctacacgtgaagcaaagattgtacatgagctctgcactcaatgtgcccatgagctctgcacccaacaacgcccactgtttcatccaccatcttaccatgcacaagaacctcaaaggtggagagctcacctgagccccatttacagaaatggagggagcagcagtgtcaacaggccagacccccaggagctccctggaactggaccatcaaccaaagagtacacatggatcgacccatggctctggccacatatgtggcagaggatggctttgttggacatcagtggtaggagatacccttgggcctgaggtagttcgatgcctcagtgtagggaaatgtcagggcgggaggacaggagtgggtgggtggaggagcaccctcatagaggcagggaaagcggggaatgggataggggtttctgaaggggagacctagaaaggggagaacatttgaaatgtaaataaagaaaataaccccatattttctagatattaaattccaaaggctaatttaaaaaaaacaaacaaaaacaaaaacataaatggagacctaagctgcagaaacaagaagggtattgcaacttagatataaaatgccctcaatgactccagtgttgaaggctttgtccacagccagcacatctagtcattaggaagtgggtagttaactacatcgatggattaaaccatgggtagattccatactttaatggaattagtagggtggtagtggaaggaatgaggttaatggagatacagatctgaaaggtttatcttgttccagcctctctctctctctctctctctctctctctctctctctctctctctctctctcgctcacacacacacacacacacacacacaccacatacacacacagatcacacactcacaacaccacacacacagacaccacaaacataaacacacacacaccattaccacaccacatgcacataccacacacacaccaccaccaccacaccgcacaacaccacacatacacaacacacacagataccacaaaaacacatatcacacacactatgcacaaacacagacaccacacatatacacaccacagacatcaaacacacaccacatacacacacacacacacacacacacacacacacacacattttagagaaggcaagaggcaacgtacaggcttactttggaatctggagttttgctgtcaagagcttcattgagactgaagaatcacattttcagagaaggctgccagcctccagtcctgagctctcaacaccattacttacaggttggtttcagtcaaataacagaaagtgagggaaaattggccaagcagtcagaacttcagggagaagggagaaaacaccactcagcaagtatttccagctgggagtccagtctgaccaattttcattccatgcttagatgaagttgtttggtggaagagaaataagcaagaaccagtagggagatagaaccctggagcttttctcaaagaggctggggttagcctatctcacattttttatgtaatcttttgattaacctgggtcagtttgagtgacagttctcaaacctcccgtgcttagccggccaaaccaagtccacaggcttgcttctcagtatctgcacacatcagcttggaactgtcgctcagtgttcgggatatctctaagtcatgaggcatattggatttgcagagattcacagatgtgctggtgagttctgctcaccactcacaagaattggactggtggcctgctattccaagtgtgacagaaacaagaggaatgacaattgctcctgtggctttagaaggaacttaactccagttccccttgggagctttctgttcttatcggccatgcctggaagcttggagcacttgccaatgtcacatagaagatcagagctgtgacttgttttagaggaacagacttctgttgtagattaaacagtgccccctcataaaattcacattctgaagttttaacccgccaatgtggttatatttggagaagggaccttgaacgaagtatttaatgaggtcactcaggcaccagccctgatcccatgggactgctgcccttatcaaaagagccagcctcattcatgaagtctcctggcagaacaatcacacactctacaaactgaaagctggacccaggagagtatctgccagcccctgatggcgtcagtctcccagggcaccatgacgtagacaaagagcaggtgagagacattgtctccatgatgactgcatcttagactttggagtacaaacatgctcctgagagcctgagatggctatgagagagcaaagtcaaggccatgattgcacagtcaagatagctctactatcagcctccttggtacagggaaactgaggacaaaacaagctagctccttgagctacgtgccctcaaggcagagccttctccaaaaggtgcctggggtgtggggatagtatgacttggctcctcccacaaatggtagctctccagaagactcttcatacctcagacacagcaaccaccccacccaactccagtcatcgaacttacctgagaagggactcccaagttccccttccctggactctttccttacatgccaggcctacaggtgactctttggttagactggaagcctgtggtctggcaggggccatgtcttgttacttagggatgctcatcagtcaacacaaggtctggcacaggggagctcagaggatggggagagggacagaaaaggagggggagagagggaaaaggagaaaaggggagaaagtcattagacctttctacttaaatggacacctgtgacctctgctgacccctcagaaagccatagccaatcttcctgtctcctaacttcactatttctcttagaagttcctgactggaaccatgagtcatctcctgtctgccactttagcctttttttcccagaatcatccctgaactccagtgctaccacttctctcagctctgcctaagcagccctagtcctttccatttctctcttcccccaccactaccagacaaagcctgggccagacaggagactgttcatccaactttaatcaggcactgtctcctaggcttaccacaagacgtgtactgcatgttgaccagcattcagaggtgtctaccataatattgtcacattgtttaagggaaagttagagatgatctaaacgtcagtaaaacaaactagtgcttaacatgtattttgtttcacctctgaacatagacttcgacaacagaacttatggaactgcagagtgtgaagcccagtggagagctataggtaaaaatcccttgtagcacgtgtttccaatcagtgaacagatgtgcatgtgggaaatgtgtattagaaaagaaacgagctaaattaacctaagttctagttgggagtgggagttatttgaagttcatttttatatagccagagttctttcctatttgtgtccctgttaattacacatcttgtcttattgctctaactaagacttcaagtactctattgaacaaaagtaaagaaagggaaggatcctgtcttattcctgattttcgaggaggtgctttgagtttttctgcatttagagtgatgttggatctaggctcactcttttcttagcttcctcgggtttttatgaaaagaggctggactttgtccaaggcctttctttacctagcaatatgatcatataatttctgtccttcaatctatgtctacattgaaaccatctttgatctctggaataaatggaacttgatcatgatgaatgatcttttgatgtatcattgagtttgatttgtaagaattttactactaataataataattttacattcatgttcatcaggcagatttgctgataattttcctttcggttatgtccagatccagtttgattatcgggataatcctgatttcataaaatgagcttggtggcattcccttcttttctgttttgtagaagaatttaaaaagcattgatattaatttttctttaaagactttttagaattcatctgtgaaatactcccccgccccaggcctgggctttacagttaggagacaattttattactgatttaaatttacagcttgcaatatatctgttgaagtgctttaagtcctgttggctgacattagtaggttagtctagaaatatgttcatttcttttaggttttcagatttatatgaaagtggctttgcagagtatgcgctaatgagcttctacatttcattggtacttgttatatggttttccctttcatctctaatttaattaattggggtcttttttttgtggaagtttaactaaggctttgtgaggtcttgtttatttattatttttttcaagaactctttgtttgatggttctttgttgtgttattttcatttctgtttcattaatttctgcattggtgtttcttatttctttccatacactgattacgggtttagcttcataatgttctcagacactgggtgcatcattaagttgcttgttcgagatcatttgatttttaaaatatatagctataaaattcactcataaaactgttttcatgggaagtcacaggtcctgctatgttgtattttcatcattatttgattctacaagttttacattttccttcctgatttctttaataacccattagttaactttaaatagtgtcttcttaagtctccaaggatttcaatattttttgtagtttctcttctagttgatgtcctatcttgttttgttgtgatcagataagatatgtgaaatcattttaattttcttgtctctgttaggaaatgattcatgttctaaaatatggttcaatttagagaaaattctatgggcttcagaaaaatattgtgtattctgtagtacttgggtataatattctgtagatgctattaaatccatttaatctgtgatatcatttagctctgggaagattttgtttgtttgtttgttcgtatgcttgtctgttgttctgactgaccagtctgctattaagggtggattattgtagtcactcataaaaaaatattttttgaggtcagtcagtgcctttccagcaagtagtgtttgctttataaagctgactacactgagtttgatgtgtgtaggtttagaaatttaggaggtttttttccccttacattatctttgtctcttttactttagttggacatctagtttgtgaaatactagtataactatacctggtttttttttttcagttcaatttgattggaatacctttttccaacctctcaccctaaggcttccttgtctttggcaataaggtacatttcttaaagataactaacagttaggtcctattttctatgcaacctgctgttgtgtgtcttataatcagagaacaggaaccatcacgagttgctagtgaaaggtatgtgctaatttccgttgctttgttgttttcatattggttggtgctttactaacccttagttgcttttctattttggtgcaatttattcttccctgtgacctcatgggtgtgtttatatttctcttcagtgtgtaagattccttctgtatcttctgtaatcatagagtcttctagtttgtgtttaacagaaagtcttccattttcttctatcattaggagtagctttgctgtgtataatcatcaaggctggcagttattgtctttcagatcttgaaatacatcatttcatgccctgatggctcttagagtttctcttcagaaatctctatattttgatgaatttgtctttatatgtgacttggagtttctcttctgtcattttccatattctttctttgttccatattaatagtgctttaactaaagcataatgtgtttatgtctttgctgtgttgtcggtttggagttctaagaccctttggtctggtagccatctctctccctggatctgggaaattctctgctataatcttgttaaatatatgctgtccactctatgtaagagttggtctggtcttcccagcccaaaccatgacatcagtctgtccctcttacatgcatattttattcagacaaattgatctctgtgtcctgggttttatatttgtgaatttaattctcaaattatatacagatattcacatatacacacatgaacacacacagagacagacagacagacagacagagaagaggggagttacatagagggaaagagagtcacagaaagccagagagtgcaattctagtaaagaactgataatctctgaatcaggaaaagcgctacacatgctaataacccccgacatagtcagacattttcaaatctgaaagttgatggaaataagagtatactagagtataaagttcaaaggcaaaggctctgtagaaattacctgagtttcaatcccagttctgtacaaggtagtgacctcaagcaagcaacttactttctaagccttgggctcttcatcagtaaagatcccagggataatgaaagccttagtctatctgtttctcacagttgcccacaggatgcaatgaagtgttcagagcttggtgaagaagctggaaagccccaaccactgcaaaatatcagcatcactgttcaagacaagtagacaaagatggaatcctgtatccgagtccattcagtgtccttttctacctctcagtgctgctcagcaccagatgactaagtgctgtggctttggaatgttttgcctgcatgagtcttccatcgatggaccatgaacactacaacatggagccaggtccaattgttgcccatattcctagatcctgtcatagcacttggcagaaaaagtggctaatgggcacataaagcttcaaatgagaaactccaagagttcagcctaaatagcaaaggaagttctttcattgggtaaaagcttgcaattttgctgaggcagccactccattcccatgggctccctccagataaggcatcacattgataaattagctgtggatagaggcatcccgcaggtggcatggaaatgcaatttaatttccaattaagcctgatttctaggccaagggatttggctgcctcacactgggaagattattttgtccagacctatcattattatgggtaacgattctgccatgaagtggactttcagagcaaaagtcctttgattcttgagatgttgtgatggcagaagtgtgggttccaagggcaaaactgccttccttcaagatctaagtttatcaggggatcgtcaagaacgtttaagcacagacagtccattgacatttttaagtgaacagggaaagaaagatgggcatggcagtccttagtcatactctcaagaaagatgattgctagtgagaagggggtgacaatggagagtcctcagagctctcaacagaaaataatctgcatggttggagtgtggaggctggcttgctagaacaaagcaaacgtttgcagaacatcttcaatgcaccaggcatcctggctgactatttgcactcaatcatcctaatcgccctataaaacaaatgaagtttctctcatttcccagttgaggagagtgagcctcggggaagttaaatgaactgcctgaggtcatagacaagccaatttggactcttgatttttcaaaaatgtctttccttcaagagttatcaccaaagacaaatgcaaacttagaatcgagggccctacaaatgaggtgcacttagctccagaaatataagaatgagaacaagccctcgaaaggatgcccccagagactgaaaatgaatgctgcctacccattcttggtgcgatggtcacagagtggggctcacaagacccaactctgattgaatgtgtttccaacttccattgggaagtgagatctgagtgaggcatgtagtggtgcagtgtagcacgcagagctccaatggggccaggagcttcatcaagggtcctggctgttccacactagtgttcttcctggtgacacagagaattcactttcaaggattggaaaaacgcaaaaaataaaaaaaaaatggactgaaggacgatggccaacatattcacagaaaatttagttggatgccaaaaagatgtctcatggccaaattgttattagtgattaagataaatataagtgattatgctgtcaactactgggacaattctagagcagataattaagtctgtggtaggtaaacactgactaaagaaaggaaaggaactttgtggaaagagtgggatcactaagaaagtctcactaactctgctgcccttctatgctggtttgtagtggccagcaatgcaaggtttggggagattacagcgtgcctgggttcctagtggccaaatgggttctgggccagaaattgtggcttctggcaaattgtagacagcctagttattttcttggcagcacccacatttcaagtgtccatatttgggatacagattcggttattggctctttagaagaatacatagagaagctgtgagagcctgggctctatggggtgctatggagacatctggaaggctctcagcacctggcctttgcatacttggtaaggagaagaaacaggaggaggagaacaggttctcagtggtgagggccatactgaagctacagtgtctagagttttttgttgttgtttttctcaactctcctacttgctaacatctggggcaagttaaaccgcttccctgtgcctcagttaacccatctatgaatgcagatggcagtatcaacctcaaatgctattagtgttaaatgagccatacgtggaaaggcttggccgacatcccgacacacaggtgctgcacaaatgttagttcttatcactattagggatgacagattgtcgctcggggaatggttagctaaatatatcccataatggaagggctacagcttggtccagtgagttattcatcaaaagtgttgatgtagactgtcactaaagagaaatgtggaaatacaagggtttttctccctggcgatgcttctgacgcaagatgggaaagctatttctcttctgacaccaactagttctggcactatctgagcttcctacaatgtaatgcagttttgatgttatccagagttagcgagggactccacacgctgctggggcactcacagatcgatctcccctcacagtgtacaggagtagaagacttattttgatgacgtatatgcttagtgagcctctctttttattccccgtgcgttgggagtggagattgtgtggaatgatggtggttaagggggatcaaagtccttgtaatctacctttgacttcagctccaaagataaaacaaacctggggatatattatacacttgatccacattcagcctggagtttgctgctctgacatacctcctttccccatttctttaccctttaggggatctggctgatgatggtgtacgttatatcagtacagagggaaagagctgggtacccaagaagaccccctagttatgcatttatctgacatgaaaatgattcgggaaatgattcttgtaggtaaggagataatctatgcattgacccttctgagacacaggggcaatgcagagaagcaaaaccttctctccatgcttcagtgagactctgaaggactctacagagcagttattctcaaccgtcctaatgcatcctttagtacagttcctcatgttgtgatgacccccaaccataaaactatttgcattgctgcttcacaattgtaattttgctattttgtgaatcataatgtaagtatcagtgttttctgatgatctttggtaacctctgtgaaagggtcatttgacgtccccccccccacctccagaggggttgcaaacctcagggtgagaactgctgctatagaggagagctttagatttctgtggccacgatagggagagaccgatccttatctcagatgcactaacccaaccttctaaagctatctaggctcaggacctattctacttcttaaaaatactgaggagccaagcattgccattttacaaattaaaactaggaacttgaaaacgtttcatttcacttgctttatttcaaagtaataaacctatcacatgttacaaaaatattttatgaaaaataattttaccttccaaccaagagaaagcttatcgttttgcattttaaaagatttatttttatttttaagtgtgtgtgtgtgtgtgtgtgtgtgtgtgtgtgtacacatgtgtgtgcacttgagtgcaggtgcccatggaaccgagaggtatcaacctccctgcagctggagttacagacagctgtgagctacctgatgtaggcgctgagaatcagacccaggtcatctgcaagagccacacacacacccttagccactgaggcatctctcctgcctctgttgtataatttttgaaaatatatttaatgtctagttaaccaagcagctggactccaatcagtgttccatatttgatcagctatgatatgtatatcatgctgccttgatctggaatgtctgacaacatatttttacgagaacagttaagaaaagatgagatttccatctcagtatccttacccaagggctactgttatgaattgtaatgtaaatatctgtgctttccaatagtcttaggtgactcctgtgaaaagggttattcaatacctggaggggtcgcaacctacagattgagaattactgttttaatgaggaacttggaatcattttggtgaatcacaaaaattaagatttttatattacatgattttaaatgcaatctggttctttaccacgaagaagcgaccacagtgacggtgatggggttgggggcagagcaggaaaatagacagctccttgaaggcatccatacacctgactcatatccctggcccttccaggcttcagccattagagagcacagaacaagcttttcccttgtaacattcacacatggaagaggccggctttcttcaagtcatgaattgagtcacagccttggctgaagagctggagctgtgtgaggcctggcattattagagcatctcacagggatcctttctacattagatcagaagcccaggggtcctgatgactctgatccccatgtggaggccgatttaggaaaaaaggacacctgagaaatggaccgggtactcctttgcagacatgagtcatggcctataagaatcaatgcaagaatacagaaagcacctgacactcattagcagtgacctattcaggacaggggaggcctctctgttcccaggcagccattgctgccaagatcatctttctcccacctctaagtccatcacgctcaaatgcccacagtttcacactcacgctgcccatgcagttctgtgaccacggatgggtgtggcttttgatggaagtaggccagtccttgttgacaggacggcaaaaattttcccaaaggaaacgaaggtcgtcatgactaatgcatggggcaagggagctgggcatccctgcacactgattcttctagaagggtgtgtccttttctcctgctgtttggatattctgagtttttctgtctttcagccccaaacgcagggacctggaaaccttcataaagcaaccccttaaagccagactcccttttggaacctttggtttctctttttaagttgaattcaaatttgggagataattatagatttatatggtagttgtaagaaagagccctgctagccacatgtgaatctccccggtggtagcatcttgcaaactctaccataatgtcagaatatggctttcctgaccttggagggagatgccttggggaatgatgagctatttttccttgagaggaggggccacggataagaaactggagggccacaggcgacatcagggctgcctggagagaagtgtcaaatccagtgtggtgacatcatctgcatgtggagagaacaccaaaaggcacggcagcacaacctgttacctcaggtcttgcctctttctctcttactgtgcctgtaaagccaacggtgccatcttaggggcatcattctaaccccgattgcatctgaatgctgtgaacattaactgtgtcaaatgcccaacacctgtgtttataggggacatggtgaaagcatcagcaacaggaagctacaaatgctcaactaagtaagcgccttccttccatccagggggcctaacaactgtgtcttcccagcttgtctctgatgggagaaacagcctctcgaagcccatcctcatctccctaaaggctgtccctttcaatattttccaaaataacagctatgtattacttttctgattaaaacaaaacaaaacactgtatgatcttcctattattgaagaatgaaaataacaaaagaaaatggagcggggttaaggaagaaaattaaaattaaccaccatgccatggttaatattttgaggcatttgtatttatttcctcgtagacttttttttcctgtgtgtatgtatatgcttggatctgtatcggcaggttctgccccattggattcaatcaagggcagattgaaagtatttgggtaataattgcatctgctgtgagcatggacggacccttccccatcattggtccctagaatgaaatcattttcagcactgacgctgtagtgggtgtttactagtcatctggagacactgcagcatggagaaaggtggacagagcttccgcaaccgagactgcatcactttatagaagggatttgtgacatctgagcaagtcgcagaactggtccctgtggatactgaaggatagcagtatttttaaattttagaggtgtgtgtgtgtgagagacagagagagagacagagagagagagacagacacacacacacacacacacagagagagagagagagagagagagagagagagagagacttaatgtccttaacaaaaagcagtacattcagttgccctgtcaatgggaattattgtttttatgacaattcaaagaagctgaatttggccaaggacaacatcctgaatgtgatgggtgggtatttggggagctaagagagagcacgtagggatagaggtgacaatattcatcatcctggtagcagacagcgtcattgcaggtaacagatatgaaccaactgaagtcagggatgggaagctgtaactgggagcttcttggtcctccaaagtcactgggaatcggatacgcattcttgagcaagaaacagctttccaaagatgttgaacaaatgaaataggagacaaaggaagagagtgatgggtagcctgctagggactctgcagttccttggtgagtctctgctgtggtgcagaggggactggcctacttctgagccgccaagatggatagggacctgttgagcttcaccatggcaataagaataagacccccggtcagcaggaaggtgggccagaagaaggagaagaggaggacttggggcccgtagaggcgctggtacacgacgctggtctcgttgacttgaggtgcagaaaggcaatagaattcatggtgcttatagaaattggctctgaccttcttcacatctgccaaggctgtctggtagttgtccaggttcctggggatataggagcactgtgggggagaagcaggagtgcttaggcttgtaaatacacacttcgaagaggcctggggtgaggctttggggtatgagaaaaagatttgggctcaggagtcagccactggcgagcatggttggcatccgcgtatggatggtggccttggtatcactcacatgatgctgcacacctggatgcagggctcggttggagacctgcatctgtttttatttgctgtgaaatcttaggcagattgctcaccctctctgagccttcatggtttcattactgagatggtttagtgatgtcacggtgatgagctagagaaaatcctgagtaatacaagtccaggcacaaggtggggttctatatgcaagctcatacaggtaacactgagaagtgaagctagacatggggggtgacagggaccacctggcatgtgccttggtgtcagaattgtcaccgtgactccctctggagaagagataccacaccatgcagcaatacatccagagaagccagaaaacctgattttaatacaaactctcataatttcaaaatcctggctaaaattcaaatagaagactctttgaagtctaatcctgtgtgaaccaaagaaaatatgttggcatgcagctctgtgacagaatccaaaagaaagagagaaagtgcagtaaagagctccaggcaggcagagcccagcacacatttaaactctggcactggtagttgctattaggaaccttctggcctgcggagatgatgagacccagctgcaaagctctggaaagacatcccagagtggagacctgcgttttatctttctctaccaggtctgggtgccgcctgtgaacctcaagggtggacctctctgtagacctgcagtggaacaccagaggggtccccatcagcacaggctcctgccctgtggggtttggactgaggggaagtggagatgttcaaggaccatgttctagtgaagtcatgtccagggtcaaatgtgtaaacctgatgccagtgcgcaagcgttgagttagtgtctcccctgggactcagttaccgcctaagcttcccaacccagcagcatggaaaagcttcactgtggtgctaatatctgggaactaagggagctgcaggctgatcaagtccccagcgagccaggaagagtcctagggaatctggccttcagaggtgttgagcattgcaggctgtttagtagcagcattgtcactaggtaaccttgaccgctgtgcacagatttctttgtcagccaggtaggcccaggttcaaccacagcttccaagttgtgtgaccttggcaactagcacacactcctaaatcttgtgaagtcatttgtggtggagcctacctagacctgccctggggactaaagtaggaaacttatataaagcatttagcaagagcccagatcttataagttcaaaatggaagaaaaaaataataacaacaacaacaaaaataatataatgctgtcttatctacgaagctggaataactgctgctttcccatttaaagcatgagctctgatgtggggatttgcacccatcccagggcactgctgtgtcttttgtgtgcttgaggttcctctagattctgcattcttgatctgttggtcaaaatcctagccctgagttcactctctagggtcaagccaaggactgggctatttcacccgtctctgcctggcctgatacaaccagccctgagttatttgcatgggctggaatgataaagaccctgtctctagtctgaggcttcacttgtgttagcatacgctgcaaagagggacttagaaccccttccctagactgaagctgatggaaggagaaaagagcaggccatggaggaggaataagagcctagcatgtccagaaggcaggctaccaagccagagcatcagccagccatacaccctgatgctgggccagagaatgaaatgggtttgactgtcccagcacggttggctgctcttaactctctgtttgtggtctgtgggtgtgtagtttaacagcccccttactagagaagaaagaatgcacgctgctcacaactcacacagggttctgactacctctagctcttcagaatgaggaagcagccctaacccagtgtgcctggagtagagcactataccgtggcacgtcatctttcaagaggtttttctcactcctggaatacattatggttgctgggtgcccaagaggaagcagaaacctctggtaggagctaatctttgtggttcttgaggttcttctcccacacagagtcatactgacgatgaccacatatctgaattctacatactcccaccctttccttccatgtccccagcatcagggagcctacagagcccagccccaaacatacacacaaggcaccttgccctttctatcccatcagcctcaattctgactgttacattatccttgtgacaggtccacacccatactgggaactgctgtggcctggtttccatcaggtaaatgacactacgtggctgctggctctgtcttcccagcattgtttgaatggtcactctgggcctccagtggctcctaacaatagcatctgaccttagatttatcgaaggggctccacctactgatctattctgcctccgttggttagtgtagaattctggttttgttaagtctagatgactctcatatatagctagagttgcgacgccccaatttatatcctattattaattccatagttatgcagaagaggtcctcgggcaacagaccgtaaacctttagtctcttctggccactccatcagatggcatttctgaaatctagccttctcccatgcctatgcttctagccactgcctttgtctagccttttctccatgcctatactaggtcccaccacacactgggatactctgtatccctcacctcttgtttctgtggctacaggattgcctattttgaaaagcccagcctaacacttctttgctctgggccacattggcaattcccttgagcccatccatctcctgtcggttgtctgaggcaccagcccaccctccctaatgttagtacgcctatataagttctctcctcttaagacccatgggccaggcctgggaagactctggttgttagataaatgagggaagtaaagaaatggaaaggagggaagggaaccaacctgtctgtgcaatagggagggctaattgacaggaagggaggtgcagatgaggggaaatctcttaaatgcttgttatggaggttgctatagccctgactcccaggtggcccatggattcacccagctttgttgacagaagaattaacagtaacaactgtttctctgctctgagcacccaccatttgccagcttagcctataaactggggcatcccaattctggctatgtatgagaaccatctaagcttaacaaaaccagtgttaagcttagttatagcactgaacgttactgtagcaatttcaggtatggcattagcatccatttacaaggatggaaacagagactcacaggacctcagcacccaccgcacagccaataggggcaattcaaaccacccaggtctgtccaggtcagttcaaacatggaagatccaaggctgactccacctcaagctagccataagattccattcaggtggattactatatcttggctttagagacatgggcagctggggacaagctcacagacctatcaggctaatatacccagcccccatttgttacctgttggttttgatcccgagtgtcttccgtgtgatacagcatggcccatctgcccacagctgatacattgacccaaaggcatgggtactggggcaccttcttgccctccagctcttcctggtccttgatattagtttcaatcaagtgacatatggattcctgggtccacacactggggagacaacacacacacacacacacacacacacacacacacacacacacacacacacacaaacatcccttagagacaaggatgacacatacccactttgaatccctgacaccctgagaggcttttgagagatccatggatgggaccttcattttgccacaaacatgttatattaactgaatccatggccctagagtcctggactctgggataaatcacaataatttcagactggttggctcttggacattttctacataatggttctctgaccttgctagccaccccgcacctgactttttttttttttttttaagatccctatagcttactgagtcccactctacagaaagtgaggcagaatttctcaggtgcttgggcccaggcactagtggtgttttaaatgctcttcataagattgtgatgagcagccaagtctgaggccttcttaaccatattatctccaagtcacaggtagaaatggaaacctcacaggggataggtgatttggggagtggggctgggacacagcacctgaggcaagggctgagtagcttcagagtctcagctatttcccctaaaaaagaggaagtacatgaggggtctgatctgatcagagttggagggtggcaggagagagctggggaggcacacagttgctcagcagtgccccacgtgggtgagactctggcctggcacaactgcagcattataaagcaaggatgcagaccaggcccaggagagcccaagaggctcatcaactcttaagcaaatggatcgtgactcagctccctgtatcctgtgggagacccactgtcagacaagagaggatggtcaggagccagactatgcacagagggagggcgtgagactcagctaagggtgagctgagagagcactgtgtgcctgttccaaagacaagagccatcaggaattccacagctcttctttaaaggctggagggatgacatgtcacagagtgtgaggcacgagggtacactgcactctctgagattcctccataaacttcgtgggaacagatgtcacagtgcaaagactctctgcttattgggaaaacccaggtaaggaaaggcatgctcatcaaagaggaatctcccatctcagaggcatttgtgcagactgcagccagagtctgccattgtgagctccacccccacccccaaggaatcctgcacctgtcatcaccagtcccaactggggagtctctcactcctctgctcccccagaactggaacccctgagcctgaagatgacgaatgcctcgtctgtcctgactaccgtgacgggtcaagggtagggtaggtcaatccaggaagtggagacatccataccttttctggtagaggggcagcacagttgtacccaggacgtagtaggtgatggcagcacacactaccattgccactcccaggcagagggctcgtgtctctccgcgcttctgggccatcaccagcttcttccccatggccactggaggcaacagtcatttctagcaccaagaaggcaaagagaagtgagattagcccaagtgataggttcataagaaggaaggaaggaaggaaggaaggaaggaaggaaggaaggaaggaaggaaggaaggaaggaaggaaggaaggaaggaaggcaggcaggcatgaggggatgcaaccaaataacaacattgctcttatttaagtatgataatacgtggagctttgcaacttacatggagctttcttacagaggtctgctctggcctctggtaacagcctacagttagcttttaaatactcaggatccattatcaccaattatctccaggagaagcccagtacacttgaggggatttccttgtggtgctggctttttccagtgagccctcctagactcctgagcattcccaagataaatgacagcaggagtctgctcaaggctacagcatggaagctcagaagggaaaggaaggaaggatgtcacctgttcctgagaggtctcgctcctgtgactggttgtgcctgtaatgtcccgatggctcaccagctacatgaagtgagttcagtttaaatgtaaagcttaggtgggaatctgggatgggcctaatgagaacctccagcaagaaggatatgaagctctgatatgcactgtggcctgagacaggaagaaatgggtttccatgataacagaagagatttcagggagactatgccggatgtgaaacattaagtatctcaggactccttggatggaattctgtagaaaagtcacctgaggtctgggcttgatctaggaaagttggaaagggttaaagaagagtcctatgtggcataactgttgggttgttgatctcttccttagaaggactggggatagagtatgtaagggttttgggggagtttagagaagagaggccatcagatataagaccgagtcctggcttttctacttagcaaccatatgactgttaaaacaagaacaatagtgccctcctcagggtcctgatgtagacccaccaacactgctgagcgtcacctcataaataagtgatgccctccataaacaggcgccatcattaactgaggaattgaaggagcttggtgcactctgccaggcctgtttgtcgatccctatcctgatgacaagtgacaacactggtcctgactggctggccacaaaagagacgcccagaccagggtcaacaggccaggcaggccctccggtgccagaactctgatgggcatcaggagaggtagggattttcaccaccctatccatgccatcacaggctgctgtctcccaccatctcccctcagccccggcttcctagaagcccttcccaagctctctgggatgtagcactcacagttctctgggtctccgctggctggcagatggtttctctccactcgccccacccccacccccaccccaagtcaggcctgggagctctagcaggaagtttggtctcccagctggtctccagggaagcagtctcagtcccatctgggtcgagcctccatgcccaaacatggtcaagtctgagcacacagcttgccccgggataaaaactccacaagcaggtacctagcctcacagccctcagctgctgttggggactctgcccctgcatttcccagagtctcctgggaaacagatgtcaaacagcaaaagccattacccaccccacaaggccatcctgatatatgtacaaaaatgtttcttctacactccgtctttcaggctggcagagaagccaggaataggaaatgatcttccttgtgtagtgcaggggagggaggtagaggggttgggcttgtcactagcccatgttatatccacaccagtgcagccaaagcctcccacctttgtccctgacttcctgtgtgactctgaacaagtcactgaacctctctggacctctgtcttctcccttctataattaatagcattttgaaaacttaactttattctggattgttaagttagagatggagttcagagaaaggaggaaattccgccttttaaagaccactggggctgaggctggtagcggtgggtcccacagctgcttccggccagccgtccaggtccagggacagtgccatgctggggacctcccacagactgactctgcttcataggcagaaagttattgcagccaatacgacaactgaacattggtactggaggtaggggtggggggcaaacctgcttttgcactccgggtccttgtggataaagagagcactgtaagagttgggaaagcaagaacaagccccgccccacccctgccccaaccccggccccgcccccgccccgccctccttacaccttggtgccctgctagtcatctgcacagaacttgatgcctggtccagagtttctctacttgatgaacagagacagattggaagttggcccctcccagtgtcaaatcccagccatctctgccaccaagggactgttctaacacctcaaaccatacctctgttatgtctccagccacctaaagttctagaagtagcctctggtgtccccaggcccagggcagtgggtgcatcttagatattcctgatcactaggtgttagcacctctcacctaagcctaacacctgataatcagggccctctaaggcccagaaagaaagttgtcactcaaggctccttgacactctggggggtgaacagcaccccatccccctttagtcactgactctaactagagagacaactacctgtttagttgcctcatagcaactggagatttattagtgtgcatgtgcctgcatgtgtgtgtggtgcttaaatgatttgtgcatgtgtgtgtgatatgtgtgtgtttggataggtatggtgtgtgtattatgtgtgtatgatattgtgtatatgtgtgtgtacttgatattttcacacatgcatgcattcatggaaaccaaagggagacattgggtgtttttctccatctggcccacctcaggaaggacctttcggctgagcagcagtgggacccgcctttaatcccagcactcaggaagcagaggcaggtggatctcagtgagatcgaggctgccccttatagagagttccagaacagccagggctacagaggaaccttgtcatgaaaaaaacgggggaagggttctttcactgagcctggagctgagtgctggggcacctaactatgaacagtttattacacaggtactggagatttgaacttagtcctctgtaggtgcaacactgattcttgcccaccagccccacagacaaggacgtcttaaagcataggggtcaggaccactgacaaggaagggggaatatggatctgagaccagttcttcaggagaaggattttccagtgatggaccatggttccttcaaggaccagcagctttctcgtggcacctacaaaattacttagaaactcctgccttgggagagacatgggcactagatggttcctcacaagtgtgagcagagggccattcataatcctctcgacgggctgggaaggttacacaatcagattttataaacaccagtgaggttcccaatgattctttcctttggaagatggggatgaagcagggaaggcacctggtgcaccctactgagccacaaccaaacaacaagggcaagcttcgctctgcctctagggtaagctagtgaaaatcttggatcatggctgagtacgggagggttggggttagtatgagtaatgatggccacaggggaaggagacaatggtgccatgcctggaaatgctgatggatcttgggatgtgagaaatcaggaaacatctccaacttcagccttctgaccacctctgtagcagtacagtggtgctctgagcacccaggagagagataaccacaccaactgccccctgtaacttttaaggaatgggagctcatctgagaaactggcacataatgttaaaactgtactttttggacggagacagcaatccctcataccatcctacagaacgatactctcttttagcctgggtggaactgtcactgcccacccagaaaacagaatttcctggtgggcaggacactgcttgccacagctaagttctgctagggctacagcatccactgggcactttctcttgtgacattccccgggaaccagccaccagtctgcaggaagctgaatgcaggttgtaagaagtgagcatctctttccatatatgggaatgaccacacccagagagtggtccgatcctgacctgggcaggattcaagtttcctagctgaggccttggagcacagtgcagagggtcaccttaggctcactgaaatccaaatccacaaatctaagagcagagtaaatgagtgttttgtctcagggcatgctttggggtgtgtcttagttagggtttccatcactatgaagagaaaccatgaccacaacaacttgtataaagtacaacacttaactggagctggctgacaggttcagttcattaccatcaaggcaagaacatggcagcatctgggcaggcatggtgcaggaatagcttagagttctacatctttatctgaaggccactctttaggagaagactggcttccatgtggcgaggagggccacaaaaccaaaacccatagtgacacacttcctccaatgtgggcctgggtaccagaggttttccacggagatctctgtccaggccgggtgggaaggctccagagaagggaagtgagtgcaggcagggagatgaagtctctgccatgccttccaggttgctccaagactctctgagttcaactgagtcgggtcaggctgggcctgggaaaagccgacaatccaatgaggagtgcggtgggacactgggtggctctttgggagagaagatctcttcccaagtgttacatacagctctgggaacaaaaggctcagacaaaggaatagttctcatgtacctttaattccctgcatggctgatatacagttctggggtgattcagggtttgacagcaggcacctctcattggcttggactgagagtttggggaaaaccttatttgcatgtgggagggtttggtgctgttcctaaatggctgattagccactcctctcctgtggaggttgtgggggcagtaactccaacaggagccagggtccaggagacatgagagaactccttctgtcccaagtaagtgaattatcattactgggtcctggggatctagcctcgactggaaaccaggctgtctgcacatagcccattgcccacattccaacaaggccacacctactccaacaaggccatgcctcctaatagtaccactccctgggccaagcatattcaaaccaccacagcgtgatttcctgaacagctattgtaactggagcaagagtgcggcaagtgattttaaatggggtggtccctgttgctgctggtgggaggaatcaaaaccttgagatgattgtcgggaagcaatctggagcttagaaacatgagagcttccctcccatcgactcacactgctacacagttagaacagaacagtatttatatttactgagcaatttcattgtgccaggtggcgggctagtcagcttttcatggctgtgtgttcagaggctctacagacaggagcctgtgttagagggctctgcttgcttcgtgaggaacaggatacaaacagagaaagggtccaggaacacatagactatacacccttcaaaatcacacccctggtgatccactttctcccaggaggtcttgcttcctaacaattctacaaccttccagtagcgccacctgctggtagccaatctttctaaacatgggagacactcaagatctgaatcggaacacaaatctttttgtttgtttgtttgttttttgtttttcgagacagggtttctctgtgtagcgctggctgacctggaactcactttgtagaccaggctagcctcgaactcagaaatccgcctgcctctgcctcccgagtgctgggattaaaggcgtgcaccacgccgggcggaacacaaatcgttaggaatcaccgaccccctttattcaaggatctgctttctgctgctttagttacccacgtggtttagatgccatttctattgctgtgaaggcacaccatgaccgatttaccccttacaaaggaaaatgtttacttgactggcttacagtttcagaggtttagtccgttatcgtcatggtggggtgtaggcagaatggtgctggagtaggaatggagagtcctatgtcttgatccacaggcagtagaagtgactgagtcacactgggcatagcttgaacataggagactcaaaactcacctctacagtaacatacttcctccaacaaggccacatctccaaatagtgccactccctatgggtctgtggggggtcgtgtttattcaaaccaccataccttgtttaaccatggtcataaaatattagtagaatattccagaaataaataattcataagtttaaaaaaattattatggcatattgttttaattactagtaattatctttactgggtctaaattataaatttaattttatcataggtgtgcatgtacagagaaactgattctacttggggtttggtgatctctgtgattttagttatccaaggaaagtctcataaagtgcacacacattcattcctaccaacaaaccccacaaaggcctgtgttttctgtcagcacagaaagccaagtgattttcccagaaccatgcccagaatgggacgaaatggatctcagatctgaatctgtgcccactgactccacagaccttctgtcacttaggactcccattggaacaattgccgggagcatcagtgcacatgcgcagctggtttaccgcccctctcattcccccagaccccctttctgatttggcaactgcttacttatgtaagtccctttgagtcagcagctagtctccaccaacactcggtgaataagtcccataaatcagccatgtctggagcctctgccctgtgtgtgtcagtgtgtggcagggaggttgagctggtggccccaggacagacatcgcagtgcccattgaacctaggctctgggtacatcaccctgctgaggcaaataccatcagccttatcctctgtaggaggtcagactgctaaaactacaaaagaaaaaagagaatgatgtatttacgagagcatagtgttctccctgagccatggtttgggtattggcggcttcccttccccatggtcaacagagcagcagtctgaaaatggaaaattccagagataaataattcataggtttgaaaattactttcattaccttacgtcatcatcattgttctactttactgttagttatggctaatttttcccatacgtaatttgcaaattaaactttatcatagatgtgtgtatatcagaaacattacagtatgtatagaatttgcagtggcagacatccacaggggtcttgcaattcctgatccacagacaagtgcaactactgcaaaaacaaatgtagaggggaaaagctatgggagaatgcttgtagcactgtgaggtgcagcaaaattaaacgtcagcaggagaattaaacatcatgaaaagacacagaaagcagccctgtgtggtaactccctagtatgatctctctctctctctctctctctctctctctctctctctctctctctctctctctctctctctgccttgtttaaccacacacccctcagcccgacttttcttccttcataaccaggcattttaacctgatggtattaacacagtgttctttaacagcccagggcccctctttgggagaggcagagcacagctgaagcacagtaggctgactgtgcgtcaatgtccgttccttgttgcagcatctcctgtctttgtgggaaagctagataaggaagagtgcaggaagaagaccagatatgttgccaagccctaggcggcacatgtgtacccatagtcatatgaaggactcaagtgccctagcctcccttggcacacgctttgcccagcttctttctctgggcaatgtcacattgaccagtatacattctctatcagcctgtctccatcagaatgcaaacccactaagaccagggactgtcactgttcgtattctgcatcacaattttgagctccaagagaaatacaccaagatccctggtcctttgatgtggtggtcacttggttggagaaaatctttttgtttcgtgtcacagaatattatcatcatttttgtgtgtgtgcccaaaacatcttcctaaggaggttgcacagtttccattatgtgactagttcgggatagacatcattcaagctatgccggtggatgtgtaaggactgtaggaattggcagcagcaacgtaaggtttgctttgactcacagtctgcgtgattgtagtctgttaaaggggaaggggaggcatcaggagcaccaggcagctggccatgtagtgtccttaggcaggaatgggagagagatgaacgttggtgtgcagccagcttctctgttttattcattctgagcccctaggccacagacacagctatatacagtatgggtggtccttccttgtccagtgtctcaaaacaccctccttggtgtaaagttatgttgctaaggtgattctaaatgcagccaaatttaaccatgaagattaatcatccttagaacaatattagtgtctagtggaattcagtaggtctttttcgccatatatacccagttcatatgtgcatatacatgttatttctcatgaactgactggtacaaggtacaatatatttataaggttagatttcagaggtactcaggggtagaaatgagaatgacatagaggtgtaaaattccaatagtccagttttcgatgttctaacaaagcacctgagggtgggaacttatacagagaaacatatatctagtttacagttttgaaagctagatgtctaagactgggtggctccatccatcaatctctggtggaggtcctccttgtctgccttataacacggtgggtagaattatggcagcaactacagagagagagacggatacagagagagggggagagtgagaaagagcgagagggagagagagagacagagagagagagagacagacaggcaggcaggcaggcaggcaggcaggcagacagacagacagacagagaatgatccttgatggtcctgcttcctcttgtccggaggccaaagaaactagagtccagagtccactttggcatgttaataggcacctcagttagtcttttgccctgggtttgagacctaaggaaaccttcctagcactgtcccagcctgatgtgggccagaggggcctggcatgaacattgctggaagctgagggaattcatctctaacgatggcttgtggggctcaaaatacaagggatgccactttgaagttgagacaacaaagtggatttctccacttctgcctacctgtagcctcaaggcagtacctgccattgacggggcaggagactcccacatctgtcagggccatagactctgcagctgagtcttaaggatgccctgagagcctttgtaagacaatgttacaggccgtcagtctagggagaatttacacctttacagtaaaaatagcagagcaaagcgacaccatttctttttccttttcctgtctttggagaactggttcatcatcactccacttcataagatatgcttgctcttgataaatactgtgaattcataccgactatgggcaacactgagtctgatatgtaggggaacacagaggctaatagaacaacctaggtgctagtcagactggggtagaggatgagggaatgaacgggagctaagcccggaatcagcaagggttcttcctcagcagggcacctcacactcctgggacccttctctgtctcacctgatcctgggtcttctctctcagtcagtcactcaatcctaggtggatcctagctggatgtaactggtagatgggtagcagctactcctatggccgctgtgatcagcttgcagggctgagatactgcaggggtatggagaggtctgtagggcacatacatctaacagccagactcccctgtgagcctctgcaacatgaacacctacaagcaagggtggatcaaagagtctgagcccatggagaatctgcacccctcagagacaggagtaagggctcaaagctctgtgagcttgcatatcaatattcaagttgttcctttgtagcccctgcaggtaagagctgaagaaacatagattacatagccagggtttcactgatacctgcagaataggttgaaacattccaggttatttctctttaataaataccaggctggcaaagccaagattctagggccaagtgttcttatcatatttagattatggcatacatcacattcccttttcaatatatttatgcccatgtatgccctcacagtatggatgtgagatagaccaatgccacacaatgtcaacataacagtgtgtagtgtacagttcatgaaggcaggagggaaggctattgcataagaggaccgtgagcatctgcagaatgggccatcagtgggatcctggggctaatcccccatagacctgaaggatggttttacttgacacttttgagtttagaaaaatggcaactatttcatgccaggtttaacttgctttctttaaacaacaagcactcatacttcatctgcatatcagtagagaaatgtttcatttgtccccagatttcctttcttaagtgtcaaagcaagaaaacactgaagacagtctcctcatcccctgacacacagcagaccattctatagttattcattatcaactcgtggaatgccagccttgggtgggtccttcaggagtactggggctcacagctttctctatgggcagtgtttgcattcaaaggtaacacatgcatgtttcaaggaatttggtaaagacaaaacaaaaagaagaatataaatataaatcaaggtccaatcaaggaaaccattgtcaccatcagtgggctatgctctaaagatacaaatttctttctagaaacaaatttaggatattgtataaaatagactgcataattatacattgtggtcttggtttcaatagagacatgttcccattcatgcaatagtatcttaccaaagagcattgcgtgcttctgggaaagtccatcttctgggagtgcctacaatattgttattttcctctgatgagaaagtatgactattattagagtttgactgttgtaaactattcttcagtaacaatctttagttgtccagcaatcatttttatcatttctctctaatacatccctaacaccaggaatcagggtcaaagaatattagtttctaaaatagttctgccacttgtctttttgctgtaaatatgggattcaacacagcacacactctgctctaccagtgaaccaacagcccaaagaggatgggttggctcagagccacagagctttgaagcatgggttggaactcaagcctgactctgcagccttctggagtatcagaatccagccaggacttctggcctccttactcctaggctgcattctcacctctcctccactgtagatttttccatcagagaactctgtctctcagcatttacatgtgtgttaggcactgctccaaacacctgggctgagacacagccctcaattcgaccccataaggtcagttctttgatgatcctccttttagagatggggatattgagtcagagccaaaacattgtctgaggctacaacggctggtgatatgtagaacttctagcccttgctgtctgagaactcctgaagaacattctttgactgtgggacttcactgtggacaggagatttccaacacagtagtcacaggactctactaagccttgaaatgcattcaattttaattcatcttaatggaaacagccacatgtggctagtgacctaggaaacagactctggtgaagcaagcaagtcctggtgtccctctggacctctgtctcggggagaattcagctggcctgagtcttctcacgatgctttgaaccaggttctgtgccctagggccatcttcagggtgagtggtgctgacctgcttgctcaggatgatcaaaagagacactccagggagagactttttaatctcttttgttacacattaatgaaaacttctgtctgtgatctataaatcataaaaaaatcactcagcaagcaccagcctttgccctcttccactcattgtaaatactatttgatttgctagaagcttccctgggagttcatacaggagactttagtcctgccttccctctgggaccctgtctctaaggaggccagtggacaggtgttggaaacagattcctaaaatgtgccaattcctgagtgttttcctaatgccaggtgctgagccaggcccagcaagctcttcactgaagcactggaacatgtgaccacacagaccacacaccaagaggcttaaaccacagaagagactctcctcgggtcttctcaagagtctgagaaacaggcaggaaagatgaaatcaagaactgagcagttctgagttcctcagaaggcgctagggtctcccctgcctcacccagcttctgggggatcctttgtctctgttgcttgcatctgcatcgcctcaacctgcacctccatcctctcacagctctcttctcagacactcttgtagctcctgcctggtgtggccatgaggtcactctggagctgtctagcagtagtcaggatcacctgctcgttggtctcttacagagacacttagcatcagactgagcactcacctcagtaacccaatgatctcaaaggactaagggtgtggctcgagtgcacagtgcttgcctagccatacaaaggcctgcgttcaatcctcatcacagaaaaaaagaacactcaacatccctaattacatcgatgagatgctatctaatagtctcatggctttgggcgtgacatgcttttggaggccaccattcaagtcattatactcaccttatttaatctgggtaccaaggccaggctagaggtgatttattaagatcaaggaacctctgccaccactgtctaatttcatggctttgcccagtgtccctgaatatctcactcttgcaaagttcgggatagagtcctgcctaaggaacttctctccagaggaacactaaactccttccatcttgtagctcctgcatgctgtggccctgaggtcaactctggagctatctagcagttgattagagtcgagagtttgagaaagaaagtggtgattaaaagattggcatgcacattggcctgcgagtagtatacaaagcttctctttgtctaccgttgccaggcaatggtcacctgatcccatccagatgcaagggaaatctggaaatgtgggccctgatctgacagttgcttctcagcttgaacggcacttgtaagtttttcaagaaaaaagtgtcagcttttgttggctggccagccacatctgcctcagctgtattcatccatttcttccttatgcctataattcattctggtgtttcttttcttttagaagaggagatgtaggcccacaaaagttaaatgatttgattaaggccacagagcttaactcatgggctataatcccagactgaaca

SEQ ID NO: 57 - DNA, 331994 bp, Homo sapiens
tagtcaagtacataattatcaccattattattattactatgattattttgtaattgtgattctctatttgaaagatggaagctttttacaaattcttaccgatgtatgatactcttcaattgctttatgattttactaattttttgcatatttaatctgtccaattcttagagagagctatcacttccttaaattagtgttacctattataactttttaaaagttctcaaatttttaattgtttttgctttatgtatttagctagttgatgttttttaattggtgggtaaatataggtttatgattatcattgcttcaagtagtatcagttttatcattatataatattttttatcctctatagtgcttttaagtttaaatatatcagctgccactaatattataactttctattagcttgcatttgtatgatacctcttttttcacctctttatcttcaatctttgttcacctttatcttattttcttttaaatagcatatacatgggttaaatttgctttaacccaatctgacgtctcagtctttcaaagggaaaattctgcctacaaatgatatagtaaccattgtacttgattttatgtcttcctttacactttattttaattatttattttatattacttcttttttttttctttcccttatctttgctgatcatgctattatctattgtggtttttctttttttttttttcttgttaatttgggacttttatggtactattccatcaatgattatcttttctcacactatttttgaacattaaatgcacattttcacaccagaacacactatacaaccaagatgctatatttcttctcaatgtgctccctctcctgtcctctgtaatatgagatcttaaatgcttggccttctcctcctttccccagataggaatcctttggaaggatttttacttatcccctcccctagcctggctcctagtttttgctgagtcagcctagaactcttgttccaagtttttaaaaataataatctgaattcctctttcagtaagactatttattctacttcaagagtccttacagagcactgttgccacatgttgccagccagccttttcctatccaacgtttgtgtatgtgtctgtgagtgtgaacgtgtgtaccaagtgtcattgatcgtcatgtattcttttcatcagcctccatcagttgtttgattctttcaacaaatcttcctttagtaaacaagacctattggagtactgctcttttaagactatgatgagaaaattcaataaatcttgcttacaacaggtttccagctttacctcttctcagagaaaataatatactgtctctttcttaaactttttcttcttctgcccctgtagctcttgtttttagctgttcagttgtttggattaaatcctcaagtctcttgtctttttctgattctttacatttttgctctgtgcctcaaaatgtatcttgcacttgatcttcacctcaacagtgaccagcttctttgatatctaataaaaagtttagttggaaggtcatgtgtttagctctaaaaattgtgtccagaacttgaattttgttatttacatgcaaacacacacacacacacacacacacacacacacagagagagagagaatgttgtattttgtctccttttgaagttctattttgctggtcgtgtattcagtttgcttggcatactcattttctttctagctgctgaatccccttagatgggttgttattttctttgtcagctgattggtatcacatatgatccctggagaatccaagtggtagcattctgggagtgtctactcccatgggcccttgacatacaagtaggcagtgttagccccctcctgaacacctgaaggaagcctctttgttttcagatatcttcatattctcccaggcttagtgccaaagaggagacaacccacatgtttcgctatttcttttcttgttggattccatagaaaccaaacaaattatagtaaggagcttccctaggaatttatagatcccatgggtcaagtcttccaatgatatgctattttcttgtcattgccttatgacttccagcagtaagtttccaggcattcatccattccttggagttttcttcacaagaaatccagcagagctcagggtcacacctgcaaagggccatcagtctattggagaaaggaaaagagtggaagtgagccacactcaacgaactgtatcgtaaaatctcttctttgttaatacatttttgcacttactattgtttttgttaaataactcacttactaaacaattcttcatcatttaatacaattgagtaatttgcaaattaatatcacaaacatgaccattaataaatacagtattaaataaaaatagacaattatccaagttatcatgaaaatataagggaaagaggaaggttagtcctaatcctttttaaaacacaaatttgccacaattattttggcctgtgctaccacttctcagttgagaaatacaagactatcacctgtagtcatgcaggttttttatgctgtgattccagagccgccattcatatatgtagacatcatagtgtttttctacttattgagattattttctaacagaaggttcataaattctgatgaaggggtggctttttctaatttttacaaagtcaccatctggccacacgcatggttaagatttcaccaaagtgtctctatttcataaacttcattttctaagagaaatggaaaaggtaacgctttaaacttaaagataatgtcaagttgttttgaatggcttgtttgattttgtaatgcattctagtacttctacccaagactttttcttttagttggcaaaactctagtgatttttttcttcaaaaattctgtgattgttttttaaatttcccttcagaaatgatagattcatggaatgtttatccattgtattcttgtataagaaaaaatgtcattctctatttccatgataatatactcaaattttaaataaacatttgggtacattctacactttttgacaagtctggatgcttctcattatgtgttttccagacatagttgggtcatgctatcaaccttgttgctatcaagcactttgtagagagctttaaggatgtcagttttgacacgtgtctataatttcaggttattcttaatttccttcattatcttgcatatttcctgatatttcaagctcattttaagagttactgtttttaactagccagagagctatcacagttgaaaatataactttagaattagcatacttaagacataaattaggtatggccctagaatcatgcacacacacacacaatttaagttacttcactggtagaaattaaaataaaacagggactcatttaaattaacatttaattgaatgcaattttagcaagatgttgatctgatttgtatgtgggcagttttcttatgtgtaacaaccaaaaaaatactgaatcttaggaaataaactctttctccatatagcaagcaacataggtttcttctaacttgccaagaaattgtacgctcccatccttttgtattagcatcaccagttctcactgaggacttgttttctgttcattttgacttctatcacaaaagctccctgaagacaaaatagttccagattcccaatgactcccagttcataaaattgatctttttttctgagtttacgttattaatgatgttgaataacctgatcttatgcatctgttaaaaactttacagaacacaaaaattcaaaactcctgtccctacagtcttggagcaaattgattttccaggaagacacaccagatttaccatgtggatttgcttacatcagaatcccctggaagtagaaatacccaaggttttaaaggacacagtgaggaagagattttgctttgaacaataggaacaacatgaatctagggaccagactttgcagtagttcttcactttccctcttcccacaataagaatgaaaacatttctacttcaagaaactgaaataaaaatgccaacactagttattcttttcctttgccccctttctctcccctcttgttacatgacaagtgatttccactttagtcccaaaagcaaaaagaaaatgaaataaacctgtgtggaagactggaataaagcattcttttctcaccatgatgactcttctgccaaaagtagagtcatactccactcatggggctatgaaaatggtacaacccttcaacagagcaactcagcaagaacataccaagaccctttagaatcctcgtacatttcagcccaacaatccacgcatggaaatctatcctaaagtaatgtaatcagagatgtagacgaagattttggtactaagccttcagcaaagccattttgctaatgaaaaaggaagataacctgtgtgttaaccaatgagggttgttgaaaaaaattacagaagatgcatatgacaaaatactatatgtttattaaaaagatttaaagatttcaaaataacatggaaaacataaggataaggagaaaataaatatataaaactagatgcaataaaatgctctttaatattataatagaagttatctctggattgtgggatgataggaaacttttaaaatactctttgtatacttttaatttttatgttttttcgatactccaatttttcaatactgagtgtgtatccctttcataatctgaattaaacaaggtttagggattttttgtttcatttttaaggaataaaacaggacatacaatgacactaccatcctatctaacttacaccctttatgaaagcaactttacaaatatacttcaatatgcaaatgtatgtgtttatatccattttgccaattccttttctaagtaaattatgaaacaaggaaatatttattaagacttttctagatgcctagaatttaataagcccttaaaaattctccacctagcaaagacacaatacatttatcaggattatgctgtcattttgtaaagtgaacgtttcacaaaaaatattcacattttgctaaatagcattttgtttattaagtggttcttcttttactctaagaatctagcaacataaaatgagctaataaaatatacacataaatgtaaataccaacatacacataaatctttgccttttatagctaaccttagagctctctgcataccaaagatttttgtttttgttccattttgtttggaagacagatgtcttttaattaacataatattgaaagcagcaggtatcatgtctaatgctatgttgtatagcaaccagtatcatcttcccattgattgcacatagatacacagagcctggagtgccacattcatatagtccatatttccaataagcaggaagactgcagctaggtcctgggaagtaggagattccaaatgaaataaaacctcagcaactgtcaatgctctattttatgttttattttaaaactgatttatgttcagtactctgacaggcttcagaaggatggtaatgaagccccaataagcttctgccaaatgcaatgcctcagccaaagaactattgcttctgaaagtggttaaactagcttattccagtgctttctcatgggatccaagagtgggctctgcagcatctctatctgtgtttggtggggaatcagggaggtgttggagaggatgttactattctgaaaatttagataaaattaattaatatgtatattatattattatgtacctccttctcccatttgaccacatgcacacagaatggtaataactctatataaaacctgcaggtaaggctaactgccacaaggttggtggtgggggttaggacctataggacttgctctcctaattgtgataaagagagacgggaaagcaatcaaataatccaagaacatgacccaaatcgtggtcgtactgggtgggtttttgcttgtaacccaccggtcaggaagtcctgggcagctgcaattattacagaattattcaatattgagtctgtaattagaattattatgaatttctatagttcaccttttaaaaatatttagcaactctatcttaaaaacataagttgcaataaaacaaaatgtttcttaaaaagccatgagtatttgtcacatagaaggagaaaatatatatatatatatatatatatatatattccagcaatctcttattttatgcttttttctgtagtttattttaaaaactttattttttagagcagttttaggttcacagcaaagttgagaggaagacacagaggtttctcatataccccctcactgtattccttgccccacatatgaagagatttccccgttatccacatctcccaccagagtggtacattgattaaaattggtgaacctatatttaatttttaaattgatgaaactatatttagattcatcataattacccaaagtccatagtctacattaaggttcactcttggtgatgtacattctatgggtttggacaaatgtattatgacatgatccgtcactacagtattatacagactatttccactgccctaaaaattttctgtgcttcacccacttatccctcccctgacctcccatctcctgggaaccaatgatctttttactgtctccattgttttcacttttccagaacatcaggttgctggaatcagtaggtagacttctcagattggcttctttcacttagtaatgctcatttgactatcctccatgtcttttcatggcttgagagctcttctttttcagtgctgaataatattccattgtctgggtgtaccacagtttatttttttcagctactgaaggacatcttggtttcttccaaagtttggcaattatgaataaagctgctataaacatttgtgtgcaggtttttgtgtagacataagttttcagctcttttggataaataccaaagagcctgtttgctggatcatatggtaagagtatgctttgcttattgtcttccaaagtggctgcaccattttgcatttccaccagcaatgaatgatagttcctgttgctcttgcatcctgttgctctccagaatttggtgttgtcactgttctagattttggctcttctaataggtgcatagtggtagtgtgttgttgttttaatttgcattttcctgatgacatatgatgtggagcatcttttcatatgcttattcgccatccatatatcttccttagtgaagtgtctgttaaggtctttggaacattttttaatcaggttgtgtgtttttcttattgctaggtcttaagtgttccttgtatagcttggatagcagtcctttataaaatatgtcttgtgaatattttctaccagtgcgtagcttctctttgttgtctctcttattttaaaattttttttaaaaaatcttctgctgcatatattagtagaagttttaactaaaaaatacaggacctaggtgaaaagttttatgaaataaaaagaacactggattatgaggacatacgcacaggctacgtgattgcaaaaaaaatcattaaacctcccttatcctcaatttgcctagatggaaatgtaactattaatatttgccttgccacccaataactttattctaaaagtatcaaatgtgatgtgggcaaatatactccagaaatgtaaacttttagaaattatgatttcatgaaaacttttttagagaaatttaaatttgaaggacaatttttgtgaaaagtgatatggaccaattaaagcatttcatttctattttagaaataagatgctggtttgatgttagattttcttcaactgttgtctttaattgctttctaagtttatgcatttgagtttatactagaaaatgccttttgtatgcacctaatgtggaactgtagatcacttcaaagtgagtcagcttcaacattcacagaaatataatagtaaggaagcagtgtctaaactaactttcctgttgttcctggaaaaatagtcataatagggcaaaagcagttacttgctgtattattcagagcataaattatatactccaaaatataattagcacttgtgtctgtaacagatagctacattttctggttatgtatctatcaaattttcattttaatagtgatgactcataatgaaattatgcattcattgttccattcattaaaccatttcactggcgggctgtgcacgtaaactgcaaattctgtgtatgtgtgatcacaccactctcccccagtctccagttcttaacctaatatttgttaacacacacaaattctttccagaacaagttctctgatgtacattcagggagcagatgctgttgaaatgttatcaagttacagatgcacaaaatattcttgctgaatgtgtttggtaatatagctctgaaatatcacttcagtccctgccttctgccggcccaaacttcactctctggggaaccatccagaaaagtaatgctaagagttactaaattcactcctccgatcagctgttttcaaaatggtagaacaagctttcaacaaattcagcataggtttctctcttgttgaagaaggtatgagcttcaaagacactttattatctgaaacttcatgatagaggtaaaactaaaggaacagctattgaaatgtgatccagaaaacaaaacaaatgcaagaaagagattgtatcttatatgattcaacaggagaaatttttctctcttctacctcccctagagaggttcttttcatgcttccttttcttcctatcccttttctcctctctttcctattgtggccctctcctcatcttcaatcatgcatctccctctttcttcctgctctgtgataactaacatttatttcagtacatctctttgtaaagagcttcactcatacattatgtcctttcattcacatcactgcagtcttagaacagccattgctatcatttcatttgaacacagtgaactggaaacaggctagcagaactgtttccaagtcaggctgccttatttcaaagcctgtgccctcttccaataccatgctatctcaagaaattctttccttccttcctcataaatctcttttctcctttttctcttctttctcctccttcagcgtcccttcctcatttcctgctcctctttcactaccacaacaaaccatcttatgctccatccccattcccatctgaacactgctccttccagaaacctcctttattctcagatgggtctgagttaggggctttctttgctcctccaggaacagagcctccagaaagcgtcactaacaatccctgccccaggcccaccttctcgctttatcccattatcaaaatcttattcatttatctcttgtatttttagccactgttttctgaattagccacagataaaaattggagggaagtatacgactggggtattttttctgatccctcctctctgctttcttcccctcccctcttctcccttctcttctcctctcctattctcttctcttcttctcttctcttctcttcttttctcttcttttctctctctaaatcatatagtggtggtgtttaggttataatttaaacacttccttacatttgaaaaaataactgtgagatataatttgtaatattacttttcctttttttttttttttgttttgttttgttttgtttttttgagacagagtttcgctcttgttgcccaggctggagtgcaatggcacgatctcggctcactgcaacctccacctcccgagttcaagtgattctcctgcctcagcctcccgagtagctggaattacatgcatacaccaccatgcccgactaactttttgtatttttggtagagacggggtttctccatgttggtcaggctgatctcgaactcccgacctcaggtgatccgcctgcctcggcctcccaaagtgctgagattacaggcgtgagccaccgtgctcagccccattattattaaaagagaatatcacaaatacttttcccctgaaataattcttctattacaaatgtttggattatttgcttgcctataaaagacaggattttcataaaatctttaagcattgtttttcaacaatttcttttcggagtttttatactcacacttcagtggtatcagttactccaattacaaactgtgaagttgaggtactaaagaaaataattttgtattcgctggactcctcacaactgtgaaaatttaattacgctggtgagaaatagttcctcttggatgaccatgaggctagtgaaatgtcttggactcttaacataaaagaattttttttcttttactacttggaaaactgaaaatttgaaaaagtctttttctctttttcctaccaatttaatgggcaaagatttttttttttttttaatttgagttgcaataagtattttctgactttggttgtcccaggaaaaccactataaggatactcaaagagaacaaaattatggtttgtgatactaggacagttttcctctaaatcacgttttattcctgagaagaaactgtaaccagtcaagtaacaactaaaactcacacaccattagggcatattcaaactgacaactaggagtttagaaaaagaaaggtttgagaacaccctgggtaacatagtggacccctgtctcgaaagagagagagagagtgagagagagagagagtgagagagagagagaggaaaagaaaagaaagagagagagggagagagggaaggagggagggagagagggagggaggaaagaaggaaggaaggaagacagagagggagggagggagggagggacaaaggagcagaggaaacagcgtctttgctttatcagacatctgagcaattcagatattcagttattacatataataaaataatggatgctatgacccgatcattagagcatttctagattacaaaactaccaataattaagtagtggtgatttataatcattctctctaatattttgttgtagtagtttgtagcagtttttgtttgttaattgctactcatttttagttctataggccagtataatacatgtccatccatattacatctgctgctctctttaagcccttccctggagcacaccatctagtttccgtagtaactactacaatactattgctcctggagtagcaggaagaaaggaaatgcggaagagaatgaataaattgtgtagttctattaagaactttctccgcttccttacttgcaaaggtacttaacttttcagagtagcacttccagctaactgataccctcttctctgaccaatgttaagaaatccctcttctatcttccatgatcatgactgtccaaagtggagcaagataacgtacacattcccattctttccatccatcattcattcttgccgtttgacagttgtgcatggcatgtgattgcttcagcctgaaacacaaagctttgtaagtcagcataaaataaacactttatgcactgaatgatccattcagtctagttgatctataatttgagattttgtgtacatgtgtaccttaagtcatatctcagtaataatgagaacttttcctatttggattgattttcatacctaactccagagaacacttatttttgtaactgggaagagcaggaatcccttactgggagtgagaaaattgtttggagaatcctagagtgtttactaccaagttcgctttccatatagaaaatatctatttggctctctctcctatagttaaggaggatttggaaatctgatccagtgcagggcgatgtcggtctgggaaggaagactgtgagccctctctccctttttaatatgagaattcgaaagcagtggggaagtgatgttggacctatcacagcattgctaacagacagcctattacagtatttaataaaaacagaaacagcatgcctatcataggctaataaatcctacctcctgcacgctttaaaacagtatgaagcagctttaacggagctccagataactaatttcaagcatggctgtctagcgtgcctgtcactcctattgtccttccaaactctttcagacattttgagcagggagtattaaagctatgagttagaaagggttgtgacattaatggtccacaaaggctttaggcacaagaggtaatgatgattaccggtggctatttggaggactgcaccggatcgctgtcattaaaaattaagcgtggcttttgaggaagatgtgacaactaccggaggtaggatttgcatgtaaaacaaaggaatctgttgctgtttcatgctttttgtttgttctgtggcgtgaggatcgtgaattgcagccaggtgcggagtgagaagcagcaagaggagggagaggggagtgggagacgctctgcttagagcaaaacacagtggacagtattatgttttatggcagaaatgcctccaggacaaactggctccaggcttacagcttgctgagtgtgcattccacgttgcttttcctgtggagtagaatgcttagaggtcacgaaggaaacactttgcctcttacctgtggtgccggctgggctactgtactggtagggtcgagtgaagactttggtgggtggaaggcataaaggtccaagaaaaataaagaggaagctgtccttaagatttgaaacctgttattttatttctacagtcaatgtgttttgatggtcagagtctgatttttcaaaggggaaattggaagattacgacaaatttccctgacaaagaactatttcctatgtaatccattataaaagaaaattgggtaccttcgtccgttttgcatattgaaaggctgacccacactgtttgggttcatggttttcctaagcagagtaagagttttcgactaaaagaaggggctttctctcggttcctgctcttgcttttcaacaactgctggggctgcagatggaaatggtgattagttagaggttatggacttgacattttacctttctgttttgttttgttttttaaatgaacagcataaaaacacaattctccttcaaagatgggaggggcagttgggttccaaagtccagtcgataatgaatagatttgcagaggaacttattatactgctttgtactttatatgggatcggtatagcacaatcagaaaaggaaatgtcaggaaatcacaggctgagatttctaaggcaaaagtacaatgatcagaaaccagtgttttctcaacttgatctatggtgcaaatttcagtctttgtcattgcatatgaccctcaatgtgaagtggcagaaacatagtaagtgaatttctcagtgctgttgtgttgtttccccagtggacttcacaaactccgagctgtaaagatgttgctttatattctgaaaaactctgtattctgaggcatagattggttataacgaatggcagatatgtgaaataattataaatttataaaagaatgcaatattcttcaaatgcatctaaaacttccatactaatgcagaattaactagaaataaaattggaagatgattagagtatgtttgttttcagctaaatactgcaattaaggataaatagggcttttgctcttctctgatgcagttgagtttgtgtatttgtgagcttctatatatatactgtaatccacatacaaagttgaaatcattgccccatagtagatggcatctatgttacagtttcctgtttgtttttcctaacagtgtggtggattttactgaaccagccgaactctcttggctggtctttacgtgaccagaccacatgtccacgaaatgactgtatggaattcttggtgcatttgatagctatgacatcgttttctgcttctatgttaccagtgaaatgtgtgcccttgaccttgtgaagtcccttctccagccaactgaccagtcaagaatgcatgtatagaaagagagagctcaaaatacacaaacaaaaatacacacatacattttacttactgttgttagaggtttacaaatcgatattatttctattattttcattaatttcattaagggtaaaaggactttcactgcctctggtcttaccgatatcttctgaatctaattgcatcaagtatttactttagaggcaattcgtgccttgaaagttgtcaacaggagaaattattttgctatggttatgctcataacactttactgataaactaaaatgaattttcacaattttcacagattgatgaggaaaaagtttccgtattcttgatgatatatgtgtctgaactgtatgcccacaacctgaaaaatatagaggagatatggtgcttgtttttttttctttataagctgtgaggaaagccaaaccaagtaatttagtcaaaacaatctactttatatcacaaattaattttattgcctgtttacattggtagataccagccaaaacattttgagatatctttttctttcagcttcttctacatctagtaataaaaaacaaacaattctccagctatgcaaaaagcaagtctgcagtcccccttgatataaaaaataagcacagctttagtcagtcttgtttcctcagtccccatgggtaacacagccatcgtatcagtcaccaagacacttagaatccagagttgtccttgttctctgtctctcttatatacacagacagtcatcatcctactttattggaagatattggaccagatatttctcaaactaacacaatcttccctttgatcatctctccctctcatcaaaatataattaaaaataaagcttccaaaaatatttctgctatgatatcaaataaaaaagcagactgcaagaatgtgtatataattttgttaatgcatatgtgtgtatgaaaaaaactagaaaaaaatgcatcaaaattttaacagcagttatctcagtgaggcggaattggtgcattttattctcttcatacatttgcacggttgcattttttttcaaagagcatctattatatcaatagtaagaataagacatatcataaaagtttatctccagcccctgttgccatctttgtctgtgatcctgctgcatatcatgtagtatgtcttcacctcaaattccaaagtcatttgcttgtctaagcacaactgattaaagatgccattccattgtcaaatcctcttcatccttaggtttcttggtacttcaagaaaaacagcattatcctttttcagggactgactcctacctcttaactcaggtttctgaaaaaaggggaaagagagagagagagtgtgtgtgtgcgtgtgtgtgtgttgagtgtgcatgtgtgcgtgtgtgtgtgatttctccttattttataaacagagactttttcaatctcctgctggttccttattatttcctaaacctttaaatattggagtgttccatggatcaactataaatttcttctttatctatacttaagccctaaatgagttcaatcaagtgtcaagccctcagaaacttcccgtatacagagctctcaaattctaatccctaaccttgacttttcctctaacctccatacttacatatccaactacctacataacatttccacttaaatgtctacaggcatctcacacaggatatgttcaaaatcaaagttcggaattccacaaaatgtcctccttctatatttttctccatctgtgtaaatgggaacttcactgttgcacttgctcagaagaaaaaccttggagtcctctgtgatcctctctttcttttgcacatcacaggaaatcctaaggcctctaccttcaaactgtgcctagctttaattatttcttgtcatttccactgctaccactctgggcaagtcactaccaactctcacattattacacatttttcacagttggtctcttacttctgcctcccttctcccacccacacgttctattctctacccaacactggtggtcatttcaatattgacgttaagtcctaccttctgctcaaaagcctccaatgtctttctgtatgactgcagacagaagccaaggccttacagtggcccatgtgccctggaataatctggttcctccctgtacccttctgctaccattcttttccattccactgccaccacgctggcctcctgggctagtgctcaaatccaccaagcactctcaaacctcagaggctttgacttgctctgcctgctgcctaaagaattcttcccctgcatagtcacttgactcagttctttactttttttcaggtttctgctgaatgtcagaaaacttccctgaaaacacctttcaaatcacacccctttgtacacttcttattcccagacaatgctttctttttctccatagcataccatattatccccaggacattacatgctaagattttattgtctatctcccttctcctcagttgtaaactctatgaaagcaggaatttttatttactttctgaagtattcatagcacgtagaatagggtctcttatgtagtaggcacttaatgagcaattgtcaaacgaatgaacaaattattcaatgtggtaattaaatgttttccttcatcaaaatccattagtagcattagattccaagtataagattttcaacctcagagtcagagctctgtgtcataacactctgttgctttttccaaagagcaccttcaagaaagttaaggaaatttatcaagatggttttctttcccctgcctgcacaggagggggaaaaaaaatcacatcactgattccaatccatgtcaaagcaaataaaaattcaatttgtctgaatttgatcttatccaaacgatgacttctatttcaaaaaggacattttcacagatctcctatacaaatgactataaatgttgacacgtcctatattttctttgctctcccctggcaatgaggaaagggatggtaaaaccaagttggaagggatgattggggtcagtatggctttctaagtgtacaagccccagtagcctgtgcagcagtagtaatcagttaatacaatcaataatcgtactattcatttacactttcaaaatcagcatggtacaatctcatggtctgttaaacagtgacctctctaccatttatacattttttcaattaattaaaatataatagaataatcttattgtacaaattggatttaaataataatgtccaatatttctagaatgttttatagtgtcaagaggtagtgtgatgtgaaaaggatgcagcatctgagacaaacacaagcattaagacaagataaacttggtttgaatctcaccttttctacttcatgttgttagatatgagttctaaatttcttttcaaagaattaatatcagtatgttcaattctttgccttctacttttaaacttaacttcctcataaagcaacctttttcgattacctactacaccctgactcagtccgatcacctgctcattctccaccctgactcattctgattacctgctacctgctctgctccgactccagccaaagcacccaccctgtcattctctttaaattagccaattggaattagtttatcctgtgcagtctaaccccacccaataggggaacaacacagcagcaggggccacgtgtgtcagggatgaggaccccttcccctcccttgtccaagtgtgcgctcaccattgatccatctgtaagggcgcatccttctatagaagtaacttgtcttgctaagaattaaaaagaaaattttacattctagtgctattccttttgcagcaccgaaactttatatataaaaatagctacatgatgttgggcaagtttcttaaaccttactgagcctcagtttcttcagtggtaattgatgacagtaataactacctggttgggttgaagtttaaatgtcataatatataccactttcccattagagtaactggatcagaggagaagctcaaaaagtaatagttatctcattactattgttatttaatcttcacagcatacctcagcagtagatattataccttccattgaacagataagaaaactcaaaagtaggaaagttaatcaaattgctcaaggtcaaagagctactatgctatcaaaatttactctctattcagctgtaaagactcctgataaatagaatgttagattaactgtctttaatgtatttgatgactgaaggctactggtggttaggagaatttttttaaaggaagaatctaaagaatagaattttctttcatatttgaacaatacagatgtctcatgtactccttccctaaacaaaagtacactcaaactcccaggaaacaatctgaattaatgcaaatttacaaattaagaaagccctttctagacacgctgtataatggagtattagaaaaccagtttcacagccctgaatatcttggtttgaatcccagttctgcgtcttgcctgagtctccctttcctcagaaggaatgtaggtagtaatggtatattattcatggggtcacaaggattaaatgaaataacctgtgcccaggtgttagcaccatgcttggcacaaattagtgcatactgcctatgacctatttgtattaaactattatcatctaagatgaaactataaactttaattgcatgtattataatactgcaagatttggtttaaaggtcccctttagtttttacttcttggcatgtcatgtctccaaattcattcaatagatgtcatttaagagtcatttgaccagaaccagaaaccaattttcctgaaatgtatgacatttgctcactgcttattaggcccaaaatgaaagaagcaattctggaaaaatcaaagaaaatgtctgcctctctgagataccaaacctaattttataattcacatacctgggacagaacttcaacccagtaccttgtcagacttcagcttcaacatgtccagtgtcttcactctgtctgtggctgcgctgactgaaaccctgagaaactgaccaggtgaatgcatgatcatacaaatgacttcagtgcacaacgtgcatgaaattgggaattaacctcatcagttactctagatttagcattaatttttgaatccaaagggtgtttcatttaattgctcaataaaaatgtcactacctccaattaaactattgggaaactctcaaatcctgatctactacataggttaaactttccttttctttggtcaattctgagcttcattctgtaccaaataacttctcaaatttccgattcctgaagcttggtaactaatggttgaattttgggggatgtgttctttaatattttgtaatttctcatatcttcctctgtaagtgcaactggtcccgacactagtatatctctccaaaagtgtgtatgtgtcactgtcataaaaatgtcacagatttttaagattggatttttttcttaatcttcacaatatgtttctcctttttgttgcaagaatactctgtgcataattctaccacggtccttaatacattatgctgtgatatttggttcacttatctgcctccttccacccctccttaaactgtaagtctctgaaaggttaaggactaggtcatcgtcatcacagtactttcaatgcctagcacagttcatggcagtagttaatgctcaataagtgtttcttgaaagaacaaatcaatcatatctatagtatatttcttagtgtccagtttgacctaaaaagggtaaatgcccacatggtcaaaaaaatcatacacctcagaaatacagtgctgcagggaattattttataataattaagccctggatctgccatgggctcactaaactctcattcacctgtcctctcacctcttctctttatattcccaggcccacatcagatgctctttcagaatgtttctctctcccttcctctctgctgtctgcccacagccactaccctatttttctaaagcacatggtgggaccttccattcaaagctgactttgagtttgacagttcagacagcaaatgcctaaaccccctcctcatcaaagcccgggtgacagatgatcctgggtgagaatttcagctctggagaggggaggaaatgaataagcagtcaaatgtcaagtctgctgacttcttaggaaagaaagagaagatacttataatactggacaggagggctttggcttacatttgccagcattatactaaatagggaaaatgtcagctgagtcccacatgtagattccttgtcatcttggtgttttcctgagtgtaaaattaaaactccaaaagattctggacatcagagctcattttcagttttcaacaaatctatctgatgagaaaaaaaataggcaagtagtaaaatatgcaactaaaattttaaagtctaatttttagccagataattaggttgcaaactcattgaaagcagcaacgatgttttttataaatctcaggtgactagaactatattaagtatatacaataggttttttaaaaacaacctcttgattaatatatgccctcctccttaccctgtcccctgaggtaaagccatattagggaaatcaagtaaatgccttatctttatttaccagactgcttgactggggatttagggttccagaaaccacacaagttttaattccacagaatcccctttgcacaccatggtgtagagagggctcttatagaaggggaaggaaagagcagcttgtgagttctgatgctgcccgtttgtttgtagaatcctatcactcacaggcatttctatgattggaaatcatttacaaaattagtccacataggattcttactaaagaggattcaatttgggaatttctcgaaataaagcccttactacactatgtgtgtctgggaatgtcactgacatagttcaggacttcataaataatgagtttggttttgtaagacgtttgaagtcttttcctcattggatttttcactggaaagctggtaaaggtcaagcacctgactccataactcatccacaaaggtaaaatatctctcaaagtaaaactctgagaaagttaaaaatagccagcaattcaaatgcaaatctagaatctttcttgctttgcatcagatgcagagaatcattccggacatgctgcataaggcactttatgagaaggatagagaagcagttggtaaatcttgctcgtgagataattcttgaatgtcttgagtttggttttgcataaacatctgaaaattttagactatatgaagaatgtatagtcccatcaaattgaactaaaactcctacagagggattctatttctgtagaaattctggaactattggttgtctctggattgtttgtttgtttcctactatatttcaaatgaggaaattagaagggggaaaagaaacctgacatccagaagaaaataatacctaattttagaggccacattttcatcgcattttgacaggattggtcccatttctccctctctgtgaagatgatcattcactggtttaactttgcttcatggtggttttatctgtgtggtgcttgggaacagccatgtgaggctctctgtgtagataactcaaggtaactgtttgctttgaaaacataaaaatagaacagcacaggactcatttctctgttggaatgaatcaaaagaaaagttgacagagaaataaagtttatgtacaaaggagaaggaaggtttagataacatatacccaaatatgagaaaatttttgtagatatagaaaatataacaatagaactggtacaaagaaaactggctagagaatgtctataacaatctgcttctcagtcttctaggtctatttccccattgacacgtggatttagtgtttgctgaactgaaagtgaaaaaaactggtataaagaaaacaaatgtgctctgatttacatgcctaaatgaagaaagctatcttttttcatataagcatataaagttgtaattttgatttcaggcacatgatggtgtttaagtacatttattgcagcttgtattctagtgagaagtaataagaaaattaataaacaagataaaaaggaagctacttacttcaccacaacctatgaacgtcctaaggtgtctacacgttttaaaaattcattctccatcctactaccctttaaattatagcctgttacagggagtaagtggggactgtgccctgacagagtgtcaatgtgtctggagagcaagagtcagcagcatgtatttggaaataaggctaaaaggtagaaaagagccatgctaagtaagaccttacaggtcacacgaatgagtttgctcatcattctaagaggaatggaaagccatccaaggtattaagcagggggctgacaaggtaattgcactttccaaaggtatctatgactgcagtgttgtgatcaaaatggagaagaacaagagtggatgccaagaagccagatgaaagtctactgtagtaatccaaatgatgctagcctagcccaggcagctgtgagatggcggaaagatggccagaagaatatgtgtctggaaagtgctatgtttgaatacattcccaatgttcacgtgacagaaacttaatccccaatgcaacagtgttaaaaggtgggacctttaggtgagcaggtcatgagtgctctgccctccagaatggattaatgccattttcgctggagtgggttagttattgtggaagtgggtccctaataaatggacgagttgggcccccttttcctccttcacttctctcttatgtgtgtgtgctctcttgctcttccgctttccaccattggccccttgaccttgaacttcccagcctccaggtgtgtaagaaataaatctctgttctgtataaattactcagtctcaggtattctgttatagcagcataaaatgaactaagacagaaaatcacttcatagagttgttcatggactatatttgagatgtggatagagaaagagacgatgtcaaagataacgctatatttctggttaaacaactggatagatggtgagattatggaacactggaaaaggactacagttccctttcatcataaaacattttaaaattatagtgtatgctcactgcctctatttcatatatgtgtgtgtatgtgtatgtatgtatgtgtgtatgtgtacatgtatattcttgaaatcctctctttacttgacttgaattatgtttaactatttaacttcccaggttctctcctactttatagttctttttatcttttctcctttcctgggttctttatcttctcttacactttagagcttttttcagtaattggaaatatcatctatccacacttaaaaccgaagccatctctccagctgcaaccttgctcttccaacccaagtcctgtgttgtctactacctatgttgacatttccctgtggctgtcatctttagacttcaaaattcacttggcaaaattaaactcttatcagacctaataaatctatactgtctcatgtttctgttcattgtaccacaaatcttccagctattaaagccaataattgtctttgaatcctcttccaacgatagatctaattggcctactgattcttctttcaaaatatcttttgtttctgtcacttttctcttcacagacaaataaagtccctttattggaacactttggttattaagatagtttgctaaataacctcctcaactctaccctcatatttttcaaagtggtagttattgaatcacctgcacaagaattatctggggagctttgtaaaaacatcacttcatgtggcccatatttaatcagaatctttttgggtaaggcctggaaatttaccaaatactatagatagatcttgcaatctctttctgccctgggtttcttctgcctagatcatgcaaatgaatagtttccaagcatgaccttgatcatggaacttccctcatcacagccattggctctcacttaaccaagcaaatcaagtcttctaggactggatgtcaagaccctccaatttttgatggccaggtgaatttctagcctaatccttacctcccttctctcatcctgttacaactaaactatactacttgccatatctcaagcatgcctatcatgtctttatatctctgtccctgagccccatgcatttcaaacctccagaaaaggtctctttcccctctcatttccacctcccaaaatctaccaattctcaatggttcctcttaaatagagcctccccttaatcctttcacatttttcctcttccttttctattcctttcactccaagctagaaggagcctctccaatctttgaactccttcagcagattctaccttttggtacttgcttgtaacataattatatgtataaataagttttccttttttacttctacttacaaaattgaagacaggaactatattttatgaaaagatgaattgatgaatagaaagaaagttgaccagagttcaaaatccatctagtgcatgtccttgggcaaataattgagttcccttattaagtgagattatgtcacttactttatagaattttggtcagtataagtagaggtatcttataaaaagataagcaatatgaaatggctaatattttattttcactaacaaaatggaaatttcattatacctggtggttctctatattttagtacgcttttctttaaaataatgttgtatactatgctttacatccactttacaaatattgcccactgaatatataaatgaatatagtaatgctaaccctattagcatgaagagagagaagaattagagagactctgaaatagagagaagagagaaaagaagggaaacaatctgcctcggggcttaccttgcctcttcctttttcttttattttcttttttttttttttttcttgagatgcagtctcactctgtcatccaggctggagtgcaatggcacaatcttggctcactgcagtctctgcctcctgggttcaagcgattctcctgcctcagcctcccaagtagctgggattacaggcacacaccacaatgcccagcttttttttttttttttttttttttgtatttttagtagagatgaggtttcactatgttagccaggctggtcttgaatgcctgacctcaggtgatccgcctgcctcagcctcccagagtgctgggattataggcgtgaaccaccatgtcaggctgcctgttcctttttcaaagcaggtgagcacacagcagttttaacaataagctaaagcaagctcttttctaatgagagagttctgttaaataaaggtcaacaagaaaagtaacaacactcattgtctcttgtttacggtccatctgagcatcatgcaaacttgctcaaatttctctcctgtgcattgttactttacctagagtttatctaaatcacattacactctaccctggctggaattctttgtcgttaatcagaataacaatagtttccaaatgtaacttataaaaaagtatgcatatttttttttctcttcagctatctttctatccccttgcattatttatgaaaagaaaaatacctcttgaccagttaacttaaaggaaactcttaccttgataaggtcagtgttatgttggctatataagtaaattaactaaggaattgatgtcattctcagattcttactttaatcttcagactttgcaaccccaaggagagattctttgtctaatatttcctttgttaaaaaatgatttgcccggccaggcacagtggctcacgcctgtaatcccagcactttgggaggccgaggcgggcggatcatgaggtcaggagatcgagactgtcctggctaacatggtgaaaccccatttctactaaaaatacaaaaaaaaaaaaaattagacgggcatggtggcgggcacctgtagtcccagctactcgggaggctgaggcaggagaatggcatgaacccgggaggcagaacttgcagtgagccaagatagcgccactgcactccagcctgggcgacagagcgagactccgtctcaaaaaaaaaaaaaaaaaaaaaaaaagatttgccccacgaaggcattataataaaagaggtccttgaggattatacattattcaagaggtaggtcaagttcccaggagttaggagtgagatagtgagagaaatgccatacaaagttacacagtgctttggatattttaatagacagaaaaaatattacgaacagaagctaagaaaagaacaaagctctaagaaggaacatcagtattagcagggttccaatctcttttttgccactagtgtggcaattatgtgatattgagaagttagcatctcggtgcctcagtttcctcctctgtaaaatgggatctgaataccggccacacaagggcttttgtataagttaaatgaaatcatgtatgccacgtggctagcacagtgcagcacatagtagcatttcaataaatgactcctgtttttattattaagatgagagtgggtaatcatgtcaaatattacagagaattcaaaggaagagctttggattttggattttggattttggctctgaattcaatgaaaaagcgggagaccattttccacaaagaggataagcaccaaaatcaggttgcaatgacattaaaggactgagcaagtggtgaggatgcagatttttctttccaagaaaaaattttccccaaaaggaaagtaagagtgagggcagttgacaaagggccggtgaggatgaaggaacagtacagatgctttttcttcccagaggctggctgtgagggctttttagtagttgatgaactagtatcttatcctattttgtagattacacattgaattcactctaaacttatctcctattattctcacaactctgtgtggtgagcatcaccatccccatttaggacagaaaaactgaagttaaaaagcattgaaagtcctatcccaagtcccatgacaagtaatggcagagccaggctttccaccagctcttctaatgtaaactgcaggccacactgcctgacctaactatgaacccatcacttcggcctttcgaaccttcttcactaagacatgtgcattttcagagaggatttggagggaaaatccttggagaaatagttgtttattctaagggggccactgctaacaagtccttaaaaatatccacaatgttgcacaacatttattgagcattttgtagatggcagacagtttacacaataatatcagttatagcttgtgagcccttattaagtgcaaggattgtactaggcattttacctgcattctgtcatttaaagttcagaagagtcctaaaatccctatcgtgcacttgagaaatctctcgctcagaaagcatgatcagcttgcccaaggtacacaacttgtagatggcaaagccaatattcaagctgaagcctgccagactgacagaccttcagatatcccatttgacacctgctggccatttgacacactttctccctaggtaccagtgtgcacaagccccaggtgtgcaggtctggactgtgaggtcctaagaggacccagagctccggaacccagagctgccacacccagagctccggaacccagaagaaagcatatgactcacacacaaacgtctggggcagctaacccaggcaatctgctttcctgtggatcaaaatctatcttagaattccctttgtatatgcacaaggtaatgcatggctggtccccatccagacgctgaccaaggtttacagatacgattctaaatgtcgactgtggaagaatgatgtaacagcactcccaccacaaactcccacactgaggagttgcgaaagagaaagaagagtccagcaaagaaggaaaatgtttcataacagatttcctattcttttcttaacatatcaaattgtttctctatttttctgcagttttattttttgaattaaacccccccccaaaatattctattcttttgccaccatcctaagacaattcagtttgacaacccatttcagacaaaatactattatgcctctattttatttacctaataatttccataactgtatatcaatggtactataagctttatttcctttctgtctcatttccccaaaatcagccttgagctcattaatatgatgcatggggctgcttttctataaaatcaccttttcccaaactaggtagaatttagaccatagttctttccatctctattagtttgttaaatatatatttgtaactgttttaactcaagcaaatataataagtatccttgcttttgcttttctctaaattataggaattcaaacaatctattattctaaaattattataattagtattcaaaagcaatgtcctaataagtcacatattttaagcctcagtagtccactagatttgtgaataaataccatagtcacttctgacagcccccataatgatgcttagatttctctcttctttgctaactagtgcagagtttgatgttactcgtgtttcgaaggcctaataacacctaagcgtttcttactggtagttctacaataaagataagcagaaaacaactgccctatgttgttatcttagctggatttttgtcactgcttgtcaacatgcttcctctgcagtgatattgcattcattcataatcacaaaagaaaatcaattttaataaaacattaaaatgaaatttcacccgaaccttcacctgaaacttgaacttctaaattgcagttcatctaaagtcagttaagatttatgacagatacataaaatgtgaggaaggaaacagatttcccttattatcctacctaagtacaatctggcaccatgctagaaaagaacctgaaatcctggtttgtggctagtcttaatctggatatgtttataagatttgattccaacttttgaaaaatgaactgaaaattggccaacacagacttttaacaatgcccactgaaaacaaaattaaaaggcatggacaaaccactcaaatgcaagaaatgatgggaattgtgacccagacacagaaagagagtttttggctgaggaatgtcactcagcactgagcattctctgatcagcttcagagagattccttttttttttttttttgacagtctccctctgtggcccaggctggagtgcagtggcaccacctcagctcacggcaaccttcatttcgtctcctggtttcaagtgattctcttgcctcatcactcccagggagcagagattatgggcgcgcatgctatcacacccagataatttttgtatttttagtagagatggggtttcaccatgttggccaggctgttctcaaactcccaacctcaagggatctgcctgtcttggtctcccaaagtgctgggattacaggtttgagccaccgcacccagccagagattctatagtactggaggattgttcatatcggttttcctaaaaataaaagaaggaatgaaggtaagcagagaaaagaaaaatgcaaataattagacaaaaccattgaaaagaaatataccacagccagattgttttaacaaaaactattaaaattattaatagctaacatttattgattacctattatgtgtcaggtgttatgcttacatgattatctcatctcatgctgatgataaagctatgaggtaggttttttttttaatatctgtttctcagatgaggaaaatgaggcacagaaaagaccttcaacttcttcaaagttacagttaacaagtgttaaggcctaattcaaattcagttgatccaatcctgattccagagttatatactttatccccatcgcaataaaatttcaaaccactatgcaggtaaaataataaccttcagaggatatggttgtagataaatttgaatcaacttttaataagaattcaagcctgaaatatttattggagtcaaatctcgaaactacaattggtaccaaagaaccatgcctattgtcatctggtgttacagaattgaacttcaaatcacagtgatatttagagagttcataaacatgtattgtttaaagaaaaaaatatttgtttctcttaccagtgtcacctagaaccttattagaaatgtcaattcctttctttctttctgatgtagaacaagtgacccaacttgcaaattaatttaattcaattctttttaacaatcaattctcaggcccctttcagaaaaaaaagcacttatgcttttccttcctctcaaaaataaagaactcaagtttgcattatttctatgaaataagtataatttacactcagaagtcagtaggctagtaagaaactagggttgataaacagactggaagacatgttcccttactctcaagttgcttgcaaattagtactgattactattcaaaagaaagcaatgtcttggttttcaaaagcatatgggtcttttgtaaggacatgggtctctgctctctgcaagtgactttattatggatagaggttgtctagagaggacttcacaaggctgtcaaactaatccttccttagcaggtagctgataagaacatatgaccaagaccaatgttcttgtcatttaaattagaattacttaaagttgatgccttcaggatgaaaagagaggtgatagaaatggtggtctgacagatcagaggagctggtatgttagaagagtgtcctctcacacatggtaagcccccatgctacctgctgctcaggtggactctgcaactgggaagttccaagaacaatgagagtcaaaagaaagactgaacagaacatcttactctttctcaataaaataactcttcattgtccacaaaccttccccaagcaaaaaattttcttccctgtgccgccagctcctgttgtatgacacaacacccaatttagtctaatggaatcacatgaagttaagagcgtgggctttcacacctgggatttggaccttgtcctctcattactagctgtgtcatcttgggcaagttacttaatgttttgagcatcagtttctacatctataaaatgggtgctcataatatttatcttgcaggtcttttgggaagtttgaatgaaatgacatatataacacatgtgctcatatgatgggtgagcaatcaaaactagccgttgttataaaagcatgggctatgtttacaaagccctattgtcattattcactttatggtgaatagccatttccactgtattgcagtttgtggggaggaggcccagggtgagaaagaatggggaggtatttttgtttactcagatagattgtaagtccctcatccttgatactaactacatccaagaaagcatatcatctctgacattgagggtctaacctaagtggtggagactatacatatggtgctatattagaaagtagaatgtgctcactgttatactagactcacaaagcactttgggatcaccaaagaggggaaagctaattttgatcaggagttggggatgccatcatggaaggctgcatatttgatctgtgtcttaaacaaaggctcgaataagaattagaaataagaaggaaatagacacctcaaaatttcaaaagcaaaacagacacaacttgggatgcataggatatggagagtaaataggaaaaagaagagtgaaagataaccagaatttagaagcccagaaaactggaaggacagtgctgactgaagttcagcaggacgtcacagagaaggggtgaaatcagtagaagatgataaactcaggttgagtttgaggtggaggaagaacatccagatgaggatatatcctggtgaagtataatttacaactcagggaagagatgcagattccagagtcattttcatggatgtggtcatttaaacttaagcaatcattttagggtagagaataaatcaataatttaatggcaactagtgtagaacagtaagaagcagctatgctttggagactcatagaacacatagttgggtttttttgttgttgtttttctgagatggagttttgctcttattgaccaggctagagtgcaatggcacaatcttggcttgctgcaacctccgccttccggtttcaagcaattctcctgcctcagcctcccaagtagctgggattacaggcgcctgccaccacgcccagctaatttttttgtatttttagtagagatggggtttcaccatgttggtcagagtggtcttgaactgctgacctcgtgatccacccacctcggcctcccaaagtgctgggattacaggtgtaagccacctcgccctgccgacacatacttttaaaggaaactttgtgcaactgggaaggaaaccaggagaatgcagaatcacagaggccaaaggaagagcgaattttacagtggcaagggtgattgggaatgtcaggccctaaagagagcctgagtagcatgaagcataagggactgtgtatgccatgaggtgactgcatagaaagctgtttcagggctaacaaggagcagaaccattgagaagataaagtgggagagaggaggatgcatagaatcgtagcttgagggacaagggaaggtgttttattaggataataatagcctaaacacatttgcaggtttgagggaaggagccagtaaaatggattaaagctgaagaataaacaaggattaattaatcaatcaagacctccacagcactggttatcaaccctttcttaacataaaactcacttaggacccttattataatactaacacctggtcctgattctgatcaggattatttactagttttcccaggtgattcaaatctgtatctaggtatgagagtcacttacttagaagaactggacattggattaagaccactatagatggttattttgggatgacaaaggctctctttttcctctgagatgagggtagtatagtaccggggtggcggagtaagaaaaggatgaattaagagcggaaacatttagaaagactttgaaaggactcctgatgaatggcttcgaactgagaaagtagaaggtgagatgcttacattgagggtgcaaaagtaagactgggccattaaagaaatttaaagcattccgaataactattaagatttccacagagataaacaaggtaactgtccaattactgctttattctctctacccttattcgttggccatgcctttacaaagaaagggcattactgtgtttcttgttactcttatgaaaaagagaaaaagaaatattataattggggaacagatagaagaatagtaacgttaatagagctttagtgaaggctttaagtaaaggtatcaagaataaggaaatctaagcagtgcattgagatctctgtgaaatcagtgagaattcatccttgatggtatcttggagattatctcacccaccatttaaattatgagtaaactagggttcagagacattctgtgatttgaccaccatcaaacagcaagttagcaacaccaagagacattgaaacgaaaccttggagccccacaccagtgccttcagctcctgcacacacttggcctcctgacctctgctgtgaggttcctggttagcaaaatggctgtcgttcttttgggaggattaataagaaaatctgtaaattggttttagctctttgcaagagagaaaaaaaaactatgtgcaatttcttctttattgctgttattatgtgaaccagattgaattgctgcatctctgaagagtttcttatgactagtgtgaagtttcccattttaacccaagtcaattttaaattgcccatacaatacacagataactgactgtaataattcagttgccacactcaatacattgtttgaaatccaatgaaaggcaaaaggaaaacttgcaatcctacagaatcagcaggatagatcctgcaagctgtcacaggacttattttaagtaattaaaaaggagctgtgtgtgtagtaacaagatcagtgggtctcctctgcatggctacaatacaaggataggagctgcaattctctgggcctggggttttttaaatctgtaaaacaagatgaataagctagaacacttctttcagaattaagcctctctcatttctgtctgtattttaatttttgtcatccctccaccaacatttctaaaatagttcaaaacaaactataaagaatatttcacggatcatagttccaggtttttttaaaatcataaataaatttatggctcaatttcaggttccttatcagtaaaatagaggagcgttggtgtaaatattctaaactcagctctgtgcttcagtgggcttttcactacctttagttagttgcactaggctggttgctgtttaccttgcatggttgactgctctcttctcacattgtgtgccaggaagggcactgcaccttggtataaatgctgctgggcaccgttctgttttctttcttttcttaatcctatccaagtatgcagtacgctcttgggtcgtctcatgagacccaggggcatgttggaaagaactgagagaaagagcaacaaagcggcgagtggtgtgagagggcagcacgcgctgtgggtaagctggactcacccaaagaactgtatttattttgcattcatccccatgaattaataaaaagaattggtgatacacaaagagaggagaggctacaatttaaaagagctgtactggtttggatgttttgtaaaatgattacatgatggaaaagtgtagaaaatgcaatatttgctggctttggaactatctgtatgactataaagtcaggagtggagggacatgaggacttgtgagaatggtttttttcacagggaagtgatttttcttttcttagttggatttagggttattcttgattctagtgcatattttctcatattttaaaacattgcgtgatgttaattcacaagtctcagatttcaactttaatataatacattggaatcatgattttttctcagcctttcaaattctcaagtattttactatgagaattttcttgtatttgaacaattttttaaaagaagctctgtctagacacgcaaactgagttggaaaatggatataagcatctagatgactctataaaaaaagtatcttcattgttttaggcaacaagtgtctagtcttcactggtattaattatccaaatatgtattttatatcactaattaacttttcacacctagaaattgtcttacaaaaacatttaacaacactattattttccaggacccttttttcctctgcatactagatcacagtatttttagtgatgaggaaatatatacaaattcaaactgacagcaattcatgaatctctaatattcctggtatatgttgtccactttgcgaaaatgattattaatagcctgactgcaaaattgtttaagaaacctttcattttaaattagccataatttattttttcagactatacagatgtattaaggtcattttccttgcccatatttagttttccctgtttaataaaaattatatatatataaaatatataatacaaatatgtataaaatatatattaaaacaatatatgtatatttatatactcttttatgaatacacagcatatttattatatattatacatatcttttttattaaacagggaaaatgaatatataaattactaatatatataaattactttttatatatatataaattaagaaccacaagaaagaaaataattggcaagtaattagtcagttcatttgattattttagatcaccaaacaaaatacttcaagttttccaagatagtttgtaccatttggctcaaatgtttcctctgaggggctaatttattagcaacaacagagtgagttagagataagaaaggatgagaacccaagtaattgacatccaatcaggaggcctttgtctaagaatctgaggtgactaataaaaactgacaatcaaagggagggagacttctatctggagggtatttctcatgaaaacaaataatgcaaaattaaattaaagatatcaccccactgaagcgattgctattcccaactttatccttagaattctttttccaagcttgagattactgcatgggcaaatgcactccactgagccgcacaagcacaagcacacctagatcaatcaaccagtagtcagccaatcaatgaaatctatccaaagccaaagttttcttttcctaaatgtagcgagataattggctttgctctacactgttctttgatagagagttcactgacttaaggtgataaagattttaaacattagctaacatttttgagcactacgtgttggggatgtgccaaatgatttctgtcttgtcttttatcagaatttttgaaataactatatgaagttagtgcatttttgtccccagatgtggacactaaggcttgactacagttgcttgcccaagataacacagctgctaaacaacagaaccaggatgcaaacccagcgtgacctgagccaccaccctataccatctccttaggcgcagcactgttttgcttcagatgcttctggacactcagaagcacacagcagagtatcagttatctgaggctaaaaggcatgccatatgttgcctctgcatccaaaaaagtgccaacaataatgccacactcagagtggtgcttgaaaaatatctattgaatcgtattcacaaatgaaaactcttttctctaatgatgtatcatctcactccactaagaaatcaagtatggctccataaaattttagtcataaggataatgttatttgaacaggaacaagatggcattatgaataatagatttcaatctattaagcacagagctacagcaacagtttaacaggataatgcaaggattattataaaatttttagagattactgtaagtagcacatgatcccctttgctatcaataaaaacaaaacaatgctgagaaataggccattttgtttatttgcttttacatgaaagctgtgtggagttgcgcaactagactagggttaggacagctgagttctattcttggttctgaaactaaatggctctacgactctcagtaaaagactgaccttttcacgcctaaatctcctcatggttaaatgtaggggaggatcagatgagatgagtgataaggtccttccaactctaaaatcccatcattctgtaatagtgctgcattagattccaatgttagcgtagttggaaatgctcacttcacaattttttaccttttgcaaaattccctgtatcaggagattcaaaacatactttatgccaaaactcagaagggaaagaaatacagcagccttttagctataatctgatatgcagcaactatagtgtatgtgcaaggtgaaggaagagtgacaaaataagactaagaaaaggaaaaacaaaactgtcaccattacaggacaccaaaccagccaagacatgatgaaagacatggcaagattcatacagggaattagagcaatctgagccattttctagaactttctcaattttaattgggcttatttaaaattcagttatccactttggtgtacatgaaataaaatctaaaatatcaccaagacttactgtacttacaattagtgacagctcgtgaacaaatacagtttctagtaatattgtatataaagcaatgctatatatacagatctggaacccccagtgctgggttctttgcctacctttctataattagctgtgttatcttcattaatgaatgtgaccttcctgtcagatatgttgcttagctctaacacaattgattttattgtgatacaaaaacaatatgttttggttatgcaatcactcactgacttctatgaaataggtcttagtaagtggagggtctgttgttagccaagggaatgacaagtgtgaccactaggtttggcacagctgggccaagactgcgtaattaagggaaagagattgagaagccccagagacaggattctgggaagggaagcaggaaccattacagctaagtggtagcggtgaaaaagcagataagaaagtagagaagaagacccaagagctataaggctaagaaaagaaacttggagggaaatgctgtgttctacaaaccctctctttttcctccaattctaaactgtcaataaactatacactcttcagtaatgccttggtgcaagtggattctttattttgaaggtaaagtgattaaatccagtttcagaggctgactcatgggttaaaaatgcattgtaaggaaatgtgctgaaatacacaaatctgaatttgcagtattgctatcatcatagcatgaaggccctcctcgatcagaatgtgactggctagattgcatctaggttcagttctgaatatgacactttagcaggggtcttaaacatagacacctttggggaccaagttgagtgaaagcgggacaaagacagtaagcactgatgaaaccttgaagctggagagggtgtgcccagcagaaagatagtcaaattccttttgtttttacttttggatgtaaaaacaaaacaaataaaatagatattgtgtcaagcaaaacacatctgtgagccagaatctctgagtcattacaaaataaaaggacattcaaaggagagtggtcaggatacgaaataactcacaactgtgcagcatgtggaacaactgagtgaactgggatcctttaatttgaaaaagtgtagacccttgtgagcctggtggttgccttccaagtatttgaaggttgctatacagatgaggtattacagatattttagcttctctttaggggctaaaccagaaaaaaactgggcagccgttaaggattaaatgagtaaatatttgtaaagcacctaaagtagtatctgcacagagtaagcattatctattaaataaaatgaagttgtcttcacagtcagagttgtccaaagcttaaacgagttgtttctgtggtgggtagctggagcgcaaacattcatgagatggttatgagacagtattctgataaatgaaaagcccacccagacttggagactaccagggtccaggcctagatggttctcgaaggtagcttataaacctggactcaatttcatgtgcaacagatacttgaagtcaaagacgtgtctcctttactgaatggtcttgcatcacatttcacttctcagacaggactcatccctgctttgagatgagaatcaattgaagtcataaattaagtacccaggaaaaatgaagtatggggaaggcatatgcaatcctagaaagtaagggtggtgtccaggaagtgtgggtactttggaaaggaaataccagagcgtcccccagagtccttcaacaaaggagcagagagcataggcgtagtgatgaggagcttcagaatttaggatctgcaatctctcagagccacctttatgacgttttgtgagactgagtcaaagtggacactttaatgttgaatcattcaaaatagaaatccatgtcttaaaatccccaaaacatggaaatgaagagtcacaacaagaagactgagaagacatctgcaaagtatttttaaaacattgagattctggccaggtgtggtggctcatgcttgtaatcccagcactttgggaggcaaggcaggtggatcacgaggtcaggagttcgagaccagcttgaccaacatggtgaaagcccatctctactaaaaataaaaaaattagccaggtgtggtggcatgcacctatcatcccagctactcaagaggctgaggcaggagaatcgcttcaacccgggaggcggaggttgcagtgagtcgaggtcgtgccagtgcactccagcctgggcgacagagcgagactccatctcaaaaaaaaaaaaaattgagattctgattatggtgggtaccatatgtcacagaaggacaatgattaatatataacaatagtgactagaacaaactctgactgagacaagaaattcagtgcttatgtaggtctgaatatcataggtctgagaacagggcacttaatccaactggaaaaattgagaggaaaaatcagacctatctaacaattgcatgttgttgctttgtataaagtagagtagttggaaagtaaacagatgggaataaagatttatcaaacaccccacttctagcaggcacagtgctaggtgatttacatgcattgccttatcgaatccccatattaatcttgagaaaaaaaggtaatttattcccatttctgcacaagaaaactagagctcagtttaaaaaacttgcccatctctcattaacttgatggattacaaatcaatacaaatgttttggagggtaattcatccaaatctatcaaaaactttaagaagcaaaattattacctcagcaacaaaatttttagccatttattcctcagaaatactttttcatgtgtgcaaagatattatgtgcaattttcctcattgcagcattatttgtaatattaaaattttggaggcaacctaacagttatttggtgaaacaaacttatgatacatctatattctagaatactttgaaggtaataaaaatattaaagtatatgaaattaaattcattcggaagaatattttagtaatatttcttagtataaaaatcaaaaatacaaaaatatcataagtagaaaaattaactttttattaataaagtatatatacatctgtatggatatagtgaacgatctggaacactacatgccacgtgattaacagtagttacatctagagaatgagacgaagggctagagcagaagagaccacatcctaccttctgctgttctgtattatttaaactatctcaaacagaaaagtaccattccattaaaaaagatggaaaggaataatgaacccaaagtcatacaagcagccaccagcagtcgagactcatcatagttcctgcttcagtattgacttctaagtttacattttgggattcctcttcttctgaaatgacgttacactgtctagagtggaaaatgatacacagcagaattatgtgagagaataggaaaaattgtccaaggaaaatcaattaaagcatggatgaaggccatggcagcagccacaaactcattcttttgccaagaattaatatgtatctctagatatgaagatggatacaaagaaagtgttgtgtcacatgagtttgtttttctaagagtgtcgttctttagagcaggtctaactattcgattgaattacccccagaagacatggctaggtacacatagctatcattgactttcagattctctaccaatgcatttatatctccaaatttaaatcttcagcatcccctctggcttttctcatatagtatcctgctgaaaatcaagattctgatcaatcacatcctcacaatataaatctcatacaaggaagaagagctggatttttagaaacactacaatatttaataacactgattataattattaatgaaatctagaacctggaaacaaggtaacagagagtaaaacacgaatataaaaaattcagaaatatgtccaaagttccaagaatattgaaggtagacaaactaaatgatagtaacttatctctttgaatcagggcagattcttactggcaaggggaatatcatgagaataaactgaagcacccaaagatggttgaaccagatgtcctttaaggtcttttcttctcttacatgcatttctcctaaaacgtctaagtaataacacttagatgtttcagatgaaaatgctcaaggctgatctgctaaggtctatggtagtctataactttctcaggtataatattagtccaactttttccggcctattaataaataaggtaaaaccatgtttagaatgtgcagtttactaaaggtattaattttctattagatacttttagaggtaggtctaaatataaattgaatcacatctgtaaagttcattggtctcagcacttgagtggcagtatctggccgtgtcactcaaacacacacgcacacttgcacatgtgcacacacacatacacacacactcctacttggcaatgttagctcagagaaaactcatatggactataacacacaagccattcaaaaactttctccaaaaccaagtcaaaagaaatgttagtctacctagccattacatcctgtctccttcaagaaaaccagtttctctgttttttgttttgaacccaatgtcagagaggaataacatattaatttaattttttaaatcaagcaaacataaaaaaaaactatcccttactttaaatttagataaatgtgtacaaatccaggaaactccatatgaatgttgctcaagtggggacatttcagcaaaaattgattttactaaggatacatttacagtgcacactttgcaaaagttaccaagtagcgctgtgcttaacaatgtacgttcatattgtatgaattaaccacctaatggctacccaggaaatattacagcaaaacacattgatgttggcataattgagaagcattcatttaaagataaatgtcctatcttttgtagctgtaggtactgaggatgcattatgatgaataattacacagattaataagatgtcttcaaaccttctggtacttaatggaagtagttcgattattttcaaatgagcgtatcgtgactctattgaaggtatactttgcatatcaccattctaggttttctcattctgatctttatacttgccaatatctgaccagaagcagaaagatcaatggaagtaatctgagtttctgaatgtacatgtagatgagagtacacatgtgtgagagcgtgtgagagtgtgtgtgtgtgtctaaatagctcacttaagcatggtatcatttatcagccaatatcatctgtttgaaaattacctgagacatagaaaacagttggggaggaagtcctgagcaacaaatagaaatgtctaaatgtggagattaagtagacacatatgtaatacaactagtggcttagagaaggtattcaataaatgatcactatattattatcatcattattgcctctgtatggctacacagagaacctgaaatcactaacaaacttatttagccttaaagcagataagaagcaatcagctgaaatggaggacacattttgctatagtcaggcctgcttacaatagcaaagagttacagctagcattctaacaataaagaaaaaatataaagaaaattataaaagacaaacataacttaaagagcagcatgcgccaggacatttgcgccaggacaaatagtttagactatttgtagccagagagagcatcacttaatctttgcgaaacacacactttatgttcttaatgatgacactgttaaaaatagcagctgtggagtcagacatatctgagttcaaatcccagctctaccaccctgtggttttgtgatcttggttaagttgcttaaccatgattctcagtttactgctcccttaaataaagattccatctcttcctcacagtacactaggtctaaatgaaatgttgaatgtatgtggctaacacagggtccaccacatggaatccacttaggtaactacattattattaacatattttgcttaagaaaacatagaaatgtgtgattaaaggtccctttcaaatattttaatgttataaaacaatgctgtcatgtaaagaggtaatttttagttatctagaaaattaacatatggaaagcctaatttccatatgacactgcagttagacttggtttataatttaatatatactcagacacagataagaagatatgtaatcacagacagaaagaaaaagtagtttccctttctcctttttatctgagtcaaagcaagttcataaacgtctcagactttaaagcctgttgactaattgttgaagctgggccagccactacaccactgtgagtgtaactacaccagcttggatgtatgttcctgctatgtttctttcatgatactttcctgtttccctttttgaaaccacagacaaaatctggatccctccagattacacattcataaatgccagtgatatcttgaacactcataatgtcagaggaaggaattccgcttggaaagagcacaaaaccttctgatgacattcatgctataatcatggggatagtcaatcagcttaatagtcacagtacttcaaagctcttaagaggaatggtaaaaggaaagggagagaaatacatcataaccagcacttttccagtgcttagaagacactcaaggaatacttattgaactaataaatgcatttatcctacctggaatgtgtagagaaatctttaagatgatagatagatagatgatagatagatagatgatagatagatagatagatagatagatagatagatagatagataatagatagatagatgatagatagatagatagatagatgatagatagatagatagatagatagatagatagatagatagatagatggatagatagactgaactaggaccttggtttaaaagagttcagtctctgtattattcagaactgttttggatataaatgacagaaacacatttcaaatacatccaaccaaatatgaatcatattggcttatataagtaaaaatatcaggagttgactggcttagcatagctgctcaaaaatgttctctctttatttcttggctctttttcttttgggttggctacattttccagaagtttttccccatgtattaggaataaatagccaccagaagcttcagaactacatagactttgccctcagtaggacagagaggcaatctcttcaaacatccaaataattaccttaaaagaggacttcaagtgaagagaccctgcttaaatctgattggccccacacgatcatggtggctaatcacaatggttagaaacatagcacattctaatttaccacctcggttcatgtaaccacatctgcggtgtagaggggcgcactaccctttgattcatagcctcatccaaatcacagtaagagaaagaggcaatttccaaatgaaaaggatgtagaagaaacaaaataatagatgccacctacagcttcttccataaattacttttacatccttggttgcttccctccttgagcctccatagtactgtagtcagttgtttacaaccgccggactgcctcaggatttaaacattctgagtagaaaaacatgttttcctcacagcctggtgtattgaacatcatctgcctctttaatttaaagggataacttctgcaaaaccactttgtaaactgtaaagaattatataaatgtaaatatttaggataatgaatttaattgccttcaaccttctgaaagagttaaaagtcagcccttctgtctcaaaattcagtgattttcaaggggtaatgtagaactgcttccagcaatagcttctgcatctatgcctccttcaacttatatctgtttattgcatgcctttttttccctgatttataaaggaaaggggctgaagatgaaattttaaaactgtgttattatcttgaaacgcaactcctatagtattcattgcaatattatttctctactcctggcacggagcaagattatttggaatgtagccatgtctgtttttcttttcttttgttagtaatgacatctaatctggtagcattggctctttctcctatgcatgttatttcttttaatcttcagaatgaagtagtttgttttcaatattccccaatatctttgtagtgccttacaagtcatcactatcttgaaaccagtctctcacccattgaaagtggtttcctagttttcatgtatttttaattatgctgggagacaaatcataaccctctcaaggaggactatgttttatacatttttttaaatcattcacaacaccctgcaatcaaaaaagtcccccacaatttttttaatttagtctgagaaattaggaggtcattagacaaaacgtgaaaatatttcaagaagactagaaacttacctcattaaaatgaacccaactgcaatagaaggtcattataattaaaatatttccagtcccttctgaacattgaccaaaggtaatgatacctttttttttttttttttttttttttgctcttggtaaagtaaatgtttcctttgttaataactcagtataacaaagacttttagtcctcagttcttttcacataattgtcactagctattgtggagagaaaaaaccctgaacacttgattctggagcaaagaacaagtgaaaaaaggagcagaaggcaccagctaaaagagcaaaaccttacaaagaaatgactgtcaagaaaatatgatatgcagcaatttttattctcacaaaaatgggggtaataggtaatataattaatgaactctggtaagaagaaaaggagctttgaccacaaagatatgctatcttacttaacaatttacaccaaagttttatctgttttgcctcataggatgcaaccattcaacaatgctttgaaatagctattatatgttcatcactttgggattgggaaactgtgtttcagacttaaagtggttttcccaagaaagcaaggctagccacattctgatgtaaacattttgtactgtttccacgatgtcacagaggctaatattttcttccacaaattaactataaacttttaaaacactgaattactatgtgtactttaaatataatctctaatttattacaattttattctttctactttttagttgctctatatacctatgtggatgtgtagcagagtcttttgtgattttttttttaatcaagcttcacggctttccctggctctatttgacaaaagtgttttgttgttgttgttgttcttttaccacaagtgactctgttttgaaactgacaactttcacatttccccttttgatcaagatctaataatgtgttacataaatatatggtgaataaataaataaaatagaaggaatatttgtaggtaaggcaaaatctgtggatctgccttttccttatggatatatatatatatatatatatatatatatatatatatacttttttctgtttcacttatttatgtatttgtttatgtatttattttactttaagttctgggatacatgtgcagaacatgcaggtttgctacataggtatacacgtgccatggtggtttgctgcacctatcaacctgtcatctaggttttaagccccacatgcattaggtatttgtcctaatgctctccctccccttgcccccaaacccctgacaggccccggtgtgtgatgttgccctccctgtgtccacgtgttttcattgttcaactcccaattacgaatgagaacatgcggtgtttggctttctgttcctgtgttagtttgctgagaatgatggtttccagcccatccatgtccctgcaaaggacatgaagtcattcctttttacggctgcatagtattctatgatatacatgtgccaaattttctttatccagcttatcactgatgggcttttgggttggttccaagtgtttgctattgtaaatagtgctgcaataaacacacgtgtgcatgtgtctttgtttcccactctgtaaattactgtacaagtgtaagatttattttttgaatttaaaattctgccattctgaatatttcaaatgaatgttacacaatcatttctccaagcaaatggaaacatttccaggggtagctgcacagcatatacaaaagaagggtggttggtcaatgcgcattttttgtgtgagtgagtatgacagtttagtatagagagaagagactttctggcagaatcatgccacttgcttacttaactggctcaacaaagctatacaattatatccatacatagaatgcatgactacctatttaacagagtagctaaggaaacagaaaatcactgatttttctcaagggaagaatcatccaaagaacaagtgctatcttgtctgtttttatctatatgctactctcagctaatactgatgatgaaagattatcaagaatctccaacatatgaccttagtatataaaaatatagttgtttagaacatgatatctagtagtaataacaaaggaaatgtattaatcttctgcaaaattccagtgctatctctactacctttgaaaaagacttgcaattttgtgcattttggttgttgatttacttctccccactttacttctgcatctttaaaaataaaacagcaagataaaacaaagggaaatcctagcatctttgagggaaatgtggattccatggataatgacattattcatccagactcagtcctcagaacaccacttacataggaagaaaagcaatcagcaaatataaataacctaatcaagtcatagtctaggaagttatgactttaaagaataaaaacctaagcaaatgcttggaataactaaaataaatgaatctaaaactgtttactaatgttataactggacacgttttaagtaggttttttcatttatttacgaattcatacagtaaatattgtagtaggttctccagaaactattatgaacaaaatgtgaaaatgtaaatacatttgaggaagaatttttttttttttagacagaatctgtcacccaggttagaggacagtggcacaatctcagcttactgcaactttcgcctcccgggttccaagattctcttgcctcagcctcccgagtagctgggattacaggcgcccaccaccacacccagcaaatttttgtatttttagtagacatggtgtttcaccatgttgaccaggctagtctcgaattcctgacctcaggtgatccacctgcttcagcatcccaaagtgctgggattacaggcatgagccaccacacctggccagaaatattctaagtaacaactccaaaagtttatgaattaaggtctaaatcagtagtatagatattaataagtgcaaccagagtttctggaattgttttacgttcagtcttaaagccagttccgtatttgaccaaagatttgatttggctgtgtacagtgggggctcatgcctataatcccagcaatttgagaaaccaaggcaggaggattgcttgagctcaggagttcaagtccagcctggacaatgtggggagacctcatctctacaaaacataaaaaaaaaaaaaaaactagccaggtgtggtggtgcatgcctcaactcagcaacttgggaggctgaggtgggaggattgtttgagcccagaaggtcaaagctgaagtgaaccatgattgtgccactgcattccagcctgggtaacagagtgagaccctgtctcaaaaaaaaaaaaaaaaaaaaaaaggcttttatttagcagcaatgttgtatgagacatggcactaagcaatatgagagataaactgctttctacacgtttagtgtttaatagaaaaatgtaaggcattcactcaaataaagctgtgatgcctgtgaaaggagagatgaaaatgatcaagaagtgtgtaagagagaaatttcccacgtagaggaaataaagaaacttcacagagcgaggttgctgtgagaagcaaatggcataatatacattaaagcactctgtaaattataaaattatgttctaatgttagattattttttccaagaatagagccaaacatgtggcactctaaattcgacaccaagaaggacagttgaattagtctcttttagatataagaacagaggtcctctaagaacacggaaaccaaggaaacacacctcttgccccaaacaaggagatgttaggtagtgcaggttcccatggaggaaatgagggaagcagaagcttgtttggagatcaggctgcactgaacacacaggcagcaggctgtgactcttcacgctctgactctaccattttaacctggctcctcctggggcttcagaactaagtgagccttattccttccggacatatcttatctctttgccttttaagtatttcttcatgttcaacttgtctctatccctgttggactcattgcagcttacaactgctttctattcatgtttttacttccacagccaccatgtaatgttgattctctttatggcttttgctgcaaattcctaagggagggaatctgcctgtttggcttatcttttctcatccagtccgtgtcagacatccctgtctaacttaaggatcggctgcccttgagtcgagtgcccagctgttgcccagtcagctttaatcagggtggaagtgttgtgtggttcaaggcctgaccatctagattttatccttcattcacacacctgttgctctatgtgctggatgatacaatgtacacaatttaaataaattaataaatctgggccaggcgtggtggcttatgcctgtaattccagcactttgggatgctgaggcaggtggatcacctgaggtcaggagttcaagaccagcctggccaacatgctgaaaccccgtctctactaaaaatgcaaaaactagccaggcatggtggtgcatacctgtaatcccagctactcgggaggctaaggcaggagaatcacttgaacccaggagacagaggttgcagtgagccaagatcacgccactgcactcaagcctgggcaacagaacaagactctgtctataaataaataaacaaataaaatctgtatctttgtgatgcttccattctagttgtaagaggccataataaaagtgagaaaataaacaagataaattcaactgtgataaatactatggaaataataaaatatctaacgagaatgggagtgaggaaagagatgagatactggtttgggctgggtagttacagaaggaaggggactcagtgaatagagagcagggtgagttgggttctggggtagggggttatgtcacatcaccacaagtaaaatataccaagactgctaagtttattagcatcattccaatcctcctcccaaccagggtcaatattaacataccaagtttaaaatatgtatactaacaattgtgagctgtgacgaatcaacttccaaacatgtagaagcacaaatcaaagaaaataaagataccatctagtgatagtcagaactgacggtaattttgctgtgatttctactccacaggattattgacaggatacaactaatatgaaataaaagatataaaagcatttgtgaaccaaaggactttatatagatacacaggatcataatcattaccagtataaactacagtaaagggaagaacagtgagtcccatgccaggtaggcatccaccaatctcactttttagaaattgtgagtaataaaaaaatgcttgcaatacatacttatgatgtgtgagggagagaaaattaccaagcttgaactttatagggaaaaaatttttatgtccatatatttatgtcatccctgttggtaacactgtgaacactgtttaaaatcaaaatctcttcatttcaccatttatttagcctaagtacattgcaatttctacagctggatctcacagaaatatgatttttaagtcagaagtttgtcccagttttagaggttatattttcagtcctgccacctttcctatatcactctaagcttatacaaaatcagataagggggtggctggtaagatggctgaataggaacagctctggtctgcagcttccagcaagatcaatgcagaaggcgggtgatttctgcatttgcaactgaggtacccggctcatctcattgggactggttagatagtgggtgcagcccacggagggcaagcagaagcagggtggggcgttgcctcacccaggaagcacaagaggctggggaactccctcccctagccaagggaagctgtgagggactgtgccaagaactaggcactcggcccagatactgctcttttcccatggtctttgcaacctgcagaccaggacattcccttgggtgcctataccaccagggaccggggtttcaagcagaaagctgggcagacgtttgggcagacaccgagcaagctgcaggaattttttttcataccccagtggtgcctggaaaaccagcaagacaaaactgttcactctcctggaaagggggctgaagccagggagccaagtggtctagctcagcagatcccacccccatggagcccagcaagctaagatcccctggcttgaaattcttgctgccagcacagcagtctgaagtcgacctgggaggctcaagcttggtagggggaggggcatccaccattaccaaggcttgagtaggcaattttcccctcacagtgtaaacaaagccacccggaagttcaaacagggcagagcccaccacaccttggcaaagccgctgtagccagactgcctgtctagattcatcctccctgggcagggcatctctgaaagaaaggcagcagccccagacaggggcttatacctaaaactcccgtttccctgggacagagcacctgggggaaggggcagctgtgggtgcagcctcagcagacttaaatattcctgactgccagctctgaagagagcggaggatctcccagctcagtgctcgagctctgctaagggacagactgcctcctcaagtgggtccctgaccccggtgcctcctgactgggagacacctcccagcaggttgacacctcccacaaatgaggtgtcaacaggcacctcacactggagagctccagctggcatctggtgggtgcctctctgggacaaagcttccaaaggaaggaacaaggagcaatatttgctcttctgcagcctccgcttgcgtccactccaggcaaacagggtctggagtggaccttcagcagattacagtagacctgcagaagaggggcctgactgttagaaggaaaactaacaaacagaaaggaatagcatcaacatcaacaaaaaggacatccacaccaaaaccccatccgaaggtcaccaatatcaaaaccaaaggtagataaatccataaagatgaggaaaaaccagctcaacaattctgaaaattccaaaaaccagaacgtctcttctcctccaaaggatcacaactcctcaccagcaagggaacaaaagtggacagagaatgagtttgatgaattgacagaagtaggcttcagaaggtgggtaataacaaactcctccgagctaaaggagcacgttctaacccaatacaaggaagctaagaaccttgaaaaaaggttagaggaattgctaactagaataaccagtttagagaagaacacaaacacaagtttagagaagatggagctgaaaaacagcacaagaacttcatgaagcatacacaaatatcaatagccgaatcgattaagcagaagaaaggatatcagagattgaagatcaacttgatgaaataaagtatgaagacaagactagagaaaaaagaatgaaaaggaaagaacaaagcctccaagaaatatgggattatgtgaaaagaccaatcctacatttgattggtgtacctgaaagtgacagggagaatggaaccaagttggaaaacattcttcaggatattatccaggagaacttccccaacctagcaaggcaggccaacattcaaactcaggaaatacagagaacaccacaaagatactccttgagaagagcaaccccaagacacgtaattgtcagattcaccaaggttaaaatgaaggagaaaatgttaagggcagccagagagaaaggttgggttaccgacaaagagaagcccatcaaactaacagcagatctctctgcagaaaccctgcaagccagaatagagtgggggccaatattcaacactcttacagaaaagaattttcaacccagaatttcatatcctgccaaactaagcttcataagcaaaggagaaatcaattagtttacagacaagcaaatgctgaaagattttgtcaccatcaggcctgccttacaagaattcccgaaggatgcactaaatatggagaggaaaaactagtaccagccactgcaaaaacataccaaattgtaaagaccattgacactataaagaaactgcatcaactgacagtcaaaataaccagctagcatcataatgacaggatcaaattcacacataacaatgttaacctcaaatgtaaacaggctaaatgccccagttaaaagacacagactggcaaattggataaaaaatcaagacccatcagtctgctgtattcaggagaccaatcaatgtgcaaagacacacaaaggctcaaaataaagagatggaggaatatttactaaccaaatggaaagcaaaaagaagcagagtttgcaatcctagtctctgataaaacagactttaaactaacaaagatcaaaaaagacaagagcattacataaaggtaaagagatcaatgtaatgagaagagctaactatcctaaatatatatgcacccaatacaggagcaaacagattcataaagcaagttcttagagacctacaaagagactaagacttccacacaataataatgggagactttaacaccccaccgtcaatattagacagatcaatgagatgggaaattaacaaggatattcaggacttgacctcagctatggaccaagcagacctaatagacatcaacagaactctccaccccaaatcaacagaatatacattcttctaagaaccgcaacatgcttattctaaaattgaccacataattggaagtaaaacactcctcagcaaatgcaaaagaacagaaatcataacagtctctcagactacaatgcaatcaaattagaactcaggattaagaaactcactcaaaaccacacaactacatggaaactgaacaacctgctcctaaatgactattaggtaaaaatgaaattatggcaaaaataagtaagttctttgaaactaatgagaacaaagacacaacatacaagaatctctgggacacagctaaagcagtgtttagagggaaatttatagcactaaatgcccacaggagaaagcaggaaagatctaaaatcaagaccctaaaatgacaattaaaagaactagagaagcaagagcaaacaaattcaaaagctagcagaagacaagaaataactaagatcagagcagaactgaaggagatagagacatgaaaaacccttcaaaaaatcaaagaatccatgagctggtttatttgaaaagattaacaaaatagatagaccactctccaggctaataaagaagaaatgagagaagaatcaaatagacacaataaaaaatgataaaggggatatcacctcttataccatagaaatacaaactaccatcagagaacactataaacacctctatgcaaataaactagaaaatctagaacaaatagataaactcctggacacatataccctcccaaggctaaaccaggaagaagtcaaatctctgaatataccaataacaagttctgaaattgaggcagtaattaatcgcctaccaaccaaaaaagcccaggaccagatgaattcacagccgaattctatcagaggtaaaagagaatttggtaccattcgttctgaaactattccaaacaatagaaaaagagggactcctccctaactcattttatgagaccagcatcatcctgatacaaaaacctggcagacacaaaacaaaaaaagaaaatttcaggccaatatcaggcctgatgaacattgatgtgaaaatcctcagtaaaatactggcaaaccgaatccatcagcacatcaaaaagcttatccaccacaatccagttggcttcatccctgggatgcaaggttggttcaacatatgcaaatcaataaacttaatccaacacataaccagaaccaatgacagaaaccacatgattatctcaatagatgcagaaaaggccttcaataaaattcaacagcccttcatgctaaaaactcaataaactaggtattgatacaatgtatcaaaataataagagctatttatgacaaacccacagccaatatcatactgaatgggcaaaagctggaagcattccctttgaaaaccagcacaagacaaggatgccctctctccactcctattcaacatagtattggaagttctggccagggcaatcaggcaagagaaagaaataaaaggtattcaaataggaagagaggaagtcaaattgtctctgtttgaaggtgacatgattgtgtatttagaaaacgccatcatctcagcccaaaatctgcttaagctgataagcaacttcagcaaagtctcaggagacaaaatcagtatgcaaaaatcacaagcatttctatacgccaataatagacaaacagggagccaaatcatgagtgaactcccattcacaattgctacaaagagaataaaatacctaggaatccaaattacaagggatgtgaaggacctcttcaaggacaactacaaagcactgctcaaggaaataagagaggacacaaacaaatagaaaaacattccatgctcatggataggaagaatcaatatagttaaaatggccataatgcccaaaataatttatagattcaatgctatccccatcaaactaccactgactttcttcacagaattagaaaaaactaccttaaagttcatatggaatcaaaaaagagcccgtatagccaagacaacccttagcaaaagaacaaagctggaggcatcacactatctgacttcaaactatactacaaggctacagtaaacaaaacagcatggtactggtaccaaaacagagagatagaccaatggaacaaaacagaggcctcagaaataacatcacacatctacaaccatctggtctttgacagacgtgacaaaaacaagctatggggaaaagattccctatttaataaatgatgttgggaaaactggctagccatatgcagaaaactgaaactggatcccttccttacacgttatacaaaaattaactcaagatggattaaagtcttaaacataagacctaaaaccataaaaaccctagaagaaaacctaggcaataccattcaggacataggcttaggcaaagtcttcgtgactaaaacaccaaaagcaatggcaacaaaagccaaaatagacaaatgggatctaattaaactaaagagcttctgcacagcaaaagaaactatcatcagagtggtcaggcaacctacagaatgggagaaaatttttacaatctatacatctgacaaagccctaatatctagaatctacaaggagcttaaacaaatttgcaagaaaaaagaacaacgccatcaaaaaagtgggcaaagaatataaacagacacttctcaaaataagacacttatgcagccaacaaacatatgaaaaaaagctcatcatcagtgatcattagagaaatgcaaatcaaaaccacaatgagataccatctcatgccagttagaatggcaatcattaaaaaggcaggaaacaacagatgctggagaggatgtggagaaataggaatacactgttggtaggagtgtatattagttcaaccattgtggaagacagtgtggcagttagtcaaggatctagaaccagaaataccatttgacccagcaaccccattactgggtatatatccaaaggattataaatcattccaatattaagacacatgcacatgtatgtttattgcagcactgtccacaatagcaaagacttgctagcaacccaaatgcccatcaatgatagactggataaagaaaatgtggcacatatacaccattgaatactatgcaaccataaaaaaaggatgagttcatgtcctttgctgggacatggatgaagctggaaactatcactctcagcaaactaacacaggaacagaaaaccaaacaccgcatgttctcactcatatgtgggagctgaataatgagaacacgttgacacagggagagaacatcacacaccagggcctgtggcggggtgggagttaggggagggatagccttaggagaaatacctaatgtaggtgacaggttgatgggtacagcaaaccaccatggcacacatatacctatgtaacaaacatgcacattctgcaaatgtatcccagaacttagagtatagaaaaatagaaaaaaatcagataaggagcataacaaatattttaatttatttccttaagacatgtcatgtaattacaagataatgggttgtctagttttacaaatacagggcaagtcattcaaaaggtcacttttttgattgacctcttctcacatctatcactaattttttttaaaagttaatttacattgagctttccctccagaataattatttttctgtatctattgtctatatctttcttaggccttctagaaataggaagactttgcatatgattttgtttatatgcccatttatatgaaaaaataataatgtcactgtgaatctgcacaatgcagagaaaaggccttggattaaatactatttttaccactgaactattgcatgaccacgagcaaattatttaacttttctgagaatcaacttctcaatggtaaaactgaagaaggaaagacaatattatatgtaaaacttctggcataaaataagaatccaatgatattggttctctttaaaaatggaataattttctatatgttcatttggttataagaggaaacagaaataatgtgctttgagttcaatataatctatgtcttaggacttcaagtgaacagtcttaaagtatacattatttacttgatggatgaaatggctacctagatttgttaatacgtattaagatgcatgtttcagaaataaaaaagttactataaaaattgctaatatacttataggatatttggctgtttaaagtatgatctatttgttatttgcattccacaaagtaagatgagcaattacatcagattatactaatcattggttaaatcttattttcttatttaaatcaaaattaagttatacaaatataaaaagggaacctaataatggcaagtttccgtctctttttggctgggattcatcaaaaacctttaattcagtagttggaggtgatattctgtaattgtaaatagttaagaactttgagctatttatttcaaatttgactgagttacaaaatataaaaacaataactgtttctcattgactggatcttttacaatgatgtcctcaagaagatagaatttaaaagcagaataaaaatttccttttcacagctaaaatctactagctgtgtaatcctggcaagttacttaacttttctgaggctccgaaatttttatttctaaaagtgggaataataccttacgctcttcacagagatgttttgaagaagaaaggagataatgcacataaatgtactcagaaatgctaaggtcagaaaagaaggaaacggccagagttaatggttcctttctttgacttccaatagcaagctgttcactgcactccatagtgttataattacctgttctcatggcctgaaagtgatgcagtagcaggtggaagaattaaccggaggtctgtgaaactccacactaagctatcttccctggttaggaaaacttaggttgaaatcatttatttaaccagaaatggtgttatttttgtcatgttttgtaatgtctaacttctccaagggcactggcaaaggagatgtacagaagacaaaaggcagctagccaaggggttgtcctagctggcagggctaacacgtctgctttaaaaagatgatgaaacggatagctcatgcatctgggtatggcttttatatcccagccaacacacaagtttagtgcctccaaagcagcttgctgctcaccttacaaaaccctgaacgagaatgagaaactggtccaaggttggtgtattagaggattcttacatgtacagactaagataaattagtgaggcttagtgggagacagtgctgggtactttgccacaggcaatagttgttctgacttcataggagagatcctgcccagtctcccgcaggtgctgtctccctccctccctccctccctctccaaaagaaaaagtttgtatgaaatagtacttacctcacagagctgttgtgaaaagtaatgactgaataggtaaaagcacctagaacagtgcctggcacatgctaagtgctttgttcattattgttgttattatgttattttctctcagactgagagcactgttagtgacccaagtaaatttatagtttttaagttcagaggaaaaataaagcctattttttgttaacagtcttaataaataataaaatggaataaagaaaccaaaaaaaaaagaaaaagtttgtatgaaaattcatccctatttctttattttggactaagtagtcaaatttctactatattaatattatgtaagcgacacccatttaaattcactctcttgatagaaaggtgagttgattatcacacctgctattttttcactgccaaaagattgcaataacctccctccatcaccctcaaaaaacaaacagaaaccatctgaggcatagccattgtttacatattgtgtttgtgtgcacctatctacaatgttctttcttgtaaggagtttatctgccaatatttttggcttcagcagcagcgctcttcttgacagactaagagaaggatctacagaaaagtcatctgattaaggttttgggtcaaattaaaactctctggacagaatcctctttccttcacttggatttctgcaaacagaaagcagattattctcctggcaaatagcgactctagaaacgcttatgtttttcagactttggcagaacttgttaagaacagcatcatcataatacatttgtacaaactcgaatttcagtggctcttttgtcccacatgatgcatgatgaaatttataaaggtctgttttacccccacagggtcatttcttttgtgttcctacagagccaataggcttcatttaagtccaagttattatattaaccatccctttcactagactagagaacttctttttcatggtccatatcgtggccacaatgcatcaaaggtaggatcattgttttccacttacttttgctactagacccccaaattctaataaaagaaatttttagggttgggaaggggagagagacagggctggaaacagattccatgatcagcaatcttatctgggtatttgaatataccaagcctgggatacttcctgtaacactgtgttcagggttcagtctgacttgcttttcttccagatgtacggtgggctgacttgggcttgatccagagacttaggcatctgataaaagctgcctgagtagttttgcatttttattaacaaagcaatataatgctagttttctagggcacagtagtctcacttacaacatgtataaactgttttattagagattatagcactattgggagagaaaataaaagtgatcatttatatgataatgtgagctgataatttaggagtgattcattctcattaatgttcgcacactgccatgtaagtttattagttagtgtgtgtggtacaacagaaggtaaggcctttgataaaacaatctttaattgagtattttttctgtatggtaaagtggtatagaaaacttagtaagattgtaaggtgcagaaacagccactgctcccctcttgctgtttctctaccctgtctcttgctctttgcctcgtttacataggctggggcaactgggataagcccatggatgtgtcaagaggggattttgtggagggaattcaagtttaggatggaggatttgactagatgaattctaagattccttccatctttgactttcccttgacctaagcaggaggtggaaataatttccagctgcaaacaccagcagagagccaaattaaaaagaagttttgtgatatgccactggacaggaaaaaaaaagaaacaagtaattgtggtaacaaatcaagcacgtcaggaagtctaaagatgagctcttttagtcagcattatattttagcataaaataaatcttgtgcctttaaaatttactttttgaaaacagcctgtcataattttttttcagaagaatagaaggaggtggggagaaagcaattttcttttcttttttttttctttctttttttttttttttttttttttttgagacagcgtctcgctctgtcaccaggctggagtgcagtggcatgatctcggctcactgcaacctccgcctcccgggttcaagtgattctcctgcctcagcctcctgagtagttgggattacaggcatgtgccaccacgcctggctaatttttgtatttttagtagagacagggtttcaccgtgttggtcaggctcgtctcgaactcctgacctcgggtgatctgcccgcctgggcctcccaaagtgctgggattacaggcgtgaaccactatgcccggcccaaaatgccaatcttttctcttgtggtttctcggtttgatgtcaagattataaaactattctcttatactttttgtagtacaatattgttttttatgtttagattttttaatccacctggactaaaatgtggattaaaaccaccttttggataccaaaaaggaatatacttttatttttctccaaatatatgtaataaaatagtctcttcttcctttactgattcaaaatggcacatttatggtgtgaacatagtaattggtgaagaggacatggtttgaactctattctgctctctgggtggtctatttatctattcctcttttgttattaaatggctcctaacttcttcagcttttatactacattttccaatctactaggaaaaatctttttaagatatcttcatttattcatttttactagataatccctaataaattttccagcagaaatggattatcccaggctgacctaaggcctgggaagtgttgggaaacagagggtggaagaaggacccctagagtccaaggacctttgtcccccaataaacagaactcaggagattatcttttccagtaattttttcttttttttgagacagggtttccctcttgttgcccaggctggagtgcaatggtgccatcttggctcactgcaacctccgcctcccgggttcaagtgattctcctgcctcagcctccagggtagttggcattacaggcatgtgccgccacacccggctaattttttgggtggtttttttttttttttgtatttttagtagagatggggtttcaccatgttggtcaggctggtctcaaactcatgatctcaggtgatccgcccacctcggcctcccaaagtgctgggattacaggcgtgagccagtaatcttttttttttttttatacgttaagttttagggcacatgtgcacaacgtgcaggtttgttacatatgtatacatgtaccatgttggtgtgctgcacccattaactcatcatttaacattaggtatatctcctaatgctatccctccccccctccccccaccccacaacaggccccggtgtgtgatgttccccttcctgtgtccatgtgttctcactgttcaattcccacctatgagtgagaacatgcggtgtttggttttctgtccttgcgacagtctgctaagaatgatggtttccggcttcatccatgtccctacaaaggacatgaactcatcattttttatggctgcatagtaatctttttatcagaggctctttctgacctactaagagatggcaggtaacagagcacctgtacaacatcaggcaccttgtcaaggacttcattaaccagatggaccctgcctttaagaagctcatagtctatcagagagaggtcccatgcaaaaaaaaggcctcattccaatcagaggttaaaagctctgtcaccattacctgaggtggaagcaaaagagtcctattagtgtataattcattcaactagtgggagattaacaattttcagggaactttaagcagggagatggtagaaagtaattaaaactctgccttaagagagtgttagcaagcctcaaatgaaatcttcttcatttacttctcacctgtgtcgtgtctatatattcctctacagaagcaagtttctcattgtagaaaggtgatctctgttgatataatgctacttatcaaatgtttctcatgtaccagacacacacatacatgcatatatgtgtgtgggtatatatataatttttaatttaatttttatctatattcataatatcatatgtatatatgagtggatatcacatattgtatataaacatgtatacatatacgtgtattcctgacagccactctgggaggtagctattacgacttccgtttgaagacactgaacccagctacccagcatcattacaccacttacaaaaccttgggcaattaccacagtactctaagcctcaggctcctcatgaagaaaataagaggggccattcaaaggactattgtaagtaatttatgagataatggatatgaaacaaggagcaaggacctgtcgcagagaaagtgctcaacagctaatgactgttcaggtcacacagctattaagtggtttaacagagcctatgtgaatgaactgatacccttcaggcttaactcaaacactaaatacttagtagggttgcttttttaaaccatcttctatggccttaaaaaagactcttcactaaatagaagggcaggtttatctaaatagaaaattacctaaaacatacaatccttatcaaataaatgtaatgggtttttaccccagcgttctaacagctcagcttcccccttccaagccctccaattagaaaacacaaggcttgcagagcccaaatttctggcagaaacactaggtgcattgtaaaatcactgaattttgttagcacgtttggttctgcctgagctcacgtgcaaataccacagcctgtgctaattcaatgagatctgtctccacaccccacttcctaattcccaattatggtgtctcagaaataaccagcagatcacagggactcacaccatggttttggttttttccttggggggagggggaggttgtgttttttttgttgttgtttgtttgtttttgagataaggtcttgatctttcacccaagctataatgcagtagtgcaatcatagcccactgtaccctcgaactcctgggctgaagcaatcctccagcctcagcctcccaagtagctaggactacaagtgtgtgccaccacacctgacaaattttaaaatatttttgtagaaaccaggcccttgctgtgttgcctacgctggtctcaaactccttgacaatagatttatttcagcctgatcccatccagggttccctcacatttgaaaagagattgtgtgaggccatttggaagggtagtgacctgtcctagacaaagttttaaaactttggacgcagagtaattaaccattcaataaatacttgtgggttaattcactgaagtggcaagaccaggtaaaagtgagatctcaaaactctcttttgcaatcccctaaagaaagtcgtaacattttaaattgttcaccctgagctgggaattttcttttaacatcctactgtgtaagacgaaatcaagtcagatctatatccataacaatacacttaaaattactggcccagaagtatgacagtgagaggtaaggtttggtatgagactaaaatgttattccattgagatttgggaaggtttaaccagaaaaattgcatctaaccatttttattcatcttcttcctcttatcctccttccttctctctcttatttagtgctggaaggtcatagtgacaaatattcattgagaaaaaaggagggagaacgggtttttgcaaaaagattgggtagaacaattttatctgtacattttttatccatttttctccccttcatatacacactattcctctcaaaaattgaacctcatcttagttgacattggatttagaggaaaaaaaagagagcctttcaacattttcaaatttcaaaaatttttactttttgttttgtatttatgactttagtttctgtcataatgtaacatataacataattgcattaacttttttaaaaaattaagggaaaaaatcactcattgtcctaccacttggaaataataatagctgacatttattgggcactttgtatattccagatacttctccaagagctgtatgcattatcttgtttaatcctcatcaatgctacaaagtaggcactactagtatctcttatctgtggttgaaattaatgcacagaacagttaagtaacttgccttgagccatacagcttgtagttggagaaaacactattcaaactaagagtacatcatgactggtcatgactgagtgtatcatgccagtgcccaggccctccacaactctacttttatataatactttaatcactttttaaggtagagttaggatcccactgcaattacgattttggtgcaggactggtaaattctttttcccccaaacatttcctcctatttgaatgaaagagaaagcaagtctactaatttcatttcaatgttttttattatgttgcatgatccatgatccactaaaaaacaaagcccagattagtgactgaaagcaagttacttcagaatttggcccaggaaacttgtaaaacaaaatggtgtaatctgcaacggagaggaagctaatatttcataagccacattttggtaggtctttatttaaagtaattctcaccctctcatagttagtccatagatctgaggactccaatggaaaaaaaacctcaaacatccctgtacataatcaatactcaatggttaagattaataaatactcattagaggaatcagcatatacgtgagtctgccaaaagaaagagctgactgtttcacattccttgtctttctttgcacagatcactaggttttcatcgcttttcccttcttcggggctcattctgtctttttctagaaccaagtgctctacacagtaagattcaaaacatgcataaacgaggaactcatggtttccattttcttaaaaacttctctcctgcttgtccccaagccttctcaggaggagggagcactccccgtctctcattgctttaaatcaatcttccccaaagaaacccacattgaagaagggggtactcagccagactgtcacatgactataaagaggctatagatgccattgggacctccattgctgatggtgtgtttttataatctggcatctgtatcaaggagtgagaggcagcttggccttcagagaataagcgctggtccctaggctcctaagtttaacttgaagactccagcccttcttgctatagtcaaatcccttaacgtctttggtcatagtgctttcctgtgaacccctgggattctgatgtagaatatcaggtcggtcagtccacaggttgaaaagatcaggcccagcttttccctactcccctggcttcattgagagcagctctgcctttatttttttttagggttctatataaaactttgtttgaaaacagtattctgccaccaatgttttttctttttggtgaaaattactgaataagatgattcctagtgtcggttttagcccaatgtgaatttttataataacccagttcaagtttgtatctttctatgggagggcaaaagagtactttcccttcatgtctgtagcatatattgctttccataggattttcttctttgctattactggcaatatttatggatggtctgatctgattatcttaatcacactagcagttgtaaatcatgttcaggctacataatgtgtgatctctcacccttagccctcaaacaaagcattcctgaaaggcatagtttgactgcgttatttcagactatgggaatgtaagagtgcaggtggaacgcgaaggtaatacagatgagcttctgcctcccacaagagagcaaccacatctgttttcctaagccagaggtccattgaggacaaagacatcatttaatacttatggttatctcacactctcttaaggaatgatgcgtatgtgtaatgcataaaaatcaggagggcttgatacacaaatggctgaaaagggataattgtatttgcaattattatgctatgttggacagccacaaaggctctatgacagcctatgtgtgctatgtgtgttttccataaaaagagatgttgatagagaagtagtatctgttaacctgtaatctgggttatactattgtctttttaaagttctggtaggtctatacgttttggtaaactcctggtttgcgcctgcttattttgttttacgagagtcattcttaaagtatggcacatagaccatctacgttagcatcactgcagtgaggtatttttttaaagtgaaggtttctatggaatcagaatttctgtgagaagggcccagtttgttagcatactctctggagcttctaatgcacactgaagtcgttttcttttttcgtgtgactcttttgctttaacgtggtcccagaaaacaccatttaatattccaaatgttttggccactaaaggtataaagtttgacaagttcttttacccctcaatttctttttttaaaaaataaagtacgagcagagggaagggggctctggtgttggggagtggggtgttgtagataatctctatgggtcctgccaactaacatgccattctcgagttttaagttaacttaagcttggaggccagagcagtttattacctaggtacttttagagctattatcaattatatggcacatattcaacctggattaacagaaacttttaaaatatttatgtatatatttatgacgtgtaaaatggaaaatgataccagaaatgaagtaccagaaatgaaataagtgtctaataaaataagcaaaccagtaagaagtcatatatcacctgactcagttccttctacagggactaatcaaatgaaatgcatcttgaaatccacaattaaacatgccaaagagtctagccagagaatactgcatcaaaagacatgatttgacttttatgagtccactttttcattggataagttaaattttgtaaactgatttcaaagtggttttggagtccttgagctgaattctccccactacaatctactctgaaaactaactggtgacaaagttttattctattgattttgaccgatgcttattttgttgaccaatagttatttaatgtccataatatggcatgttccacttcctggaatgacctaatcacctcccgtctctatctactaccaattccccggccttagattgggcttttgtgtctctttcccgtgttgcaatgtccttccaacaggtcatccttctcctttcaatacatctccaccttagattcttaaaatgcaagtctgattatgtcagccttctacttgaaactctttattggctactctttacctattgtataaagtccaacctcttggccacggcataccagatcattcattacctgactaagcttttatctctaatcatgtctgcatgaccccagagggactgaaattccaagcaggcaagttctttgagagccatcactttgaaaatgctattttgttcttctggtatgccctcttccctccctccctccttacctacccaagtgtgcctggcatatttgaggaatatcaggaagacagcactgaggcaagagtaaagtgagtgaagggaagactattaggagattaggtggtagacagaaaatgaggcagatcatgtaggaccttatgctttgagtaatatggaatgtcactggaaggattctagcaaataattggtatgatctgttttgtattttaaaggctcactctggcttccatggtgagaatgtctgtgagagtgagaagcgtgagaagagcaaaagcagagagaccaattacgaagaaattacattaacctgagcaagaaattagtgtggaagcagtgaagatggtgggaagttgccagattctggatgtgttttgaaactagaagcaataggatttgctggtgaattgatgtaggtgtgacagaatgaagaaatcaaagatgacccccatgtttggggtcaaaggaattggaaaattggagtagccatttactgagatagaatagaaagagcatgtttgcagagaataggagcaaattagaagttcaatcctggaaatgttgaattgagatgcttattagacactcaagtcaggatgccttgtagacaactggatgttttagtctggaattcaagggggaggctgcaactacataaattaactcagaagttgtcaacacataagcattatttataagtgagtatagataaaaaagaggaatgttaacacataaaaagcactaaaaatgtgaaatgaataaatgaatgaataatactgagatcccaacttacacaacaatactaaagtttcatatgagtatcattagagagatttcattcttcaccatattctcttatgaaaaatctgtttgcaattcttctttccaatgacacactactaatgaaattatttatgaggctaatatagacatgggcatacaattatctgtttgaatattgaattactaacgtcttattattccgtgccttagtggcatatacagtatttgcaaaaaaaaaaaaaaaatcaatacatcaatacgatgaggctgtcaactgttagatggctatcactgctaaaagaggtatttcagcatattaaaaatttgtcacatcctcacatgatggctaacagtttccagtgtgctttatcatccattatctctgtttgactttgaacctcatgacatccaaatactaggcaggtcagtgttattatccgtgatttaaattttgagaaactaaggctcaggaggtgaagtgatttacttgagctgatgaatgggtcatcatggtttgaatcctggtagtccaagtgactgctcctcttcaacttgccacctttctgaaaagcccgaggtcctgctcatccttagctgctgatatggtttggctgtgtctccacccaaatcttatcttgaattgcagttcccataatccccatgtgttgtgggagggaccaggtggtgataattgaatcatggggggcagttcccccatcttgttctcatggtagtgagttagtgctaacgagatctggttgtttttataaggggcttccccattagctgggcattcattctccttcctgctgccatgtgaaaaaggatgtgtttgcttttcccttccaccataattgtaagtttcctgaggcctccccagccatgctgagctgtgagtcaattaaacctctttcctttataaattacccagtctcgggtatgtctttattagcagcatgagaacggactaatagaggtgccaaaccaatgaatggcgcaggatgacaagtagtataggtcttttttacatttcagattgaagactaaggaaataaatggtctttactgggcaccattcagtaggtcagatgctctgtgtgtggatctgggtttaatcactagacaccctcaggcaggggatcttgagctttccgaagaggcactgaaggggaggagaatgatgaccccaagaatgtgtctggactcagcttgagaggcaccttccactcaaccccatcacccacttagctcttgccacctttgatttgagatgtgttcccatagatgccaacacattaacattttatcttgctcttcaatcttaatcccttagacgccttccttttgttaactaagtttctgagtcctactcacacattcccatgcatccagttgcagatgatctattttcaatttcaataacctatcctcaataatgatagttcagaataagaacatatatcattgattttatacttttatatacacttggcctttgctcatgttatctaagctggacaacaatcatattagaaaggcattatttttctattttaaaaatgagagaactcagaaaaactaaaacattctttcctatgatcacaaagctactaataattggaagagttgggatatgaactcaatgaacatataaatccaaagtctaagctttccctaattacactaccacctcccctcatcatgaccctttgctactttccataagacaatatcaaacatgagccaaactgtagtctacttcatcctctggatgagattaatttgcttcttctttctgccttaaaagagtcaacaagtttttccatggtcctctcccatcttctagccccacattcccaccaacccccgcccccaacccaggaattgccaaaccctgatacaattagtgaagttcaggaatgaatgagatatctttacaacagcctgattgaaagaaacttctatgtttctaaaaggcaagagattcaattttgtaccagacactaaatctgtctctcaaacaggacccataaatctccaccaaaactaaaagatatactttattggagaacctctttcagttaatacatccaatccattgtctgcttcatatttaaggtttctatgtggcatatggctggagaagagagaacagggtgggtggagtttccatcctgaggttcagccttcacaggtgtgcctgctgctcttctccacgcagatgccatgcatgctgaggagactcataaaagaacagggttagtaatgcacagtctcgagctacctgacttaaacaggcatcatggggagaaatttaattcacaccctgacattcttatgcctcttttctataatgggtttttatcacataaaggagctcctcagccagttgaaaatcattgccttgttaatgaattatgattgtggggcactctggaatgctatgttgattgtgatgttaataggtacaaagatacacaatgtacagctcaataaccattacattaatgtctagtttaaagtttatttcggatatcatcattatgaaggagaaagtgacccataggacacagccactgggaaaagtaaagctcacttataagtgtgcaggcatgtaaaagccacttgcttctccctagcttcattcctcatgaaatgtgcacaacactgagtttgcacagctaggcccattgaataatcaaagagaaggtttcacttgggataaaattggcatgcaaagcatgaatgggaacaaagtcacactgtcatttcaatttactgacgcagtgatacaacaaacacatcattcaccatgaactgcattaagactcctgaagcagaaatactggaggtgctcaagtatcacaatgtcagtaatttcacacaaatatactcaaatgatgtgctcctcaccattcattttccaaactaccgtgggttgtgtttggcaagcttataggcaagatatttagatggttattttcatcttttcctctctgaccgagttatgatagtaaaaagccctgttgataatctccttggctacaacttcttcttttgtgttggctcttaaatatctcaaaagttaaaaaattggggtgggaggaagaaatggctggaaaagtgaaacatggagccttaataagaactcagatttttaaactgttagaaaacagtttgatgataaagaattcaggaaaatgcaggacaaaaaaacaaaacaaaaaaaaaaacaagaaatacagacttcaagtttctaattagagtttaaaaccagcctcaaaacttgcgacataagctcagtcaggtacctgaccattttgctataacccctccatcttaacctctaaactctctaaactggggagtagttccgtatataaaagtgtttggtgggatgagcttgggatttgtagagaactccaggtttgaatccagtcaagagatagcgacatagcgccacttttctgcgatgcaaattatagacaataaaggtctgtaaagcactagagaatacgaattgttatatagagatagagtgaccagatttcttagcaagctaataggtattctgcttatttatttatttgttcactcattcactcattcatttatgtactcattctggtaaggaaacttttcccagtaattcacatcaataatgaaccaaacagagagatatttgttttttagaaagaaagctatgattacagtagagtttattcattggttagaagaaagggggaaggagggacaaaggaaagaaggaaccagcatggaactggtgatgtttgagctgtgttgtcaagatggactctcaggggttataacaaaaaaggccagatgcagggggagcaacctgagcaagcaggaaagggttagagtgctcacgtgaccagggacctcatttggtccatgtgtggggccatgttgaagttaagcatgactggggaaagatcaaatcttgaagctcttatgtgtcatattaagaggtgtatgcactctcctctaagtcagtcgttcttcattcttgctgcacactacacttcgggagtttttgaaatatactcagaacccaacccaaaatatttgatttatttggtttggggatagactcgaggttggaattttcagtgctactcacagatagctagggatcaccaccatgctacagagatggagttatgcagaggatgtttaagcaaagatatgtcaaggtcagtttcgtgttttacaaagacaagtccagcagatgtgtggagagtggatcgagaaaggtgaaaaccaagtagaagattaacatagtgtattatagcagtgattttcaaactgtggttcaccaaagctctaaggttttatggagtttctgcaaaggttgtaaaacacttgctttcaatttgctttttaaaatatttgcttaattactattaaaaagaataattgacaaaaattcaatgtgatatagatcaaattttaatacatcagggatggctgaatttatgtttccaatttaattcaataaagatgctcctgaaatcttaactgatgaatagcttggaattatatggcaagctactaaaaaagcaggaaaaagaaaaagtcatcaggctacagaattttttaaaagtatgtgctatcaaaacaatacacattaaatgttgatgacaaatcgcaacacacaattccagatttcaggtgttttgtgttctgcacactcatccttacacatgacttttttttaccttgtgcatttactttctttaaaaaagtggtaatatacacataaaatgttatttttatgtgtattcattattcattttatgcatacagttcaatagtattaagcacattcacattgtcgtgcaactaatttccaaaaccttttcctcttacaaaactgaaacttcatacccatgaaacacacaactcgtttccctctcctctgccagcccctgggaaccaccattctacttttctctttctatgaatttgactaatctagatacctcatacaagacatattctgcagtatttctcttttggtgactagcctttttattgagatggagtctcactctttcacccagcccaggctggagtcaagtggcatgatcttggctcactacaatctccacttcctgggtttaaacgattctcctgcctcagcctcccaagtagctgggattacaggtgtgtgccaccatgcccagctaatttttgtatttttagtagagaaggggtttcatcatgttggccaggttggtcttgaactcctgacctcaagtgatccacccacctcggcctcccaaagtgctaggattacaggtatgagccactgggcccagttgtgactagcttattttatttagcataatgtcctcaagatttattcatgttgtatcaaatgtcagaattttcttcctttttaaggctgaatattccattgtgtatatatatgccacattttgtttattcatttgtccatcaacaagcatttgggttgctttcatgtcttggctattttgaataatgctgctacgaacatgcgtgtgcaaatatctctttaagacccttcaattaccttgaatagataaccagaagtagaattgctggatcatacaataactctgtttttaattttttaaggaatacattgacttttaataagtaaaagctatacattggaaaataaatgtatccacataaaaagcagctttatctattttataaaacagaattctacataagcacttgattcataaagggtagggagggatctgctgctttggagagacaggaaagggaggatggggacttcaggacagagatggtaggaatgaagggcaagggcagacatctctcagagaggttaatgaggtgattttgttggttccaagtctttgctagtgtgaatagtgctgcaataaacatgcgtgcatgtgtctttatagtagaatgatttataaccctttgggtatatacccagtaatgagattgctgggtcaaatggtatttctagttctagatccttgaggaatcaccacactgccttccacaatggttgaactaatttacactccaacagtgtaaaagcattcctatttctccatatcctgtccagcatcaatgatagactagataaagaaaatgtggaacatatacaccacggaatactatgcagccatataaaaggatgagttcatgtcctttgcagggacatggatgaagctagaaaccatcattttcagcaaactaacacagaaacagaaaaccagacaccgcatgttctcactcaaatgtgggagttgaacaatgagaacatatgggcacagtgagggaaacattacatatgggggcctgtcagggggttgggggggaaggggagggatagcattaggacaaatacctaatgcagatgacaggttgatgggtgcagcaaaccaccatggcacatgtatacctatgcaataaacctgcacgctctgcacatgtaccccagaacttaagtataataaaaataaataaataaataaaaattttaaaaatgaaggtgattttgttaaggtctttagaacctccccacaactaccactggtctttttaatgaatgtggccccgtgaggggtttttcagttgtacgaaaataacacaaacctctttggatagcataatcttgaggtcagtgaatatccctgtccacagctgactcagaaagaacacttctacaagaagtatagaaaaattaaacattgcattactttcctggcctttcctcaggaggggccctccttttgagtcacagggtaaaggaagtgtacagaaaagttcctcattctattttacctagaggccttggtggcttctcggatattcttaaagttacaccaccgccaataaattctgcattgtgctttgaaaaagcagattacctaagatttccatgttagtacacagggtttctatcagaaagagttgaaaactaacagtggcactctcaggcaattagctggggccacaaaggaacaaaggcaacagaagaaaagccattatgcaaatacctggccaggaattgtctgaccattttgaggagccttggcaaagaattggaagagagcaggtaaattaaagggttttctgccagactgaattattagatctctctataattaataacaggcttctgcatgatttttcctcaacaggtttattgactgccttgacatgatagaggagagaggtataagaaggatagatccaggataataccctaatatcaccactcagatgacttagctggtatggcagagacctggaatataggggaaagtatgactttggagaattagaagagattgccaatctagggtaactatctcgccaatctagggtaactaactatctcctatgcctatagagcagcatgaacccagagggatatagggcagaaaccagaatcattcatccccctccccacaaaaaaatatatatatcgattttttttggtgatttacctactatatgcctgaataattctgatttagttaatagcttcagtgaaataaagctttaggaaatagaataaacacggtccaaatcctcagagagttcctagaaaatgtgacagacaaggaatcagcaattacaataaagggggtcaataaaaaaatagccattactgcagagtcctgtgggacacttaggacaagccctactacagctctgggtactgggaggttcgggggtgggggggaggagtgatatgtaagcaaagccagagggacaaggaggagccagccaggtggaaaggaagaatgggagcagcagcaggtacgagggtcctgcagctggagagaggaggcagggtgagtaaaggactgtagcttagtaggacaagtatgaagtgagtgggttgacgttggtgaggttctcatattttacaaacaccaaagccatcgggagggtaggacagacagctgagcctacccccagcgtttctgatgttatagtgctggtgaatttgcaatttgaacaagttcccagatgacacagatgcagctggtctggggaccacatactgagaaccactaatgtagagaatatattggagttagagattggacggggtgggaagcacatcttccaaaacaggtggccattatagtaagagatagtgacagcctggatgagtaacgtgggagaggtgatggactgtgatcaaggtgtagaactgagagttctcagtgactaattggatatggcaggtgatgaggtctttgaagtgtgtagtcagaaggattatgttactccctggggcagggaaaaaatgaggaagagatgggacagaaaaatggcatttgggtcctgagggtggtgcttataagtctcataagtagaatgtaataatcaagtgtaagttatttcaaatgtatatatcagatttacacaaagcaggtagttaaatatatgttattaaggagctaaaagaaatagaaaaatggacagagacacaggtcagggatctgggaaggtatggagatagagattaaagctgtagaaatagcccagagagaacatgtagataaaaagagaagccctagaacaaatttttgaaaaaagaaatgggtcatttgagaaatgggcaaaggaaggaaggaagaaatgggcaaaggaaggaaaaaaggaagacccaaaaggtcaggagaggcaatcagaagtgctcaagaaatgaacagaatagaagagaacatttccaggaggagatgatgctctacaactgcagagaggaccaacaagagagggtcacagacatccattgtcttcaggaacatgggagagttgagaccatagggagagcatgttagttgaatgataagcagggtaaccagatgcagtactgacgtgatgatactgtattctaggcagtggagggtctgttgggaattggaaattctactgcttattctcaagtttaagcaccttcattctgtgttcagggacatttgaaaatttcatgtctaggggaaagcaaccatgaaggctggtaagtgaaactgacattgcacatatactggtctaaaaggaagagtatcagtgacacagttcaaagccctggagcaagagttctcacactgaggagacacagaaccaccccaaggcaactgtggcagccgtttcccagagacacagcaggctaccccaacatggctctgctcacctctttctctaaagggcatcctgtttctgatcttagtctttcatcacctcatactcagtgtgtcctcattccctgcccacctccccccagtactctcacccctttggaacaaagcagatgggaatgctgttccttgctaaataagcactgtttgcaggtgagaaaggaaattaaaccacagaactgacatgcaactggagtggagtgagttatatgaagtcctgatggacaaagtcagatatgatcaagagaaattacaaaattaattccaaaatatggaaaataatgctacaaacaaagtttcacagagtaaaattcaatacaaaaaacatgctgaaagaagcaattgaagtggtttaaaaaaaaaaaaaagcacacagtgtaacccagaaccatgaatattttatagcatgcagccaacagcatttcaaaatgtctgaaatccacatcattttctcctcataacctaaaattaccctatggttttagtgcaaacattcaagtctgattttaaatggtttatgaatatttttaaatgaactaaagaaatataaatggaatttacaagtttggaattacaagatttggtttttaaaattatgaaaatccagaaaaatctcattttcaccaatacctgctagcacttcccttgccaaatcattcatctgatttattagtgactaatgatactcattctgaagttacttgccttgtatgagaaagcatagaatctggtcctgctgctggctaacttatttgacacaaagtaaatcatttaaatcaatcagtttcccagtaagtaaaattattcaatttgattaggcaatctgtaagttcctggctagcctaagaattctgaaaacatgacacattatactcataactgtgatataatagcttatgaccaacagaatcataaaactgatgaaagcttagacaatattcaatttgccccatttgttttactgatctataaaaagaagtccccaaagatttatgtctggcctaaggtcaagtagtttttttaggacctgctacagactgaatgtttgtgttcccctaaaattcatattttgaaatattatggtattaggaagcaagacctttggttggtgattaggttgtgaggaccaagacctcatgaatgggattaaagcccttataaaagagctctgaagagctctctcaccctctttcatcacatgaggacacaaccagaagatgaccagacactaaatctatcagtgctttgatctaggacttcccagcctctaaagctgtggagaaataaatttctgttgtttataaaagctacttagtctgtggaattctcttatagcagcccaaactgactaagacagaaaattggtcccaagaagtgaacgtgctgctgtaacaaataccttaaaacgtatcttaaaacaggataaagggtggaggctgaaagagtttgtatgtacatgctaggaaaagtttgcatttccatgaatagacctttaaaggtgattctggtacaggctcagaaagaaaagcagcatagaaagcctcagtcttcctatggaatagctaagtatcatgaacagaatattggtagacatataaacagcaaaagtcagacagaaatgaggaatattttattggaaactggaggaaaggtgatcttttttataaagtggcaaataatttggctgaatagtgtttatgttctagtgctttgtggaagatagaacttgcaagctttgatatttagctgaaataattcccaagcaaagtgttaaaagtacagcttggtgccccctggcttcttacagtaaaatctaagagggaaaatgacataacaatagaattgttaggcaaaaaggatctaaacttaaagatttggaaaatttgcagccatccatattgcaaaaattgagaaaaaatgtttggaacactaagggtgtggcctagtgaccatttgataagatttgtgtgggcataaactgtagatttaatcagccaccccagaaggaataccaccagtttgaactgaaggggaaggagataggaaggaatgaagggaggctgtcagacttcttacgtcttataggacaggaccaatcttatagatacgttttatagtataggacctattcagctgcaaatgtgcactattgaagacaagggaagaagaaccccaaaagcaattcaaatatcatcagagatgcctcttcagttacaaaaagtggagccattgcctgagtttcaactggttagacaggttctgcccaaagctgtgggtccatagagaggtacctccccaactagtggacctagagggcagagccacaagccaaagaggattattctgcagctgtaagacctcatgaagtttcccttgtagcctggacttattttgaatgtgttatgcctttcttctttcctatttcttttttttttttttttgtggaaatttctttcctttgtctgagccatctttgaattttggaagtacataatttgtttggtttcacaagctcacagctggagagcaatttgtctctggatgaatcataccttgagtctcacccatctctggggctatgatgatccctttaatgtattttgcatgtaagaaggacatgatttgggggtgggggcagaagctgaataatatagattgaatgtttgcatcccccccaccaaattcataagttaaaatcctcatccctaatatgatggtattaagaggtaaggggctttggtaggagagtaagtcacaagggcagagcccttacaaatgggatttgagctatagagaaagcttcaatctcgggaaatacaagatgagataccagaaagctctctctccccttccatcatgtgaagacacagcaaaaagacagccatctatgaaccaataagtagtccctcactagacattgaatctgccagcactttgatctaggacttcccagccttcagaactgtgagaaataaatttctgctgtttataagcaacccagcttatggtagtttattatagcagcctgaatagactaaaacaggaccaggtccaaggtcagatttaggacgagtgttatttccactggagcatattcctcttaaagagaggttaagacaacacaaagaactgaatatagaaacttaatggtgattcgggtgtaaaaaacatcggggcaggtatacagtgcagtggcaaagggttagatctcctagaagaaagatattttgacggagccctaaagattctgaaacatgtggaaaggctaagttgataataaattaagaaatcaaaagacaggcaggattgtggatggagtatgtcagtggtcatttaaaatccatgtttttgtttttaaaatgcctgcaaacctcttcaaacctctgattacaacaacctgttaacttcttgttctagactgcccagatttcaggactacagagttgtgtttctcagtctctgtaatgtaggcattgtatcttatctgagagtttatatacaggattgccaaggtagtgatcaaagtaaatgcaattgtcaatttaattagcattagtccctccaaattcattgtgcatgcgtgtgtgtgtgtgtgtgtgtgtgtatgtgtgcataaacacatacaagtttgtgtttcaggtttgctaactggcttattagcaaatactaaagacaaagctttaagaaagcattcataatttcttgggtcagctactgagtatctaacataagtaatttccttctatgctctgttatcttgttaatacagtcatttaaaatgagattttctttataggttttaatgaaaagaacagatcaatttttatgggatccatgttcctactcagctagcaagaatgaacaccatttctctagtagttctaagattcttccttaagtaaaattttaatgtttaggagacacagagcacacaaagggagtaaaagagcttaaaaatgtgagtttatattttgaatcatcctaaacaagcacagaaatatacatgagaggaagtaaaattatagtcacaggatagagagactttgaaagaggtaagagcaaaatagacaaaatcagaaaattaaattcaaacttctaaagtaaagcaacagacactatgaatgctttggagaaaaactggactttgtgggatttttaacccatgaaggaaagtaaacaaggatgcaagagcattttataattttacccataggctggcaataatcatttattcctgcaggacatggagttaaaattgaagtgctcaaattggctctgaattctctcattaaaactgtcctaaaatatacatagggttgattgtatttttaatttatcctttttttaatttttgtgggtacatagtaggtgcatatatttattgagtacatgagatgttttgatagaggcatgcagcatgaaataagcacaataatagagaatgggctatccatccatcaaagtatttatccattgagttacaaacaatccaattacactctattttaaaatgtacaattaagttatcattgacaataatcaccctattgtgctattgaatagtaggtcttatttattctttctattttttgtacctatttccactgccccctcagcccccaactacccttcccagctcctgggaaccactcttctactctctgggtccatgagttcaattgttctgatttttagatcccacaaataagtgagaatatgcagtttgtctttctgtgcctccagttctatgttgctacaaatgactgtatcgcatccttttttatggttaaatagtactccattgtgtacgtataccacatttttctttacctgtttatctgttgatggacacttaggttgcttccaaatcttagctattgtaaaccatgctgcgacaaacacaggagtgcaactatctcttcaatatactgatttcctttcttttgggtacatgcccagcagtgggattgctggatcgtatggcagctcaattttcagtttttttgaggaacctccaaattgttccccatactgtttttactaatttacattcccacaaacaatgtacaacagttcccttttctccacatcctcgccagcatttgttattgcctgttttttggctacaaaccattttaactgtggtgacatgatatgtcattatagttttgcatttctctgatgatcagtgatgttgagcacctttacatattcctgtttgcccttttttatgacttcttttgagaaatgtctattcaaatcttgtgcccattttttgataagtttattagattttttcctatagagtcgtttgagctccttatgtattctgattattaatcccttgtctgaggtgtttttttttcccattctgtcagttgtctcttcactttgttgattacaacccttgctgtgcagaagctttttaatttgatgtgatccgatttgtccattttttactttggttgcctgtgcttgtagggtattgttcaagaaacctttgcccagataaatgtcctggaaattttctccaatgtttacttgtagtcatttcatagtgtgagatcttagatataagtctttagtctatttcgatttttttttttttggcagattgtccctctgtcatccagcttggagtgcagtggtgccatcttggctcactgcaacctctgcctcccaggctcaagcagtcctcccacctcacccccatgagtatctgggactacaggcatgcaccaccatgcccagctaattttcatattttttggtagagactgagttttgccacgttgctcaggctggtttcaagctcctgggatcaagcaatccacataccttggcctcccaaagtgctgggattacaggtgtgagtcaccatgcccagcctggtttgatttttctgtatggtaagagacaaagttctagtttcaatcttctgcatgtgaatatccagttttctagcaccatttattgaagagactatcttttttccagtgtatattctttacacctttgtcaaaaatgagttcactgtaggtgtgtggatttgtttctgggttctctatgttgttccattggtctatgtgtctgtttttatgccagtaccatgctgttttgtttactgtagctctgtagtatactttgaggtcaggtaatgtgattcctccagttttttgcttaggatagctttggctattctggatcttttgtgactccatataaattttagcatagttttttctaatttctgtgaaaaatattggtattttgaatctgtagattgttttgggtagcatggacattttaacaatattgattctttcaatacatgaacatgaaatatttttccattttttgatgtcctcttcaatttccttaatcagcgttttacagttttcattatagagatcattcacttctttggttatgttaattcctagatatataattttatgtgtggctattttaaatgggattactttttaatttctttttcacattgttcactgttggcatatagaaatactactgatttctgtatgttgactctgtatcctgcaactttactgaatttatcagttctaatagttttcttgtggagtctcaaagtttttccaaatcttagatcatctcatcagcaaacaagaataatttgacttatttttccagtcaggatgcccattatatctttctcttgtctgactgctctagctaggatctccagtactattttgaatagaatccttgtcgtgttccagatcttagaggaaaggctttcagtttttccccacttaatatgatactagctgtgggtttgttgtatatggcttttattatgttgagatacgttccttctatacctagtcttcctgacggtttttatcatgaagtgatgttgaggtgtttttttctggttttggtatcagggtaatactagcctcatagaataaatttggaagtattcgctcctcctctatttttgtgaatagtttgagtagaattggtatttattcttcattcaatatttggtagaattcagcagtgaagccatcaggtcccaggcttttctttactgggagactttttattacagctttgatcttgttacttattattggtctgttcatgttttggttcaatattggtaggttgtatgtatctagagatttgtccatttattccagatttttcagtttacgggcatatagttgctcatagtagccactagtaatcctttgaatttttgcagtatcagttgtaataccttcttttgtatttctcattgtatttatttggaacctctctctttttttcttagtttgtccggctaaaggttggtcaactttgtttaacttttcaaaaaaaaccccaggccaggtgcagtggctcacgcctgtaatcccagcactttaggaggccgaagcgggcaggtcacaaggtcaggagatcaagaccatcctggccaacatgatgaaaccccgtctctactaaaaatacaaaaatattagctggacgtggtggcaggtgcctgtagtcccagctattcgggaggctgaggcaggagaatggtgtgaacccaggaggtggagcttgcagtgagctcagatcgcaccactgcactccagcctgggagacagagcgagactctgtctcacaaaaaacaaacaaacaaacaaacaaaaaccctttttattgcattgatcttttatattttcttcattttatttatttttatactaattatgggattgacttgctcttgctttactagttctttaagatgcattgttagattgtagatttgaagtttcttctcttttttgatgtagacactgatagctataaacttccctcttagtattgtctttgctgtatcccataggttttggcatgctgtgtttccgttattatttgtttaagaaatttttcaacttccttcttaatttattcatcaacccactaatcactcaagaatatattgtttcattttcacgtatttgtatagtttccaaaatttttcttgttattaatttctagtttagtttcattgtggtcagagaagattattgacattattttaatttttgtaatgttgtaagacttgtttggtgacctaattcatagtctatccttcagaatgatctatgttctgaggaaaagattgtgagttctgcagatgttggaagaaatgttctgtaaatatctattagatccatttggtctacagtgcaaatttagtctgattttttttgttgattcttctgtcaggaagatccaatgctgcaagtggggtgttgaagtccccagctattattatattggggcctatttctctttaattacatttcctttctatatctgggtgctgcagtgttgggtgcatatatattaaaaattgttatatcttcttgctgaattaacccctttatcattatatagtgaccttccttgtctcttataatttttgttctgaaatctattttggctgaaagaagcatagtgactcctgctcttttttgtttttattggtataaaatatcttttttccaaccttttattttcagtctatgtttgtcttcatagatgtagtatttcctgtaggcagtgaatcaatgggtcttgttttttcatctgttcagccagtctatgtcttttgattagagagtttagtccattttacatttaatattattattgataagtaaggacttaatcctgtcattttgttatttgttttctggttgttttatgatctccttttccttctttcttttcttcttgttttcctctagtgaaggtgattttctctgatagtatgattttgcttcttactttatattttttgtgtatctattgtgtgtttttttggtttgaggttaccatgaggcttgcaaatattatattataacccattattttaacctgataataacttaatactgtttgcataaacaaaaaacaaacaaaaagaacactaataaaaactcaccatgactttgtccttccactttttaacattttattatttctaattatatctcactgtaatgacaaagagttgttaggctgagagcagtggctcatgcctgtaatcccggcactttgggtggccaaggtaagagtattacatgaggtcaagagttcacgacccacatggccaacatggcaaaaccccatctctactaaaaatacaaaaattagtggggcatggtggtgggcgcctttaatccccactacttgggaggctgaggcaggagaatctcttgacccaggaggcagaggttgccgtgagccaagattgtgccactgtcctttacacacggttacagtgtattaatattctgtgtttttctctgcacttactattaccagtaaggtttgtaccttcaggtgagtatttattgctcattaatatccttttatttctgattgaagtattccctttagcatttcctgtgggacaggtttggtattgatgaaattcctccccttttgtttgtctgggaaagtctttatttctccttcatgatgaaggatattttcaccagatacgctactcaagggtaaagttcagcagtttaaatatgtcatgccactctctcctgcactgtaaagtttccatggaaaagtctgctgtcagaggtattggagctccattatatgttatttgtttctgtcttcttgatgcttttataatcctttctttatccttgacctttaaagtttgattattaaatgccttgaggtagtcttctttgggttaaatctgcttggttctataaccatcttgtacgtggatactgatatctttctctaggtttgggatgttctctgttattatccgtttgaataagctttccaccccctctttgaggacaataactcttagatttgcccttttgaggctattttcttgatcctgtaggtgtgcttcatttctatgtttttcttttttctcctctgactgttgtattttcaaatagtctttcttcaggctcacgaattctttcttctgcttgatctgtcctgctattaaaagaatctagtgcattcattagtatgccgatagcatttttcaactctagaatttctgcttgattccttttaattatttctgtctctttgttaaatttatcttatagtattagcctgttttcacactgctgataaagacatacctaagactgggctaattttatatatatatatatatatatatatatatatatatatatatatatatatgtatgtatatatatgtatgtgtatatatatatgtatgtatatatatatatgtatatatatatgagatttaatggactcacagttccacatggctggggaggcctcataatcatggcagaaggtgaaagtcatgtcttcatggtggcagacaagagaataggacttgtgcagggaaactcccctttataaaaccatcatatctcatgagacttattcactatcatgagaacagcatggaaaagacctgcccccatgattcaattatctctcaccaggtccttcccacaagatatgggaattgtgggagctacaagtcaaggtgagatttgggtggggacacagccaaaccatatcacttacaaaattctgaattccttctctgtgttatctggaatttctttgagtttcctcaacacagctattttgaattctgtgtctgagaggtcacataactgtttctccaccattggtccctggtgacttatttagttcatttggtgagttcatgttttcatggatggtattgatgatagtagatgttttttggtgtctgtgcataaagtgttaggtatttattgtagtcttcaccatctgggcttatttgtagttgtccttcttgaaaaggcttttcagatatttgaaaggacttgggtgttgtgatgtaagccatgtctactttagggggcaccacaagacgagtaatgctgtggttcttgcagactcatagaagtgctgccttgatggtcttggacaagatttaggagaattatctggattacctgacagaaactcctgtttctccccttactttctccaaagcaaacagagtctctttctctctctgttctgagtcaccttagctgaaagtggagtgacacacacacccctgtgggccagcactacaatgactgcactggatcagatctgaaacagcacaatactgcatctcgcccatggcctgctgtaaccattccctggctactgcctatgttcactcaagtctctggggctctacagtcagcaggtggcaaagccagccagtcctctgtccttcccttcaggatggtgaattcccccaggccccaagtgggtccagagatgctatccaggagtcagggaccagagtcaaaaatattagaagtctacctgctgtactattgtattgaggctgagctggcagtcaaatcacagacgcacttgttcctactcttccctcccctttccaaaggcaaaggagcctcaccctgtagccatcaccatcccaggccacaaggagaactgccagactaccagccaatgttccctttaggctcaagggctcttaagtcagcttgcgatgagtgctgcctggcctgggactcacctgtcagggcaatgggctccccgctggcctagggcaggtccagaaatgccatacaagagtaaaatcctggaactggggaacccaaaagcccacttgatgctctgcctcactgtggttgtgctggagcctgaagacaagtctcagaggcttacccaagggccttgatacagtacctgagtatcattgcttgttattcagggcccaaggcttcttcagttggcaggtgatgaatgctgccaggactggttcctttccttcaaggcagtgggttctcttctgacccaggtgtctagaaatgtcatctgggggctagggcctggaatgggaacttcacgactctgactggtgccttatcttgctgtggctgagttggtatccaagatgcaaaactaagtcttccccactcttccctttcctctccacaagcagaaagaagggctctcttttggatttgtgagctatgcagcctgaagtgaggggagggatgatgccagcaatcccttggcagccccagctgatgtcttagtaagtcgggtgcccccagagtccaccatctctgagcctagtttgtcattaggactcacgtaagagttgcagtccttacgtcctagacttcctttcaagtttacttggagatatagagtgctgtagccctcagtggcaaggttttcaggcactgaagttcatgccactgggatcagaaatggtgctctggctagggctggtttaaacactccctccttgggtgggtgttggaagagttttgtctggttctcttctggtctaacaggatagtactgtattcaatgcctcgaaattgctgtgttctccctcccccagcatccagagacactctctgcaccaagctgctgctgcctggggtggaggaggggcgacatctacaattcagaactgtttttttcttttctgcaatgcctctttcagtgacacaaagttaaaaccaggtactatgagtgctcacctgacttttggttcttatgaaggtgtttttttctgtgtggatagttgttaacttggtgtccttgtcggaggaacaatcagtggaagcttctatctcaccatcttgccctgcctcctgtggggttggttttataatcccatttcgtagatggaaaaacaaaaagggagtaaacttccatgatatgcctacagattcataccaaatcatttgtaaaaatggaaagtggaatctaggtatattatctccaacccattcctttcctacttgaccaggctggaatcaatgaccagagggataactccattttcttccctgtagacattttaggactacatagacatccatctatctcactggggaaatgtggtatgggcggaggagatacagaggttttatttttgtttttttcctagattttagtgctctttaagatgatttttgttgcgtgtgttttttatttttaaaagaacatagaaacaagtaacaattgctcaaattcctaccactcagaattaattattactagaatgttgaaatatttgcttctaattatgattgttagcttgttttaaaatattattattattcaaaagaaatgttaccatctaaaaaaattaaatgtttttaaaaacacagtccaggcgtggtggctcacgcctgtaatcccagcactttgggaggccgaggcaggcagatcgtgaggtcaggagatcgagaccatcctggctaacatggtgaaaccgaatctctactaaaaatacaaaacattagccgggcgtggtggcaggcacctgtagtcccagctactcaggaggctgaggcaggagaatcgcttgaacccgggaggtggaggttgcagattgggcggcagagaagactccatctcaaaaaaataaaaataaaaataaaaaaataaaaacacaaaggtgaaagtatcaaaataacacaaaagaaaacccaacacccagcgaggcgcggtggctcatgcctgtaatcccagcactttgggaggccaaggcaggcggatcacaaggtcaggagatcaagatcatcctggccaacacgatgaaaccccgtctctactaaaaacacaaaaaaaattagctgagtgtggtggtgggtacctgtagtcccagctactctggagcctgaggcaggagaatcgcttaaacccaggaggcagagattgcagcgagccaagatcacgccactgcactccagcctgggtgacagagcaagactctgtctaaaaaaaaaaaaaaaaaaaaaacccaacactcaaaagtaatcgtccttcacattaagaaaacacatttctggcatatttcattgtagatatgcctatagacaaaaatcatatgcagatagatagatttttaataaacttagaatcatttttatagatagtatctttaagtaaaaataatacattttatcttatttcctataggcagtatataagcaaaaatgaggggaaaagaacttcaaccaatatcaaattatggttccacaagctcaaattcttacttttccacattattacaaaaataaataacagcaaaaataatacaactttttatttgtttctgtgtggatttccttctagttattaccattaacattttcattatcatcatcatctattattgtcctaaatattggcattatttacggctcacagtgtgccagataccttgccaatgtttcatttacatgaattttttattttatcctcataagccatctgcccacagagcctgcgtgctgaatcatcctgccctaatccttctctgtcttcaccctatttcaacagaaagaaagaccagatacatagcaagagcttcgttcttgcattcaggggtcaagcatagggagttctgacactttctttcactctctttatgcctccttttcacttacaactcaaaagtgagaagagaggaggtaaagggaaggtaatctatctgattggcaaacagaaacctatttttggaaaatgaaagttaccgaaagccataaagaagtttaaaaaattctcaatgcccttcccatttttccatctttctactgctttttatagccttttacttacatagtttattctcttgtgaatttagcctcagatagaggagaggctaagagaatttaaaaagtaatgtgaattgggatatctcaaaaaggaaggaaagatacattttatggtgtatgttctatgtgccaagcccacttacacatattatttcctttagtccttaggtaagaattattttttcactgtaagataaaaaaattgggactagggaatacaaatcacctgtccaggaacacacagccagtgatggtttaaaacccagctctgtttgatcccaaagcccgtgtcctaaaaagttttctctaatacagtgaggaaacagcagtcatcgttaattctttcagccaacatttactgagcagctgccatgtatcagacacagtttaggttctgaggatacagagtagagcattatatgacctctggctttgaagaatttacagtctagtaggggaaggagagtgagactggagggccttatatactatctttccttagctgcaggtatggcagatatatttaaaataagcaactgttcatctcctctaagaataaatgtcagaagtcacatggaaattgaactttagagactagaagtgtctcaagcagcctgctcagttttgatcaaggaaataaaaacctaaagaaatactcagagcaaagttactaaacacgtaactttgagtaaaagatggctgcaacatgaaattatcaaagatttacagactataaataccaagaggattaaaatgctcttggacttgcaatcaaatttggagtaattggataaaataagactacctctaactcattttattataaagatttattagagtataaaaaaccgaggcccaaagatatttctgcttgcgacaattaaaccaaaaaagtctaaagtcaatccatgattatatatggaaataaggaccacagaaagtaaaatgaatttcatttccatcatctttaaaccacattttgcttccaaccttttccttgacccacgaaattgccaaaaataaaaatttacatgttttggataatttttactgagtcttgtgagagaaatggaagccttttgtttcttgtgggcagaataatctttgtttttagtaggcaaagagaagtccctcatataagagcttcctcattcttacccctatacactccatctttcatctgagagcacataaatcatagggaaatttttcagcaagacaaaaaggaacaatgattattacttactgagcatctactatgtcttagttccttttgtaagttctttaatatgtttctcattaatcttcacaataatggtggaagataggcattcttattgacttattctatggaaaaagaaactgaggctcccacaggggaatgtttatatatattatgatatgttcctatgcttgaatattaggcagccctcaaagtaatatttttaaggacttgttatgaacatacgattataatgaaaagtatataaaaattaagttctcaatattcatacatacaactagaaaaaaatgccaaaatgctaatagctggataagctaataaaactatgaataatttttatatgcagattttaaatggaaaaaattttaaattattttttagagaaaaagttatatacaggaaagatatttttgtccattaagcttctgtaacaaaatgccatagaatgagagggatatacacagcaaaaatttatctattacaattcttgaggctgagaagtccaagaccaaggtgctagcagattcagtgtctggtgaggacttgctccctggttcatagacggtaccttctcactgtgctcttgcatgatgaaaagaatgagctaattctatgaggtctccttaataagaacactaagcactcatgacctaaccacttaccaggttcccacctcttcataccatcattttacacgttaggatttcaacataatgtattttggggaaacactaacattcagaccatagcaaatgacaaccaaaaaggtgtaagattttaaggatgcagatctaactcctggcaataagataacatttgatacaaatgtgaaagataaacaggacttgccaatgctaagactggatagaaaggggaaagaaggatgcattctaggcagagaaggacagagcaaaattagttaagagttttgggtatgtaaaggaagttttgagatataagacccaaagcagtttgaagccaaattgaaattatcactgtatgcttggctaaagagtttggaatttattttcataggcaatggcaaacttttgaaagttttttagtaaggcaatgccatggtcaaaggggtgctttaggaccttaatttgccgggaatatgcacaatgaatagaagacgcaagagagtacaaacaggaagaataattacaaagtcattgaaataatttaggcccaaaacaatagagcctgaattcacatgatagcagtggaacagataacaagggaggaacagatgggaaagttcctcttctgcctctccaaccaaccccctaattcctgctcctcttattctctccattttagctattctggccttttctctgtttctagaaggaactaatctagttgcccaactagggattcctccacccttctctctctgacatctttgttcattatttctttgggtctctgcttaaatattttatctctctgacatctttgttcattatttctttgggtttctgcttaaatatctgcttcctccacccttctctttctgatatctttgttcattatttctttgggtctctgcttaaatatttttccaggacagttttcatgcccctctaagccagtctagactaggttttcctgttttactccctcgcagcaccttgcagtttttttccattgcacttattataatcaatagctaaaaaataatatttactatgcatttgtgagataaattactctgttaagttttctttacaaggattatctccttttatccaaaataaaaaataaaaaataaaaaaacacataagtagacattagtattatcccctattttccagagaagggaactcaagatcagaaaggttagttaactatggaatttggaagtgactgctcttacctacctagagggatgctctggctcaagtaagggaggtaatttgatgtagtgattattaggttaagcatagaatctagagacagactaattgggttatgatcttgcctttgccacttactagctgtgaaatccctcaagcaagttgtttaagctctctggggctaaatttcttcatttataaaataagatattgttgcttctcttataggattgtcaggaatactaaatgagatgaatgctgagaacaagattggcatataggaagtggagtatatctgaaaactattactagtcatgtaataagttgtttaaaacatgccttctcatgtattctgtgagggcagaatctatctgtaagaggttgagaatgtgtttaacactatatcacaggcctagcagagtgcctggacacagtgggtgtttgataaatatttgaattaatgaatggacaaatgaaaagctgagtacacagatcttactgcctaacaccaccacatgcatagagcacattaaaatgtatggtgcctgtttcatgaccattttgtttaattttaaccacaaagtcaaagaagggaaggaactattatccatattttacctttgataatgttgagtctcagaaagttgtttgctcaaggtcatatagttgataaatggtaaagccaaaggaagatcctgactctcaaactacccaaggccagagttatcttaaagacaacccagatgagagtcaccacaggcaaggttgaaccaatcaccattcacagtgccctcttgagttgccccagttctgaaccttgatcttgctgtgattcctgaaaacctctctacctgctgcttcagctttgttaagtagcctcccccatagcatctggtggtgtctgcttatccaggcgcccctgctgacttcactgcccacctgaaatctgagtacagcatcacaaaccaagtctgacacaaacgtaggatcctttaattggaccataacaaagtgggacactgattttttttgggagggattgaatatgagaagagattaaaggagttaactaagtttcaagcccagttaaccaggagaatgacattaacacaaatagtcaatacaagagtagtttgtttgaaggaacatagaactattcaacattagacacgtcaagtttgggacaccagtaagtagtctaagtgaatagcaaatagatatggattaacattcaggagagaaataaagcccaaggaatcacctacacacaaaaaaatgattaaagccacagaactcaaatcctgcacagtgttatttagtgtggggctattctgtgtctgatggtgtgctgacattccctagaggggcagcagtatccaactgcctggacttgggacctcagataccgcttcaatcaccatagggccacacttacgtgatttatattgaatctcagtgtcagagtttgtttgattaacaaaattagctaaaagaaatgtttgaagcattaatttagtaggtattctctctccctattctactaccaaagcctctgttatagtgtctctacccacacccagatatacggcagggagaaatcatcaacttgaattttagttctgacagtgaacaagccaggaactcttaactaaataatattcagttgactcatgtgtgatttagaaaatattttgatattctagtctggttccagttcagtgaatcagtgacaggttcaaagtggttcactgcagtttaaataataaaataaaataaaataagctttgttttatttctcagttccatagaaaataaaataataatgtttggtatttgagttgaggttcagcaaacttttataattcattctaggtttttgtttattgtttccctctgcatcaactcctcctgttttggaaacatgccctgtagatatctacaaatccatactggtggaccgtattcaaggcctcaatttaaaatgatgagtcacagctattcatgatgtcaggggtaagcctcagctagccttctacttgagtgctgggcaagcctcaggtataatctcattggaagaatatttgcccaggagctctcctgagagaaggtcccaggtcataggataccttaaggacaatagcatcacaggtatgataaattacatcagacacagctgcccctttcagtgcctcaagtttcatgtggattagcacctacgtgctgtgtgcatctgggcccaattcccaggcggttagctaacccaaggcccctgatccaaaggagagctgagctgagcaaattgccaccagcattcaagtaagggcagatttcagctttcttttaatcaaacctcagagaattaaataaataaataaataacaaaacaaacaaaaaatttgttactgggtaatttttttttttttttttttgcctttttctggattgatacccaacccatgaacagctcaacttaataataaaagtttctcattgttgcctgggatttttgaaaatacacaaatttgttttttgtagctgcaaaatatctgtactaagatgtctatactaaatggttgaattccactgtggaaaatgtgtaatgttgcataaagtcaaatttttctccttccaacatacttgttgagacaacacattatttatcaagtgtgatccatttgacctctatgttagtaatttcataatatcttgaattgggggcttttagaaagattcagtagctttctattttttctttttttctttctttttttttttttttaaaaaaggcatttagtttattctcctcatcagtttcacttatattttcatggttcacacttgccaacgccgctcttctcattacagtagttaaatgtgcaaactcacttgggggctcagggaggggtgggggctcggtcctgggtgggaagggtgttggcacttcacgtggacagggcgggcaacctgtcccgagtgacagaggtgtgggtgagtgggcagccagggaaggggagttggcaggggagggccccatggtcttttttctctggtggttggtgattctccattcagattccttcctggctgcccagagtgagggaaaccatgcagcttagcgcagggcaggggaggaagataaggaaaaagcagcaggctgcccaggggaaggggtagggggtgaacagcagggcaaggagggcacaggggtggctcctggggtaaggcacaaccttgtctttggctctcctggtgaggggtttcctcccttgcaccctctgcctggcccttcttccccccatcacccaccagacccacacacacagtcccaggagccagggggcacctcttggggtccctgaaacaagtgggccctgccacccaagccagtgccacagggcttgaggagggacacccaaggaaaaggcagagagaggcaggcaggggcccacccaggacaagggggtgggggcggggagaagaccccaggcccaggagctggacccccccaccccaactaaggcctggaagtcggggagcagccgcttcttttcagggacctggctggagctccggcccgcccctaggccttcaccaggcccagccgcttgccaagtgaccagggcattgcactttggggtcaatgccggggtggggaggtgggccaggtgaggggagaagaggggcaactaaggtgcttgactattatctaactcatagcaaagtctatcaggaagatagagaacagagattgccacaaatcaagcagtgaattattacatagtgtagaacagtggaaaatagggaagaaaagatgagtcaaggagttagacagccctaagttcaaatactaacccttcacctacttggtaggcagccttggtgaagtcattaaacttttctgaacctgttttcaactcctcaaaatggactatcatcagtgtagtatatgctcaatatccacttgttcacttttcctacccttcttacataaatcaggggtcacgtgttcgtgttcttccaaatgcatcaatggcaaaaagtaaaactttgacatgactcaccctatagagtaagacttgatcttgccataagtattagtgagagacattcccctgtctcatttattatacagtgaaataggcctaaaggacacagagtattttttaagaagaaactgatcagggaaactattttaatgagcacccagctgaaggttaatttcagaatgctctggtacctgagttcattctctcataccactgaggaaaatggaaaatgatgggacaaaatgctcctgtaaatttctatcgttggcattgctcccttgtgtagtataagagatcttgcaaaaaggcaaaggggacctggagtcagagagacttgaatctgaacaccagtactgtcattaactgtcagacccatgcaagttatttaacatttctgagcattgatttctcatttatgaagtgaaaattataataaagtctacctcacaggcttgtgggaaaaattaaataatttaagtaaaatggcttgcaaagtgcctgacacatggtaagtattcaacaagtgatctttattacaaagtattagtccattttcacactgctataaagaactgcccaaggctgcataatttataaagaaagaagatttaattgactcaagttccacatggctgggaaggcctcaggaaacttacaataatggcagaaggggaagcaaatatgtccttcttcacaaggcagcaggagagaaagggtatgcagtgaagtgggaagagcctcttataaaaccatcagatctcatgagaagtcactcactatcacgggaacagcatggggtaaactgcccccaggatccaatcactcctcaccacgtctctccctagacacatggagattatgaggattagaattcaagatgagatttgggtggggacacaaagcctaaccatatcatactaaaacttgttaacttaactatactatactatagtatagtaagtatatatataacttatatagagagaataagtatatatgtaacttatatatatatagtaagtatatatataagtatatatataacttaactatactataacaagtaaacttaacttgttaactataacaatgttaacttacactggccaatggcaaaatccaaggttataaaattaatttataaggataaacgcctgtctcctgtgtaaaattattaagtgcaattaatgtcatcttattaattgcctcatagaggtttaaggatttgagttggctagattatttataaacattgagatttattttattctctccgtgttaaaagtctaaacttctgaagtaaccagaaagaaaagttgaaattctttaatttcattcatgattggccttacattttggttatctggtaatatttttccttaaatgtacaactacaaagaaaatactaagactaatttatactgttattccataattttgcctttgaaacaagaatttgaagcctgatgttgtggctttgaacatccattttggattatagtagaatgtcctaggagaacagttttatgtacagtccagagcctcattataagactgatgctgaaacctaacacccagttcttttttgaaagaaaacttttacatttgttcttataaaagcgtgtgagaaatgatatctcattttgactcatttcactttcataataacattctatatgaaacaactttcctcaacaaatgttcagacaccttctcaactttgtccctggaaaacttctcttaattttctttcatcatggtgaccatttgatttaaggtcacaggaaaaaagaactgacctgcagctgctaatcatgctgctctatcttcacctgtattttatgcgccatttcagccttgattatgctaatctgataaaattgtattgaaataagttgtcgcttctcaaagacttgaattgtattatggggacagcaaccagtgcaatcaaatattctgttcttgtatttcagtcactgattttccaaagaagagcaaagaatttaaattttgatggaaggaaaaagtgagacttgaacacccagaaaatgctaaagaggcagctgtaattgtgcggaactgactagtgtgaatttcctggctaatgacaatgagcgcaaactaaccacttagcccagttttaattaagaaaatgacttcactctaaattaattgtataagattttgcttcatatttttaacagtttcaaaatatactcataaacaaacttctaattattattagaattatcttagagctagattattttgtctcatacagtaactctccctaagcccctctcccttcttgtcaacatccatcttccttaacactcctctctaggattctgcttcaatgctaaaaggaggactgaacaaaagaagacaagagcacttggttttcctctgtgaataccagactctagtcccatttgattttgtaagcaaatagttcttggaaagaaatcctatgaaaggaaaattaatgatcctggtttctgccaattaaagtgcatttaacttatcattttacttcctataacacagaacatgaattagagaataaatgtaatcaaaatgctggagagggtaggctagccatcatttctgagattagagaatgaggtttgattattgtgatctagcaatattttcaaggaattgcagtctaaaactatacagaaaatgatggggcttttgttaagtatccagctccgggtgtgagttaaatgaactgaagaatcattatgggaagatgccactgcaaaagaccctctaggagtacacgtgataaactttaccatagaagggcactttctggtgtttatattaaggaccactgtgtagtttcctgggatttaggaaagggaaaatcattcttaaaaatggtagagatgttcaaatgcctaagtcttttaaagaattctggctgggctgctctggagagaatacttccaactgtgtatattatagccattatatttatatctaagaaaacacatacttggttttaaattgctcatgtcccaagagcacgaactacttttaccataagacctctgtctacttaaatatcttctcctgatatcatctcaacaatataaaaatactcatttaactgaagcaaatttaactactcaatttaatgtacggaattaatattttcattcagacctctccttttctataatatttaaaatggctcctaattatctacattataacccccaactccctatttcagttcccggttagctttccaaacttctattctttcactccttcctgcatttttagttccagccatattaagcgactcattgtcttctatacatagtcttacatttttctgcatttatatatctgttcattctactcatctggatttgtttgatttgtttattataaatagcatattctaattctagagcaagcaaggataaactaaatgcaatcctgtaggaaaaattaacagggaaaaaggaggtgattcctcctgaaaggcagagtggtgaagtgaagggcaaatttcttattagaagtctgaggcgctgggtaaagttcaagaggaatcaaagcagtaggatgttacttggttggggtgagaatggggtggttgcaaggcataagaggtgttataatcagagagattgaaaacaacataaacagaatcctggtctggaaaatgaggtcaccaatattccaagatcacaatcatcattgtattttgttatgtaatagttacagagtacctcttatagtaaaagctttgtgccagacacacagatacacaaagatcaataagacaaactccttgacctcaaataaatacacaataaacacaaataattcaataaataaaatgtcaagaaggagaagtagtaagtttgtgctcatggaaatgaatagtcaaccagaagtttccaaatggaacttcctcattaagtttgggcccatttagagtaaggcaaaatgccctacatacctccatactttcaaagggcatttctgcagtacaaactacagtaaacagtataggctagtgatggttcttagatctggtaagatgagatcatgtttaatgtactgccaatgttacctgacaccaccaacagactcacagttacagtcatgcccaatgacagttatgaatctccagtgctaaaggaagaactcaccctgccccagtgtccaccatattgcttttttcctgcttttacttccatgtataaatgaccacaaagtccatttccctggcgcttcttttaagagactctctgctacagttgagccatttctgtttacaccaagaccatgacaagaaagatggtatcaaaggatggcttgcttgggctttagacccctccttctcccacaatttccagcaatactctcctagaacctactgacaaataagcatacaatctaaattaaaatgtgtgtgaacacaaaatcatcttcgaaataaaataagtgttccagcatctcctcccaacgggactgccaccagtaagctgttccacataagaattttggaaccatcactaatgccaaggtcatggactgtcaagttctgtttctgccagtcacagagagaacgatctcttctaaactctttgctatattttgccacctggttcctaactagagttacattgggtctggaatattacaaattctttcttgaaaatggttgtgccagtttctggtttttataagtatactgtgggcaccacagtccagcttctagtttatagtaaattaattcaaggaggtgagagggcaacagataccatgccattccctcctcccttctccttttcttgtcttccccatctcttttttccaagatacatagatgctattatatgcaatagtatatgcaaattgatgtgaggaatggagacctgaacttctgtcttctaagcaaaatgtttcattcactagtggactcttaagaactcttaagagctcttatgaacagaaatgctggaattgtttttaagaaaatgttatccaagcctaatcagctttagtgttttagaaagcaactttcaattatctggaaaagtgatttatgtgaagcaccttatttttcagtagtttcgaatatgttaggcattatttacaagcaaagaaagaagtcagacaacttaataaaactatatagcatttttaatacggagaaagtgtttctactctccctgatggaagcttatctattaaaaggattcagatatctaaactttaagaaaggcagagacccttcctacctccttaatatggttcatcggggtaaaagttactccttactcactaaccaaacctctaggtcatcttcccacttcatattccttcttctccgtgactgataaacctctcagtactttctgaaattcctggtaaagatggcattctcagtggtgcttgcttcctaacacatggcaaaaacagactgacagcttattagtgctgtcagtaacagctacattgagactgaaaaggctaggggacccaagccacatagctattaataaaaggacatgaatgcattttaccccacaatccaagaactgacaaaactactcagcttccgcctatgcggctggcattccttaattcccttttgctgcccatggttaggcccaaataacacatggtgaacactggatcggggggtcgatggatgggcagatggatgaatggattaatggatgaacagatgaataattgttccttgactatagccaggtagacaaagaatgagagagggaaattcaaatctcaggtgtgctatttgtcacaattcaaattaaaaggtgttgggagaaaatgggactactaactaaaattcaaattatggatttcagcttgttttgccactcctttggctaattaatttaaattttactcaaagttaactgcactaacaattctcaagccacagaagcatacctagcataataactaggtataataattaaccagatgttaattctcacatggagaaaacagctattctagccacagcttcacatcatgcatggtttccagccttactagaaaatattttcagttaaaatagaaatatgggttatttaatttgcattcactgcaacaggttgacagtacaacaggtttggaagcaatttaattgaaactataaattattctgcgtcatctgggaggcaagaccatgttatcctgatgcttttgtttcctttggaaacaggattagtacaatgcctcaggaaatgtacatatctcaacacagaggctgaaaacacagggctttgtctgactgttgggtatgtccctctgcctttatctccacaacaaacaataacattacagaaaagagtggcttgattaaggaaaaatgatagtacacacagtatgctctctatccctgggatcaaactaagacccatggtgtattagtccattctcacactgctaataaagatatacctgacactggataatttgtaaaggaaagagatttaattgactcatgtctcagcatgactggcgaggactcaagaaacttacaatcgtggcagaggggaaccaaatatgtccttcttcacatggcagcagcaaggagaagtgctgagaaaaaggggaaatgccacttataaagccatcagatcttttgagagcttactatcatgagaacagcatggtggtaactccccctatgattcaattacctcccactgagtccctcccatgacacatggggattacgggaactacaattcaagatgagatttgggtgaggacacagccaaacaatatcatttcacccttggcccctcccaaatctcatgtcctcacatttcaaaacacaatcatgccttcccaacagttccccaaagtcttagctcattccagcattaactcaaaagtccaggtccaaagtctcatctgagacaaggcaagtcccttctgcctatgagcctgtaaaatcaaaagcaagttagttacttcctagataccatgggagtacaggtattgggtcaatacacccattccaaatagaagaaattgttcaaaacaaaggggctacaggccccatgcaagtccaaaatccaatagggcaatcattaaaccttaaagttacaaaatgatcccctttgactccatgtctcacacacatccaggtcacactgatgcaagaggtagcctcccatggtcttgggcagctccgcccctgtagctttgcagggtacagcccccccgccagctcctttcacaggctggcattgagtgtctgcaacttttccaggtgcacagtgtaagctgttggtggctctaccattctggggtctgaagaatggtggccctcttctcacagatccactaggcagtgcctcaatggggactctgtgtgggggattcaacccacatttcccttctgcactgccctcacggaggttctccatgagggccccagcccctccagcaaacttctgactggacatacaggcattcctataaaccctctgaaatctaggcagaagttcccaaacctcagttcttgacttctgtgcacctgcaggctgaacaccacatggcacctgccaaggcttggggctcacaccctctgaagccatgacccaaactgtaccttggccccttgtagccaaggctggaggggctgggatgtggggcaccaaggcctgaggctgcacacagtggtcacagggtgggtgggcacctgtacctgccccaggaaaccatttttccctcctaggcctctgggcctgtgatgggaggggctgccatgaaggtctctgacatgccctggagacattttccccattgccttggcaattagcatttggctccttgttactcatgcaaacttctactactggcttgaatttcttcccagaatataagtttttcttttctatcacatcattagactgcaaatttttcaaatttttatgctcttcttcctgttgaacactttgctgcttagaaatttcttctgccagataccttaaatcatatctctcaagttcaaagttacacagatctctagggcaggggcaaaatgccgctagtctctttgcatacaagagtgacctttactccagttcctaacaagttcctcatctccatctgagactaccttggcctggactttattgtccatatcactatcacaattctggtcaaagccattcaacatgtctctacaaaatttcaaactttcccatgtcttcctgtcttctgagccctccaagtctctagaaagttccaaactttcccacatttcctatattctgagcccttcaaatggttcccacctctgtctgttacccagttccaaagtcactttcacatttttgggtatctttacagcagcactccactctctgcagtcccaatttactgtattagtccgttctcacactgctaataaggaaatacctgagactgggtaatttatgaaggaaagaggtttaattgactcacagttcagcatgaccagggaggcctcaggaaacttaaaatcatggcagaaggggaagcaaacatgcccttcttcacatggtggcagcaaggagaagagccaagcaaaatgggaaaaatcccttataaaaccatcagatatcatgagatatctgactcactatcatgagaacagcatggaggtaaccacctccatgattcaattacctcccaccaggtccttcccatgatacatgggattatggggactacaattcaagatgagatgtgggtggggatacaacaaaaccatatcacacggtttggtctaacagagcaaaacccaatgctagactccctcaaaagcctaagtgaacagctgccatctttctgatgtgagatctcagggagaaatatttaagaaggcagaggggagtaaccacgattaagtttatgagtgcctatgaccctgaaggcctctataactgtatatttgtttgaattgtttgagctctgaggaaaagggcctttgatcagaaggtcttggtcatgccaggcctagggtaaaatgggagagatagaggcaacatggggtgcaagggtacaagtctgagttcagtggggaggaaaattttcccctttccctgtcccatattgaggctcctggactgtggtgatggaagggaattgaattctgttttcatgtatgacttttcagccttaaggcatagcagggggcagcaccgcagacaaggtagtgcttctctgtagtggaagggctggagaggaaacagcaatgcccagtgcacaaagattttattgcactcaacagccttggagatgagccaaaataccagccagaggaggacactttaccaacctgcttgaactaagaagagctaagaaccagcaccatttggatacaaattgctgatttattttcttccttgccagtaggctagtgaggcctggggacatacatgttactaagacaagtatccagcagttacaggattcttgtttgcaataattataatatcccttacacaggtgcttatgcatacacacacacacacacacacacacacacacacacactcccttcctcacaataagctcagctttgacaccgggcagagggaaaaacaacagacaactttagatgtagctgtagtggaatagctctgaaattctgtgtcacagttttctatgaatgaatagaagtgtcatttggcatcttgccacattctcctcaccagtctcatcacttgctctgcaactctgcccggttttctgtgtcatagtccttcttcattcaggctgtgtggtgccatcaagacctaaatttatattcaggtatacattctgtgttttcttcacatactaatcattcaccactgtgtctatatggtgacatttaagaatttatatttgggcatgaaattatcttttagcttattattttaaagatcattgcctggtaaactataataattatacaaattcaatacttcagttcttgttcattacctactaattcatagtcattagtaccacaaacaaaatggttattaaccaaaagccagagtttcatagtttcattgacatcactgtcattagagatgcagaagacatatttcacctgtgcacttcatgttatgtatggtttgagcatttttcccaagctaaagtaattttgaactttgattttaaattagatataacataatttattgtttgagtactttatgtccttgaaatctgtgtctcagatacaaccataagtcagtgtttggtttcttccaaattttccaaacccagcccagggacttacagaaaattgcttctcaaaaaagatcccttcagcataaaaatgatataatggattgtaggaacttgggtggaagaatgggaggggagtgagggataaaagaatacaaatataatgcagtgtatactgctcgggtgatgggtgcaccaaaatcttacaaatcaccactaaagaacttactcatgtaactaaataccacctgtaccccaataacttacgaaaaaaataaaataaagtaagaggcacaagtaacattaaaaaaatctcttcaacttagatgaattatgtttttcacgcatgtcatttaaaaacaaaacacaaatagagggacccatgtctgaattaattgccttgtgatatcactgtgcattggggacttaatatataatcagaaagaaaaactgcactcactctcttagcttcttgagtatcttgaagcttccagcactcttttcaccttcatgtgggacaaatacacaaaactgcttgagcaagccatctgggacctctttccaagaatcgtccttctctatcattggagtctcttctaagcattgcttttattttcttcaacttttaagtacactggtacatgtgccagatgtgcaggtttgttacagaggtaaacatgtgccgtggtggtttgctgcacagatcattccaccacccaagtattaagcccatgccccccaacagaccacagtgtgtgttgttcccccatgtgtccacgtgttctcatcattcagcacccactcataagtgagaacatgtggtgtttggttttcagttcttgcattagtttgttaaggaaaatgacttccaactccatccatattcctgcaaaggacatgctctcattcttttttttgtggctgcatagtattccatggtgtatacgtaccatattttgtttatccaatctatcattgatgggcatttaggctgcttccatgccttttctattgtgtatagtgctgcaatgaacatatgcaagcatgtatctttataacagaatgatttctgttcctttgagtatgtacctagtaatgggattgttgggtcaaattgtatttctgcttctaggtctttgaggaatagccacactgtcttacacaacggttgaattaatttacactcccactaacattgtaaaaacattcctttttctatgtggcttcaccagcatgatcaaactatctttgtttcctattttcttttcttgaggttaggagttcctgtgacacagggatgggaagaactgtcttatgacacagcagaacttggacactggaagggagtggtgagaaggttcttcattagtatctaataacatttagaagatagttaattacattggtctttagtttccccaatctataaggtgaaattatagaaaaagaaaatttgtgaggtcccatacctattgttctaattcagtaaatgaatgtaaatggtctaacacaagtgaaatgaaggtcatacagggatagatggtttatgaagaaaccactaacaaactcatggggcaaacctggagatactaggtagtcacaagcatggtagaagaaacccaaggctcataacaaaccctgcatatggtagttattttctgtctctgatagaccattctccctttacaacatcttactggacatgttcctacttgggtgttctataagataaattcaaacttattaagtcccacaatgatttcagtatttctgtcaatcctgaatcttctaatacttctgtttttattgaggagtcccagcaccctcttagtgatacagctttcagatttactaaactcctttctgttcctggacactcatctaaacagggctcaatcctgctgattcaactgccacaactcatagcagttacgtcctcttcaccatcagcacctcgattcagacctctctgtggatttccacaatacctaatttgcggcctcacttattttctctgtcttccagcccattctggaaatagctaccagagttatttttcaaaggacagggaaaagtctactattcttaaacacatttaattgtaccctttagcctgtgtgtaaaattcaaactccccagactgttttttgagatccccacaacctcatttcaaccaaacattttttggttcatttccttctaatctctttcagatacactcctaacttactgaactgcatggtcctttctttatattttcctgtttttattcccctctagattgctttccccattatctctgcatgtctgaatctactctcgtatcaaggcaccaataaaatgccacctcttctctaaagcttttccccatcctcctgctggaagcaatattttctgcctccaaacacctacagtgttttacctgcaattctcttatggcacttctcactttttatgataaaatactcactaaaagacactcttgacaagaatgtaagcttaaataactaatgtagtgtcttgtatatattttggccccaattcatatgtattgaggttgaagtctcatcagaggagacagatatgaaagaaattacattttgaccaggaagtattttcttagatagtagaaagaacatatcaattagaggggttgtttagatgggctgttctggtacagactaccaaatgcttgtagacttctttcatacaagccttttaaaatagcattagtcaatcatttccttatggatatccaaagacttaaattgttaaatagattttttaaacatccatgtaatttatatttactctagaaatatagaccattgacttaaggtaggtttctacattatgcagtggtagctacagatttcatgtgttagatgtctttctactcttgtttgttttatcggttttagctgtactagagttacccttgaatagattttttttaatttctataaatccaagtaacatcttcaaatattgtttgctgcttatgacagaagcaaagccatgttaaaataattccagttgatatatatgatctgttttatacaccttgtaatgtattaaaatcttgacattaattatctcatttaagtctcacagcaatctgatgagatcatatcactattttccagatgtgagcattgaggcacagatatgttgaataaattatccaaggttaaacagctaataagtgaaaatcacagaaagagaatcaaagtaatttgacactggaatctacctacttgatcactatactgtactgtccattggctgtggagttagacaaggattaaatccttcctctgttatttactactagttgtgttatcgtgagcaaagtatttaacctctctgagactcatttcattatctacaagatggttaaataatacttatatgacaaagttattaataaaaataaataaaataatatctatataacccaaatcccagggttcttcatcctcaggagtaactttcccctttgggaaaaagggctcttctcaaactgatcctaaatggtccattcccctgttgcatgttcctttctattcttccactctctgtgagttatcactcacttctcaggcctcttggaaatttttttaaaaatgggattcactatagcacatccacacacctacgtgtgccatgtggttctatacaacatcagaaggacatttaaaattaaatggttttttcaatttttaaatcaagttcttagtttgcatgtcttgcataacatccttctattatttctgtatggagtgagggatggaatcagtgtgagcatgtattaacctcatggctaaaagtaggaaagaaaaagatttcctcatactgttatgtatgtgtctagtacaatgtctgacacagaacacatgccaataaatatcaatgttttcccttgtcctagaaaaaaaaaatgccatgaaatattaaaatttattttcaacctcacattcttgtggactttatatatcatgacttactacaacacaatgaaatgggcacaagacgctactatctctattggtaactgtattcgtccgttttcacactgctgtaaagaactacctgacattgggtaatttgtgaagaaaagaggtttaattgacttacagttccacaggctgtacaggaagcatggctgggaggcctcaggaaacttacaatcacagcagaaggcaaaggggaagcaagcatgtgttaccatggaggagcaagagagagagagcaaagggtgaagtgctacacacttttaaacaaccagatcttgtaagaactcactcactatcacaagaacagcaagggggaaatccgcccccatgatccaaacacttcccaccacgtccctccccaacactgggtattacaatttgacatgagatttgggtggggacccagagccaaaccatatcactaagtctctatgccttgaaaattttcctctttttttgtttatatatatttgaaaactcatctggactaaaagttaattatttgacaaccaaaaattaattcccaactcatgaagccaaaattctcattttttaataaagttcaacttattggtttttctctcatagattgtgctttgggggttgtactaaaaactgagaaccaaatccaaggtcacctggattgcctcctatgcttattctagaagttttgtagttttgcattaaggtcaatgatccattttcagttaaatttttttttaagtaataaggtctctgggtctgtgtctaggttcttcttttttgcatatggagatccaattggtctattatcatttggtgaaaagactacctttcctccattgaattgtctgtgttcctttgtcaaagatcagttgaacatgtttctttgggtctgcttctggactctgaatttagttttaatgatttatgtgtctattaatttaccaatactacactgtcatgatttctttaactttacattaatttttgaaatcagatagtttcagttctctaactttgttcttcttcagtattgtgtaactgattgtagatttttgcttttttataagagctctagaatcagtttgtcaatatctacaaaacagcttcctggaattttgactgatattgtgttaactttatagattaagtttgaaagaattaacatcttaatattaagtcttctaaatcaataaatggggatatctctacatttattttgattttttcaaagagttttgtagtttttcacatatagaacccacacatattttgtcagatttatacttaagtttcactggtgcaattttatgtgatactattttttttaaatttcaaatccatttgtttattgctagtaaaaggaaagcaattggcttttatatattaaccttttgttcggggaccttgctataatcactgatttattccaggagggtttcttgttgattctttgagatattctgcacacataatcatatgtatgaataaagcttttttttctttttccccactttgtatgcattttatttcttgtttttaccttactgcagtagttaggacttttggtacaatgttgaacagaagtagtaagagctaaatttttttccttgttccctagaggaaatgttctctttctctttaacatcatgccaattctaggatttctgtacatgttcttttcaagttgagaaagttcctctctattcctagtttgttgagagtttttatcatgaatgggtaaatcttatttttaaaaactttctttttaacttttatatttcatctcaatatgtttctaaattatgcttatttatccattttatttttatacccttagtttctaaactggtataattaagccatctggagatttttataagacttactaaatagctaggattttgcccccaggtaaaataaattactgcaatcatgtgtaataatatacagcagtttattctaagtatctctaagatttgtttggggaaaaacaattcagatagagattttgttttatacaaacatgactttcagcaagtgattactacagaaatacacatatgggatattttgacattgggattgtaaaggtcaaatgatggaaatagtctccaaataaaaaagcacagatttctccttttctaaaaagtgtttatttatccataagaaatggggtgaaagtagaatgaagatcagagttctaaccaggcttatgaattaagtagttgtgcagtcctggacaaataagatgacacctctgtggttctgttctcttatgtgtccagggaaatgacaataacacccaccaccagcaccaccctgtgctccccaccttcctcacagtattaattcaatactaagcacaacagtatgtatgaagctaccttttataattttcaagtgcaatagaaatggaagatactaatattattagaagtgcaagttagggagaagatgttctgagatcctctcatcaggtttttatacataaagtccatcattaatgcaatttcatttcctgggatttcaaattttttgttaaactccattgctggggtgaaaatcttgcagtgtaatcaagacattaaaaactgaagttttcaactatatcaccaatttaaaatttggcctgatcatggcagcatgcaaatgcagttgttgtatcatttggtcttatttgatctacttcttcatcattcaaatgaggtgactggtcatttaaggggattcatggcagtggatttcaatcagaaggtcaaaacaattacctgttttaaatgttatggaaataaccagcttcaactttccccacctgcagaagacgtttgacacagcaagttgtttgtagagtcagttattcttttacatagctgacactgagctccagctatgtgctgggtgggacaaggtccctttggtacacaatagcatagaatacaactcagcaataaaaaggaatgaaccactgcatggaataacctggatgaacctcaaggaaattatgccaaatgaaaatagccaatctcaaaggattgattcttagtgattttatttatggaacattcatgaaataacataattatggagctggagaatgggtttgtagttgccaggggttagggatcatagtggaagggatagaagtggtgactataaagatgtcagtcacatgacagagtcatgtgatgatggtacaattaagtgtcttgattgtagtagtgtttacatgaggctaaacatgtgataaagttgtatagccctatatatacacacacatacatgcatgtataactgctgaaacctgaataagctctacagattgtagcagtgtccatttcttggtttttatattgtattacagttgtgcatgacactaatgttggtaaagagtggaggaagggtgcatgagactttcctgtgcatttctttgcaacatactgtgaatctataattatttcaagatattgataatcttgtcaaaaaagataagttcactgctctccaggagctaaaagtcaggcatccctgatctccccagcccacaggaaacagtaggttccagtcatagaaatgccccaaatttcaaaccctctagcctgactttcttagggactcgccctgttgtttctaggtactttcaaggattcctcacacacgttgccttcttcttcctcaatctacattgcctgttgtgataccacttcccagttctcagagctgtctgagaacgccaactctgtcttcaatatcatcatccctcaagagcttagaccttgcccatggaactaccagaaggatatagaggcatatgccagtcttttccatcccttttcacacttcacacctttagatatccaatcaacagccttctcacagaccatgtcctctgaggcaaaccagcacattaaatactcccccagttccaccatgtcactaactgtacctggtttccagaagtccttttgagatctgaaagaaatgataataccctccgagcaaggcaaaaacaaagtactccaccagaatgcctaaatcagggaaggttcccaagaaggtggtgcttgactgggacttcaagatacaggagaaactctctagatagaaaggaagcaagaaggaactccaggcaaagggcaccagtgtgcaaaggcactgagagagcacatttagccaaggaagagaggtgggtcattattggagtgttgttggagagggccaggtggggaagatgtgaattggaccacagggctgctgattttcaaagtccatgtcctccatggcgccatgtgataagtatcatagccagacacaactatataagaaccactgcactctgtcacactaagggcttacactcatcctgagacacctggaactccacctgcctggcttagcaggccctctgcagcagtgctgcatctgtgagatgattgaggaaggctaagatggggccacttaagctccaatgtgttcacagattgtccttaagctaaagacatgtgtatgtgtgcatcgtcagcttctcctcttagctttgcatcagtttctgccatagacccatgcttttattttcgcactacccaaaattgtgaggcagagtagcaggcaaacatggtgttacagaagaaatagcgaacttggagtcacacaatctcagtatgaaccaaagctctacatcccttacaagctacatgaatttagacaagttcattttgtagagctttagtttacccacctataaaatagggataagaatgtaccaaaccgaactagattagattaaattgagttaaatgaagacatgtatatgaaaatgcctttcaaggtccttagcacctaagacataggtacttgttttttaaaacgttgccttctttttctaatggtagttcccctcccttgtttaagatccaagatttttttttttttttttttttttgagatgagttttgctcttgttgcccagactggagtgcaatggcgcaatctcggctcacaacaacctctgccacccgggttcaagcgattctcctgcctcagcctcctgagtagctgggattacaggcatgcatcactatgcccagctaagtttgtatttttagtagagacggggtttctccatgttggtcaggttggtctcgaactcccaacctcaggcaatctgcccgcctcggcctcccaaagtgctaggattacaagtatgagccaccgcacccagcctaagatccaagattcttatgttttctctccttgccttttgtacttagaatcctctgaaagcaaactcctgagacaatgattccagtgccattcatttctttggcaggggaaataaacatctgtaagggggatgcaaattcagtccaggaaggaaaggcagtcaatgaaggggaaaatatcaagctagctacctctatgggccactgatgtgcaatcccaccagggcagccctgggagccagtgtaggagaatggctcaaagagagtggaggtatctattcattcactggttagggtgctcctggatcagtgttagtggcacttccgttctgccaacccagccacagagccggttctgggggcctgagaaagccctcaggcaagacagaccagtgctcacagcaggcagttggaggctgtactctgactgaggtggggagggagagcatatgggtgaggcacagcatgaaagggtctgcgaaacatatgtgtccaaaaagcctcatgtgcctattaccttttaatggaataaaaagtattaggcatttaacaaatctgatagaatgtctagtgctgcttgaagggggacaggagttttttgtggtcctcctggaatcacataatgagggcacatatttttttccgcttagaagtaaggcagaccctcgcgtctcacatccatctgcatacagttacctgcatccatggttatcaagagaaacgtctcatctgaacacaagaaaatgtagcttggaacaaaaaaggtgacagtgtccagagaagtgggcctgagaacatttatttcctgaggctatctgtgtccctgcctagatgatagtcctggagagatagtttgaagatcacagagaaatcaaacagctgtaggggagagcccaaggttcatttcaatctgtgctgggcagtggactcttaaggactctggaaacaggcaaatatctgacaatggctcaacctccatgacaaaggttttgatgaatcatcagcacattaatttgtttcctctacattataagcttggtttaactgccagcttcattttggcccaaacttagtataatttagctatgccagccagaaaagaacagactgaacctctcagggacaaagggcatctgtttctctgacttataggaagataaaagggaaacagctgtggggccagagatgttgatgttgtagtccagggaaagcatgacactcactgtaaagaagtaagaacctgctattgtaagcgaggctgaaacaatcctttccgaccagcaggtctgagaattagttaggactacagaagacagggtgatggaagcattctctggcatcaatctcccaagccacagctctggatagtaagttaatagtgtgtcgtgctgttaatgaacttggtctgttcctggtgacagaattcattaaagaacatttatcctccactcaataaggagaaaaatgacttcaataaaatctatgccagctctacagataaatcgtctttattaaaaaagcattttcaatagtaaacttcattatacagccacataattgatctcttgaatcaacttctccatatatagtattgttggataaatgctaagaagctttaagaaaaataagtatgatcttatagctatactgtaattgaaaatagatgcaataaaaaagacagctatgaagtatgtttatatgttgattctgctacatcaatttataatctatccagttctaacttaagtctcagcttgcctgctgctggacctctctggtttgcacgtctgctaatgccagttgtaaggataaatatgcttcctagcctgtcagaaagaccactgcacaggctgcaaccctttataagacacaaagttctccttccaaattaaaaaaacaaacaaataaataataaaataaagggagaaaattcctattagacagatgaagttcattacctgtgtgcttttttccatatttctctttttaattctagacatacactatggacaaaatttgcagacgaaaataaatgagaaaaagagtttagttgctttctactagaatttagcaatgtcttgtgattactcgcctgtttccagagccttaacagagtgcactagaatcataataacctgagttaaaatcctaagtccaccacttataagcttaaaaaagttatttaaattatctgaacccaagttttatcatctataaaatgcaaatgagaaaggctaccccatagtgttttgttgattaaatgagaatacatgttatttacctatagcacattaagtacttaataatagttaagtaggcttcccttcatgatttttggataaccaaggcagttttatttatttattcatcaaacctttactgaaaatccatcatggtccagcagtaatgttttaggttgctgggatatagaaaagagcaacgtggacacgattctggacatactaaaatatagtaggacatataatcgtagaacaaatatttgctaacaattcatgaaaaataaaggtctcattttaagtcaaatgattacagatggttattactttcaaacatgagaatatcagtaatgttttgatataattatatataaataattaatttcatttatacagtacatattgtcttttcttttttcttctgacttcaagtgcacaacactgaattaatcacatttcttagctcatgacacactctcatcaagtgcatgcagagccctatttttccctttgttccttaccaacactcttattctttgcaccataggtatctacactaaagaatttaatattctactttcacacattcattcagagctctatgtattcttgaaatatatgttcccatatatgatatacacaaaaatattatgtcataaataagttgttttaccaggcacaatggctcacgcatgtaatcccaacactttgggaaactgaggcaagaggatcacctgaggccagtagttcaagaccatcctgggcaacatagcaagaccctatctctacaaaaaaattaaaacattagccaaatgtggcagcatgcacctgtagtgccaactacttgtgagcctgagggggaagattacttgagcccaggagttcaaggcagcacgctgtgagctatgatcatgccactttaccccagtctgaactacagagtcagagtctgtctcttaaaaacaaaacaaaacaaaacaaaaacataaaaaataagtcatttctttgttctcttaacacttcttgagtgaaccattctgtttttatgtaaacctaacttgtattccatggaatgcatagattgcattttacttatctgttagcctagctggacattcaatttgctttctttccttgctgccgtaacaaataaacatcaactccatataagtctgttaaagattttttggtttatagacatatctaggcaccaggatttgcatatttaatgtcacttatagtttgctgcctcattttccaattccccatgtccttggcaaagcatggcattatttggtgtgctaatatatgttatttgatggatgtggagtggtatttcattgttttttgaatttgcacttctctaataagtgtgatgttgcttatatcttaatgtcattattcatcatagacataggtagctcattctctaaattgcctaatcatggtattgcccatttttcctaggtttcctgccatttcttacagatttgtaattccctatatgatttagatgttagtttcctttatctgctttacattttgtaagtaacttgtcttagtttttcatcttctgataatttttcctgtgttctctttcattgaatataatttttgtttggatgtaaatcagttcatcatctttgctctttatgttttaagctcttttagtcttgttcaataaattcttctccacataaaaactagagatactcataaacatcaccttctattcttttcatatttttactattcttgtttagaagttatttcaattagaagctttttgcatattatgtgaggtagggatccagctttatttttttccatatactgcaacagttctcccaacatcatctatagaattttttttcctctttggtagaattcggctgtgaacctgtctagtcctgggcttttttttttggttggtaggctattaattactgcctcaattttagaatttgttattagtctattcagggatttgactgttcctggtttagtcttgggagggtgtatgtgtccaagaatgtatccatttcttctagattttctagtttatttgagtagaggtgtttatagtattctctgatggtagtttgtatttctgtgggatcagtgatgatatcccctttatcattttttatttgtatctatctgactcttctctcttttcttcattagtctggctagcagtctattttgttaatcatttaaaaaaaacagctcctggattcattgacttttttctccttcagttctgctctgagcttagttatttcttgtcttctgctagcttttaaatttctttgctcttgtttctctagttattttaattgtgatgttagggtattgatcttagatctttcccgctttctcctgtgggcatttagcgctataaatttccctctaaatgctgctttagctgtgtaccagggattcttgtacattgtgtctttgttctcattggtttcaaagaacttatttatttctgccttaatttcattatttacccagtagtcattcaggagtagcttgttcagtttccatgtagttgtatggttttgagtgagtttcttaatcctgagttctaatttgattgcactgtggtctgagagactgtttgttatgatttccattcttttgcatttgctgaggagtgttttgctcccaattatgtggtcaattttagaataagtgtgatgtggtgctgagaaaaatgtatattctgttactttggggtggagagttctgtagatgtctattaggtccgcttgatcctgagtttaagtcttcaatatccttgttaattttctgtctcgatgatctgtctaatattgacagtggggtgttaaagtctcctactattattatgtgggagtctacgtctttttgtaggtgtctaagatcttgctttatgaatctgggtactccttctgaactacagggacttctccctcactcatttcatgaggccagcatcatcctgataccaaaacctggcagagacacaacaacaaaaaaaaatttcaggccaatatccctgatgaacattgatgcgaaaatcctcaataaaatactggcaaaccgaatccagcagcacatcaaaaagaatatccaccgtgatcacgttgctttcatccataggatgcaaggctgattcaacataggcatatcaatatacgtaatccatcacataaacagaaccaatggcaaaaaccacacgattatctcaatagatgcagaaaaggcctttgataaaatttaacaccgcttcatgctaaaaactctcaataaactaggtattgatggaacgtatctcaaaattataagagctatttatgaaaaacccacagccaatatcatattgaatgggcaagagctggaagcattccctttgaaaaacagatcaagacaacgatgccctctctcaccactcctattcaacatagtattggaagttctggcagggcaatcaggcaagagaaagaaacaaagggcattcaaataggaagagaggaagtcaaatggtctctgtttgaagatgacatgattgtatatttggaaaaccccatcgtctcatcccaaaatctccttaagctgataagcaacttcagcaacatctcaggataaaaatcaacgtctcaggatacaaaatcaatgtgcaaaaatcacaagcattcctattcaccaaacagagagccaaatcatgagtgaactcccattcacaattgccacaaagagaataaaatacctagaaatacaacttacaagggatgtgaaggacctcttcaaggacaactacaaagcactgctcaaggaaataagagaggacacaaacaaatggaaaaacattccatgttcatggataggaagaatcaatatagttaaaatggccatactgcccaaaggaatttatagattcaatgctatccccatcgagctaccattgactttcttcacagaattagaaaaaaactgctttaaagttcatatggaaccaaaaaatagcccatatagccaagacaatcctaagcaaaaagaacaaagctggaggcatcaagctacctgacttcaaactatactacaaggctacagtaaccaaaacagcatggtactggtaccaaaacagataaatagaacaatggaaaagaacagaggcctcagaaataatgccacacatctacaaccatctgatctttgacaaacctgagaaaaacaagcaatggggaaagaattccctatttaataaacagtgttgggaaaactggctagccatatgcagaaagctgaaactggatcccttccttacaccttatacaaaagttaactcaagatggattaaagacttaaacatcagaccttaaaccataaaaaccctagaagaaaacctagacaataccattcaggacataggcatgggcaaagacttcatgactaaaacaccaaaagcaatggcaacaaaatccaaaattgacaaatgggatctaaataaactaaagaacttctgcacagcaaaagaaactgtcgtcagagtgaacaggtaacctgcagaatgggagaaaatttttatctatctatctatctgacaaagagctattatccagaatctacaaggaacttaaacgaatttacatgaaaaaaacaaacaaccccatcaaaaagtgggagttgaacaatgagaacacatggacacagggaggggatcattgcacactgggacctgtcgaggttgggtggctaggggagggatagcattaggagaaatacctaatgtaggtgacaggttgatgggtgcagcaaaccatcatggcatgtgtatacctatgtaaaaaacctgcacgttctgcacatgtaccccagaacttgaagtattaaaaaaaaaatcatgtatttttttctccagtgatttgtgaagctatttttaacacacatctatgatactgtaatatgttttaatgtttaaatttaattaatttaataatgttacgtatttaatattgtaaggtaatttcccctctttgctcctttttttttctttcttagctatttctggacctctagttctctatatacttttttttttttttgagacaagagttttgctcttgtcgcccaggctggagtgcaatggtgcaatctcagctgactgcaacctcttcctcctgggttcaagtgattctcctgccacagcctcccgtgttgctgggattacaagcatgtgccaccacgcctggccattttttttgtatttaatagtgacgaggtttcaccatgttggtcaggctggtctcaaactcctgaccccaggtgatccacctgcctcggcctcccaaagtgctgagattacaggcgtgagccactgctcccagtcctctatatactgttttaagtcaacttattaagattaccctaaaatttttgctggtattttaattaaatttatatccataaattaattgatatattaatttaagaattattaacacctttacaacatcatcttatccatatactaatgctatcacttcatttattcaggtatcttttatattctttagtaggatcttatactttctccataatggtcctatggattctttgttaaggtaatttctatgtagatagtttatattcatagcctttggataatatcatattttctatctgatttttgctaatataaaaatactaagttaatttaaacttgctaaacattcatattagtttttatagtttattcatgaattcttttttatgtttgatgtaaataattatgtcattttcaaataataacaattctgtctcttcccttctaattcttattctttatttattttcttatagcatagaaaggatactatgtactgtaccaaatagtagtaaagattgtggccatccttgttttgtgtctgaccttaaagtatctccattaagtacgatgtttgctctagccttttgatatgtagcttctatagagttaaacaaggcctggccctccaggaaatttttagaaaccataaatcttcatcaagtgtttttgatattctttaactaaagtaacaattgatataattaaataattttttctctattaatgaattgaattacattaatatattattaatatcaaattgtctttatgtttttaagattgaatcatgcttaattataattttcataaaatatactgtaaaatttggctagctgagattttacttgcaacatctgcaccaataaccatcattgaaattggcctataattttcatatgtgtgctgagtttatgtgtccctcatctcagtattacactggcctcatgaaatgagttagaaaatcttccctttttttactactttctgaaaactctttcataagatgaaaactaccatttcttgcaagtttgagtcagatcatctgtgtaatgggctgaacctagaagctttaggttatagatctagctaagtctcttcttgcaccaattttagcacttttcacagttccagaaatttgtccattttattcaaacttattggcatgcagtgttttacatgattattcttattatattataaacttattttatatctgtgactatttcccttatttcattctgggttttatgtattttcatttatttttaaaaattagccttgccatacgttgattcttcttgtttgtcttttcaacgaaggagattttggtttcatttatgcatatttataaatactttaaactgaagggtagtaaaagcatctcatgtcaacatatgagggacatagataaaataatatttacaggaaaatttacagctttgaatacatttatcacaaaacaaagatgaccaaaaatttgagctgaacattcaactcaaaggataaatagagcaaacccaaagaaatgaggaagaaaataataaaattaatggcaaaaatgaatgagatcgaaaaccacaacaaaaattggtcaaaactgacaatttatacttttcaaagaacttttacatacatgttatctcttgaggcatagccttgaattatattccaatacttagactttttttaaaaaagatgggatttttatgtgtttgcttttggtttttgttttttaagtgtagagagtttttggtaaggaaaacacaagaggcgaggacattttgaggtgaagacattttgactagcaaaacgtaaggtggagctgtattgttcttattgaaaaatggtatcacatacttgtttaagggagtaagctctacggtcagcctgaataggttcaagttttggctcctctgcttatttgctgtgttatctcaggctgtctaagcctcagttttctcatttgtaacatggagattatagtggtttctacctcagagagcagtcatgagaattaaatgagatcaaataaggttagtggtttctacctcagagagcagtcatgagaattaaatgagatcaaataaggtatataacatgcttagtgtaaagttcagtaaatattagctctccctctctctctctctctctctctctctctctctctctctctctctctctatctctatttctctgggacttagtgaaatgaattacatttaaatacacctttccatgtccaagaaaagaaaatcttgcacaaactaggaatggtacttcagtattaattttaattctctcaaaaatgtaagataattattgtattatgtgttagtaagagtttacccaaattcagatttaaagtagtataaggcagtttcaaatcacaggtgaaaaatttagtgacaaaaagctgatgtagaatgatctctgggttctacctataagaagtagataaaggaattggaaataaaacatcacagctgtagcccagatggagtgctgagaaatgaaaagagaaagcttttagggtaactggtaagaattaaacacccacaaggacagtaaagatccccccttggttgatttgcctttgagctttcccaatcttttctaaagaatattctccaaaaacgacaaaacaaaacggagagaaaatgcaaggaaagagttagccctgtagaaagggcgacagtgctgtggtttactggtctgaagagtgaggttttcagaggccaggaacgcccaggtcctgggctctgggcagcaccagcagagaaggccctacctgccacacttctaagcagacaaattggtcttctgaggatttccccaaagcctgatgcatgaaagttattcatataaaagtaggagcttcccagacttcctgaattcacaacctctcatcagaatttacttttatcacagggaaaacaagagatctgtatcacagtaactatcagccttcttttaccggggatggaacagcaatgaaaccaagtgggactcatgtattctccataaaggaggcccacaaaaggccttttctcctttagtaaaaggaaatattatttcctttttgaaagtggcaacaattgtctcataaccagacatgtaattaagacgtaaacatgatagaaaacaggcttacctatcaatatgacctaggaagtactgagtgggacctcaattatattacattaatgtaaatgaaaatgtatatttaatttcttctgagatatcttcacagtctagtaaatgcaaatagaattatttctgacaactgaaataattcccaaataagtcccaaaacgattctccaggaacaggcaagctttctttcactagctagcaggcattcatgctaacaaacactgaattcaaatgatattcctataaagtagaaattatcacctgagaattcttcttgaataatgatattatagcatatgtcagaaatgtgttaatcagtgtaatagcaaaggtaacagggtgttcttgcaaccagctaaagaaatgctgtgctcaggctgggtgcggtggctcacgttcataatcccagaactttgggaggctgaggcaggcagatcacccgaggtcaggagtttgagaccagtctggacaacaaggtgaaaccccgtctctactgaaaatacaaaaattagccgggtgtggcggtgggtgcctgtaatcccagctactcaggaggctgaggcaggagaatcgcttgaaccgggagatggaggttgcagtgagccgagatcgcgccactgccctacagtcttatcaacaaaacgagactctgtctcaaaaaaataaataaataaaggaatgctgtactcattttgacctatatcctaagtctcacctgtgaagtttaaacagcacatattaccacgattaaaacatgtgtttgttggggcggggtaggggggtggtaaaggagacaagtaggagcagctgaagttaaaaaaagaaaaaattcactcagtcaaacccaaatgcagggtgtgaccttcagggtttttattgattgagcacctactatgctggccctccgccacttgcctgctagatgctctctgtctctcagtacctcagttgttattacattcctgcaaaatgagggaaatagggttcccaggttgtctaaatctacacagctagtaagtagcagaggcaatattaaacctcaatctgactccagaacccatatgttttccctgctgctacgatccccacaaaagaggtcctgcaccacacaggatagctctgagttcatttcttcaggctgctggtgttctctcctaattgttttgaattctttgaaagatatctcaaggttctctttcattgctgattcttagtcactccagcctggagttgagagctcttgctctcagcataaggctcagcctttgaagctggactgacctgggaacaaactccacctctaaacctatgtgaccttgttcaagctatgccatctctctaaatcttgggttttcacctgtaaaataaggatagttacacctacctcaaacgagaccctttcaaaatgaggtgatgttacatagcaagcttaccatcaatggataaaagctatcctcatgtctgtggtctgtaatcagttatggttttgctctataatgagtgttttgtaccacactgtcttagcctgttttctattgctataacagaatacctgaaactggataacttataatgaaaagaagtttatttggctgatggttctagaggctgggaagttcaagacctggaggctacatctggtgagggcctcatgctgtgtcataacatggcagatggcatcacatggaaggagcatgttcaaaagagaacaaacacaagaggcagcctcactttataataacccactttcatggtaactaatccagtgccacaaaaactaactcaatcccacacaaagaaagcaatgcatcctaatgacctaattgcttcttaaatgaaccacctcccaacactgccacattgggaatcaagtgtcaacacaagttttcatggggacaaaccatcttttaaccatggcacttactccctcaagtatctgactttgatccagtcctattttgccattacttctgtcttggtattggcactttagaatcccatccagcttaaatgcatggaatgagtccagggaagagaaataaggaaaggaagtgatgacaaagacatagatgatgagagggaagagacagccatcattggctctgaaacttaagatcttgtcaaaataatgccatttttttcataccagttgtcaaacttccaaagtatgcactttaagaaacaggtatccctcataataacaagtccagtaagctgctagtgttttcatcattgagaaattgaagtcaaaaccatctgttcatgaaagttaaatgaatcttcattatttaatcaagataaggttatctcttcttagtagtacttcctcccttttctctagcacccacattttacgctgtcaggaaagctcatggtactaattactccaagaagctttttcttacccctgcactgatccctctcttcctttactttttctttcctctgaactaagatatctgtgtcacactctcctgtgtcactataaaagatgaattttttctgattaattaatgtggggatggttgccttccaatctagacagaatgcatgccagccaatgaacagaaagcccagagggccatgccttctgctttctttacttcatccagactcctctagctagtaccatatcatgactataatatattactcagtaaatgatgctcaaaataataatacacatgaaggactgctcagattattacatcaaaagcctacagaatgctcagaatgttatcttcctgaattaggataatctcattaagtctggcatgcacagtgctgagtgaacatgaatgacatacttgagagacagctcccaccccatcagattattaagaataccaggttatctcttcaggcaaatgcctgagcttgggcctcaacagaaagccaatagtaaagtgaacgggctctcagaagatgcacatttccttctggcctctactctggctaaaggagctttcgcaaagcaatcggctaaggatattttcaacatttcaaatagcaaagtcagctcatgcatgaagcagtcactatggaattctatgcatgtctccagaatggaggccagatccgatatgacaactgccaggtgaaaatcacagaagcattatattatgcaatttgatttcaagccagaatgttctgcatcctcaggtttccagccagacaaaacatttgtgaagaacaaatccacacttagacatagaagcccctcatatttaaacttttgtattaatattgtgaagctggagagttaaagccttcaacaagttctttaaaaccataattttaaaagttcaattttctccagatagtgatattagtcaactttgatgtcaatttcatagaatcttaaaatgttggtgttagaatatccatgatatattttctggtacaattacctctgtttacagataaagaaataaaaacttagaagggtacatgattatctcaagttcactcagctaacatcaaagccaagacatggccccagatttggtcaatttctgcactgtacagcttggcttctgtgcagcctctgatatataatgcaagccacatgggcttcatgagcaagctacttaacatctcttaaaataaaatgaataactcctatttcatatgaaagttatgttaattaaatgagatagtgtgtgtagcacatggcccattatagttccttataaatggtagcttttgctatgatcattatcattactattattattattattatccaatctgcagtctaagccccacacagtttcccacctaatcacagacatcctggctttgtttttaagagaccactttccatcagcaaatggaaaatggtgttgaagttggagttttcacaataggctgacttcccaataggcctaagatgagccctgagtgctagtctctatatcaagcgtcagccattccttctatcctgcagcatgagagcctcatagccaagcaaaaggagcataaattttgaatcacacagtcctgtatctgaatccatttctgctacttattacttgattgccctttgattaattacttaattttattgagcaacagttgtctcatctcttagtatttacattgcagagtttgcagaggatattaaataagaaaacgtatgcaaaataccaattacagcaccagacaatggtaggcattcaactgaaaatagtcattatttttattattacgaatattccctatctgtgtgataaggcttttgtctcagattctgagatattaccatcaggactagaactctgccatgaagcccaacccacttggctgggactgagttctcactggggccccttcccaagaaggaccacctggaaccaggaaacaactacccacttgaccctgagcatcacaataacttagaaattccagccatgtctctcagagctgacaagaccctctttgcttagcccatgccctggtaacagttattttattatctactctgtggcaggttatatgttaaatatctttcatacataatcactaatcttccaagggaatccaagagttggtttggtgaatgttattttacagttgagcaaactaagactcggagaggttaaaatgacttgctcagggtcacagagctggtaaagggcagggtcaagacttcaaatcctgcacacttgtcaccaggtcctattgcttcatatacacagggcctgacactgacagttattcccagcattttcttcctacatggtgatctagtgggatccaataaaataacctgattcttcagacagatccttctatgtccctctagcagcattatattgccccttcatgatgttacaaaccttcagtgttttttatatatacacatacatatatatatattattattatattttaagttctgggatacatgcgcagaacgtgcagatttgttacataggtatacacgtgtcatggtggtttgctgcacccatcaacccgtcatctacattaggtatttctcctaatgctgtccctcccctagccccccaccctccgacaggccccagtgtgtgatgttcccctccctgtgtccatgtgttctcattgttcagcacccacttatgagtgagaacatgcagtgtctggttttctgttcctgtgttagtttgttgagcatgatggtttccagctttatccatgttcctgcaaaggacatgaactcttccttttttatggctgcatagtatttcatggtgtacatgtgccacattttctttatctagtctacattgatgggcatcttggttggttctaagtctttgctattgtgaatagtgctgcaataaacattttttttaataaagagacagacactaaacagctttgtgagctatacagtctctcttgcggtcactctactctgccactgtagtgcacagatatagacagtagataaacaaatgatcctggctgtgttccagtaaaacttttttgcaaagccaggcagttggctgaatttgacccatgggctacagtttaccaacccctgatcattatgcttgctactcaaagtgtggtccatgcaccagcagcattagaattacttggaagcttgccggaaatgcagaatcttggatcccgccccaaatctactgaatcagaatcagacttttaacaagattctccagaagagtcatacacacattgaagtgtgagaagctctgctctacatgtctttaattcattgaatgcctcttatagtccaagcattcttacagggacaatacacactactagatctatagtcctcacaacaggataaggtggctgttattatcccattttacagatgaggaaacaaaagctcagagaaattagatgaatcaaggagacaatagatggcattgaaatttaactagaaattaaacaatctgctatgatattcatctcagaaatggtatgactaaggccacacagaatattccataggtactaactctagatgtgaataaatattgttttcacaattataagcacaggtgtttatatgctaaagtattgaaattatcgcatagccacagaaataaatttttattctcaaagataatcctaaaagtagaataccctttgctaaactgttttctttgcaatttctcttcacaagttctcatttactcagctttatccaacatcaaaaactattcaaggagccatgtcattacttgggcaatatttatataaattttatagtctttttctaatgcctcaaaaaagttttgaaaaacgatttgaggtagcttagagacacataaaatgcaagataaatatgatgtaaacaatgatacagatcattttgggttataaaatatgaccaaggatgaagactatatacaaaattcacaccattatggtcttataccttttctgtggtataaaaaggacaagagcttgtatcatctattacatggtgcaaagagcccaggcttagaaaacatttgcttgtcaaggatatcatttaatttccacttgttcaaatataaattgtggataataatatctcacagaggaagtgtgagtatgaaataacaaatatgaaaaaattacactatttcactactaatttaatgatttttaattataataattcctgatataaaatataattataactaatatttattcattacttatgctaagatctctaaatggattatctcactgtcttcacagcaaccccaaattactaaaattatccccatttgcacgtgataaaacaggcctaagagaagttcagtaattgggtcatccaatgtatcaggtagctactattatatacaaaaccacccagaaacacagtagcttaaaacaataattatttatttgttcccaattcttttggtcagcaatttgggctgggctcaactgagatggttcatctctgctccacgtggtgttggctaggcttacttattctgtgggagggctaggacagcagagcctctctctccgttggtccctcatcttcaaggaggctggcctaggtttcttcacttgttgccaaatgggttcccaggaaggagtaagaaagggcaagcctcagtgaataagcactctttaagcctctgcttgagtcacattaccaatgtcccaaacctagggttaatgtggagagagctcaacaagggtatacatacaataggcatgattctttgagagtcactgtagtaataagatatgttacccagaatataaaagtgttccaagtttgaactgaagaactgtaaattcatatcccatgctcttaaccatgacatcacacttgcctccaagaaaaattcccataatgttttctacatgatgtcggtttctcttttaactcttaaactgccaccttatgaaacagcaaagatattcctaatctcatctccaaatgatttctttctgacttacaaaatcccttgagtctcagggtaggcttagcaaagtacaaattgaagacagattatgttttcattccttaagtcatttgtactactagaaagattgaactttacatagctgctctctagggacctagctgataccaaaatgataccaatgcattaaaagacaacagtattacctcattttgtataacactttactattagcacagaactttcaaaatgaatataaaactcattcatctgggctttccctataggcatctggaagcttctgaagctatcttagcatggtgcaaaggagtgttttaagggtgttaaactgatgtgaaagaagtactgtagctgaaacactggtggcaagaagactaatctagagactgtggcacaagtttgaaagagttatggcaatgaaacatacaagacctcacaaaagaagaaaaactagtccttctaaccatctagaggggagggaaaagaaagagtcggggtgttcaagggttactgttctttttaatgtctttagacttggcatttttccgtttacatagcacttttacctcctgatggttagggagaacaggaatgctcatcctcattcagagaagtttcatgtggtacactgggacctgcaggaactcactgcagctagccctgtaaattgtaaatgtccacaatggaggaggagggtcaagattaaaattttaataaaagtagagaacaaatgacatgattagattggaattttagaaacatttctcagtcaacagagggaaagataggttggagaaagcagagataagagggagaacaattgagaggcttttacagtaatctgggtgaaaggctataaaaatctaagtctgaatgacagaggggatgattctaaagtcaaacaacctgggcatgcactcctctttgctacactattatatacttttttttcttttcatcaattttggctagagaatatacttgtgatggtgtaaggaggagattatgaagattggcttgtttgctctgtaaaatctataattatcagtcattctttgtacccagaggattaagaaaggcatccctgtatctgaaagattcatttttttctacatctctttttataaatctcccacagttaaaagaaaggagagacgaaggaaggaagaatgggaagaaggaagaaaggaagggagagaaggagggaggaagggaaaaatttcattttcacgtaaataatggcatccttcttaaagaaaataaaaaagtagcattagatgaagttctattgacataattataatcatacagtgaagtcctaaagagatatattgtgaagataatttttcttgtcacaaaggacgatctatacaaaagaacaaaggaaataattttaataaaacattttgccctgagcaagaaatgtgcttcatgtatcatacatgagaaaggatagttgtttgatataaaatggaactgtgaccttgctataagagtttttattacttgatgccactgaaagtaaattaatggactcccaaaaggtgtaaaattcattctgctttgtggcatttgtttgctgacagacaagtttaagaggaatcttttcatgtgattatttaaacaaagagcttctaggaattctgatcaacctttaaggttccaccagaggacatttctcatagacaggattcatttgagagagaagtcacacttttaaaagagtttattaacaagagaagagaggttcatgtgctatctgtaatttcaacaatttttgctttcaaatataattttgttttcttttagatttctctaaacaaattcaacattgtttaaaaaatgataaactttttaaaaatactgagctggcaacccagcaaataaactgttttttttaaaggtttttactccatcaagtctgaagtccttacgtaacattttattacatagtgtttctttatagtgtttcaaaaccacatatatttataactgcttaatttatctttacaagctactttgcactatacaaattgcctttatgcctctttagttgttttcaatgactttgagattaggcataacaaatattggtattataatctgacatatgagcaagtttatcctcagagaatctgtcacctgcttaatatcaggaactgctctgatggttggcaatagagcagcacacaagacaggcaaagtttctatcctcgtacagtttatcttccagaatgagatactcacgaatgtgtgaacaaataaatatgtaatataatgccaggagaataataaatggtgatactaagaccatacaagtgaccagtctcaaatctcagaactattcctagcaacttttcatcagcacaaatcctgccaagtggggttgtccaagaatagcatccccgttaagcctttctattacgcctccagctaatgctgataagtatgtatgatgtggctttactggtcacatgaggcaactttggaggcctctacactttagctctacttgtctattcaatgtagatgtgtgtgtgtcattggagagcagcagaccagggaagtaggtgtaaatgttctgaaaaggttacttaaaacatggtttgtgaacacttaagagcatgacatttactagacaccagcatggttcactgagaacaagtaagatcagcagatcaacactacttacatttgcaagagggtcatgaaagagatagatgaagacaatgcaatagaaatactgtgtctaaattttaagggccacctcaaatcattttttagggatcagtttagtgataagcatgtaaaaaatccatgaatacacttggtaaaataaacacataacaaaacatctttgtagaggcatgtgacctgcatggtaatatagttagttgaatttaaaattaatgaaataaacctaccaaaaattgtagctattgccaatccagaggaagggtgtacaatgaaaggcctcgatccttgattctgcgtggtgttttctaaaattatttaaatcagtatgtcaacaaaatgctgataaaactcgcatatgaaataaaggccaagagggaaagcttgcatgttgaaaatcttatttcacttctaagtagagtctgtcatttaattccaaaaagatctgttaaatgcccaccatgaacaaggcactgtgaaaaatgccaaggcaaggaatagctcctgctctccagcgtttcctgtgagcagccattgctgtcccaattaccaccctgttaacaacttaattgtatccccccatccaaagttcatacaacaaagtcctaacttgcagtaccttagaatgtgattgagcagggatttgtcccaggaccccctacagatacgaaactcttcagatgttcaagttccttacataaaatgatgtagtatttgcacataacctacacaagttttcccagatattttaaatcaccactagattacttataatacttaatacaatgtaaatgctacataaatggtttttcattgtattctttttgatttgtattgtttttattgttatatttattttatttttttcaaacatttttaatccatggacatggggggtcaagtgtacttagagtcacgaaagaagtaactaagttaaaatgaggttattaggataggcctattccaatctgattggtatccttataaaaagaggaaattaagacacagacacacagagaagaccatgtgctattgtttgaatgtgtcccctccaaagtttagatggggccaatgtgatagtcaaggcctaggaagtcaaggcctttaagaagtaagtaggctataaggattccttcctcatgaaaggggttatgaccctcataaaaaaggcttcacacatcatttagctcactttcccttctaccttccaccttgtgaggacacaccaagaaggccctcccaagacgccaaatgctgatgccttgatcttagacttcccagcctctacaaccgtgagaaatcacattttcatttcttataaactactcaggcattttgttgtagcagcacaaaacagactaagacaccatatgaggacacagtgagaaggtggcctcaatttacagccaaaaaaaagaggctttagaagaaaccaatcctgctgacaccttgatcttggatttccagcctctggaatgttcaaaacaattaatttctgctgtttagcctggcagacctagtaaactaatacaacccacctctcccatcaaacctctaccatccaggactctgccccctaaagccccactcttgagtatcggctttcctgtccaaacttctatttcttcccctacctcagggtttctggttggccaaggctgacagacaaacagtccacagtgggtggttggctgggggcgaataattactgtgaggatggtcctctcttgcccccatgagtttttaagcagagggagtacgtatctctttttacataaaaacaatattatacatggatcagtcatgctgggttaaacttacttataaacatccagaagagaactcattaataagacaaagatccttctttgaatttgcaagctcagttgtctattcacccacggaacatgtatttgctgagccactgctctgcggcaagccctctgctagtccttttcacatttatcacttcataggaggaagtggggttatgtcaagaggaggtaaggagacgggggtgagcagagccttccaggaaataggaagcttttgctcagagggtccaaggcacagaagggtccacaatattttcagagaagataaagaagtttgctgtggcttaagtgtgtattgaatacaggagccaagagataaatttgggtggagtgtaagagctttttctgcgatattgaggagttgtggaccccaagctgtacacaatggagactgtgaaatttttcaggacatgaaacgtaggatcatctttaaaattataaccctagcaggaagtgaggttagatagaggtaggaaaaaagaaatgtcagggggctgagcttggaagctctttaaagtcatgaagtaatgaatctcttccctacgaggtcctaaagttacggatctgtgcatcgatctaatagtattgctacagtgtgtaaaactgaatcacaactgctacttatgtatgtgtgggcattgtgtacttgtgggcaggtccaaatgtaattccattcatcagcaccaaaaataaagctatgattacttataatgacttactgcaattgtccatatcttctgttctttaatagcaagtgattataacattaaatggtttatctattactacttttaaaaaaatacttaagactttataaaatggcacatttctatgatcaaatcacagggacagacagttcatctttccttcagtaatgaagctctcatctctagaggtccaattcatccaattcataaaaagatatttacatagctcagagggttttccctgtcttctgcttcttatgagaagagagaagtaaggaaagaatataaatcaaatgtaaaattaaagccaggacaaaaataacatgaaaatcctcaatgactggtgtagtgtgtagggtgggtagtatgataggaaaaaagtaaatcacatgggctcataggaaacacctctcaaacataagtgaagatggatgggcatgtgacccacaggggaattcaggctgcttcttaatttattaatagcagctgcgaccttttactgcattcctaaaatagcttgcatgttaacagaagaggacagacaaatgaagtatatcatggcagatttcatcagtgaaaataattaaccttcaaaaaaaagaggagagaggagagaaggagaggacagagtgtagacattgcaaaggtaatacctaggaacattaaaacaggaattctaatgcaggcctagggacgtcctgggcaactgcagtgaacatgtaggggtggagtttagtcatgggaacaatactgtaattcaccaagtgttgcttgaagcctcacctaatcaacctcaccaatgtgtatgcaacacattggctaaattctaaagataattcaaaggtgaataagaggcaatccctgtcttccaggaacttatcatttaggagaaaggattatacaaatatgtcaatacctgtgatacagggcaggatatgagatacaccatgaaacataaaatcataggctctgggagccagcagtaaaaaggaaacttttggatgttttggaaaaacatcatggaaggaaccatgtgtgacatggattttaaaggaagagcagaattttagtaggtacagaagcagagggatcccctgtcccaacagtgggtagaatgtgaagcagcagcaaaccacagagataagagaaagcaagcaggaagtggatatacagccaagaaaagtttcacttttaggtgtctggagctggttttcattgattcttcttgactagaaaatacatatacatattgattgatttgcgagaaaggattcgaagttgagctttctcagtggaaagtgaaggatataaaacaggacttaccatcctcttctattaccacttattgagccagaagcatcatcactgccaataaatactaatttggcaaaggaaaagaaaacatatcaccaaaagacactcaaagcaggtttcaaatccctccttcatagcaatcctcaaggacaggacaattttttgttggtgggaagcagggctggcctgtgcactgtaggacatctagcagcacctctgggctctacccactagatatcattaacaccagtcacgacaatcaaagaacttctgcaaaggggtggggattatagaagcaaatgatattaaaacaaaagaaaattttaaaactgggagactctagaatgtctgttagtaataacaacagtaattaacacttctagtgttacgtgccagtgttctgaggtctttattgtattgatgttaagcaagttaaaaattagcagaataaacctacctaaagatgatggctcattgttcaactcctaagagggctgcacaacagaaggcctcaatccttacaaactatgtaccattattatccccattttacaggtaataaaactgaggctcaagtcattcagttcttaagttttgaatccgggctttgaaccaggtcatctgactgctggtcaaaagtcttaaccactctgctgcattgcctctcctgtgaggcagctcagtgttctttattctgctacagaggaagctgaagccgggagaggtgatgtgatttgtccaaggctactcatttgttggtgactactctgggtataaaatctaggtcttctaactcacacttcagatgtttttctgatacctagaggcctctgggaatgtacaaaagggagattgattcttcccgctggaagacgtgggtacagcagaggttggagcaagtaacaggtgacaatacaactggttctagaatagaaagaagtttcagattcaatctgattccttcattaaaagattaactcttgaaagtcaaacaccaccactgcccccctcaccaccaccccccaccccaaaacacacgtacaaacacacaggcctcaaggaaatagagaatttggttgatattggtttgaacctgcagagatctaaagaaatcgagagaatcaaaatgcctgtattgtttccaaaaacttctaggcccactgaaagaaaattgctctgattaaagtttccaattcagggataattccactaaactacaagaaaaaccacttttcagttgctttgaggttgacataagatgttttgattcaaactctcccttaattgtgtaaccttgtggcatttggaactagaaagagggtccaaacacaccactactgcccaacctctagagaggcagtctgcccacacatgacaggtgctcccatctgcctggcagagcaaatgagcagtctagactcattatctcagcccccagtgtctcagagcggcaagctctgagcttagagagaaaatacagaatacagagagaaggtgaaattgatgatccacagcacagttttctggtcagtcaaaaggttgaggggcttaacagagagcagagaaaggctgcattgcattagacagcgtgcatttcaggccacgtcaccctgctctgctgtctgtccttgcttccctgaaaacaaagagcctaagaacagttccttaagtgcacttttctgaaacagtagtttttgtgcttataaatgagtatttatcatatctatgtgctctagcttaatcaacatgtaatacaataatgtaatcattgacaacatagaggctggaactagcaacacttttcagttcgttgggtaactatggaaacagggacactgcatttcctgggctgtgcacacagagaggtgcacacctttggctaagagaactcatgaaatcttttctagtaataacattctttcatcatctctcactgggcatgttaccaaactactggagactcttggagagtcagcttcctcctaacaccctttttctctgaaggactgtagcacaggactggctgatgtggaagtctggcaccctggaaataacacaagcatgaagttttattgccttcatgattcagtatttaaaatttataaagcattttctacgttccaggactctactgatcaccttctatgtaaagccttgtcacatggattccttaccacacccctgtgaggggtgcaggaggtagtagggggtaatgtccccatcttacagacaaggaaatggccataagtgtcttttccagaagtatttagctaataagaggcagctggaattacaacctaggtctttcagacttcagaatcagtgttctcaaccactgtaagtaacaaatatctattgagcactgtgccagcctttaaggttcctatgactaatagtacatccatgtccttaaagagcttgtagttggataaagaaagcagattaaaaagatgactgctgtgtaactgatagcctagaggagataaagtttgcttatggaaatgcagcggagaggcaccgaacattcacaagggtctatgctaacactgacttcgtgacttcatacacccacagagaaatgtgcccatgaacatttgatttgaggaagctgatggtacatcctaagctaatgtcttcaatatttttactagggaagttctttaaattcgtagtgacttcagtgtctgcaagatgagacttccaaaactctggccttttcatttccaaaaccgctctcctctagtgatattgtccatcttcctatctcagccactcacttccagggtcatacctccaggcttgtcctccaaacctgcaaaacacctgtaatctaaatttgaagcatcccattttctgaccaccactttctgtatctccagttcatttgctcttacacattaccaaaaaccattgatggcccaaagagccacaactcattgatcatactattcttttattgtcccttgcctccttatttttccttctctcttacccagcttaaagtgcatacccaattatttgtatccctcccttgcatgcactctcaattctcttgcccctcttatacttcattacaatcattcagaaaaacctcaaccctagttaaattcaactctccacttaatctgtgcttgtacccttcagtttattatggctggacacaagcatacgacaatggaaggagtctcactttttattcatgtccataaacctcaagtgggcctaagggaaaatatattattaatatactttcctagtctattaccaaatgcaatattcttctattcatatctcattatttcttacgtctctggtttctattcccatatcttcactctcagctaatgaccttaattcttattttactgaaaaaaaatagaagcaaccttaagagaactccttcaagctcccaccgtcacacttacccatttaccagcatctgtgcctataaatttcaccttccctcctcttactatagatgaactgtcaggacacgtgtgggagagcaaccccttcactttgcactggagcccatgcccacccaagacagtgctccaacactgtatgattaaatttttcttctctatggaaactttaccatcagcctaaaggcagcctcaggctaattctccagtctttcaagaatcttttcttgatttcacttccctagaggaactgcctcatttttctgcttttcatttcagtaaggccctttaaggtctgcttctcattaaagtaaggtcctcatctgtaaaagcctaacaagcctctgcctacactctcaccaattctttctttccccttctttcttaaattcatttcaattagacttttgcccacatgttttaataaagtttactaaccactctaccaatcgttttaatcatgtttactaaacctctacttgttaaacgaaatatcaattcctaggcctccttttctttatatctcagaaacatttgacaccattgactctgtcccctcttcatccatcaattactttcttgccttgcttccagaatgccatgatcttctgattttttttttaccccactggccactctctttcactctcctctgttttactcctcatctcttctacctcttctcttctctttctacactcactccttggatgaccttatctagtgccatggctctaaataccttttgtaaactcacaactttttatatttctactctggactccactctagctttctactcagcatctccacttagatgtcatatatatatatatctttagcttagcatgttaagttaaatatctggttcctccaagcctatttcacctacactcatgtcttcaccattaatggtaacttagttgctcaagatgaaagtctagaagacatccttggctcctctctctctcattccctacatctaatccatcagtacatttgatagactttaccttcaaaatagatccagaatctgacaccactacttctgccacattaatccaagctacctttatctctcacatcaattatctcaggtctccctgcttctaccttccctagcaaccccatcatggtctatttccaacaaagcagtctcggtgagcctaacaggcaagccagatcatggtttcccccttcttgaaacccacctctctcataatagaagccaatgtttgcaatggcctcccagtcccatcaccatctggccaccacaatctgagctcttccactgctctccccttgcttggcccagttcagccacaatggcccccttgccattgctggaacaaactggacattgttccagaaagagggctttattctctttgcctagaatgttcttctcccagaatgccatgtggttccctctcaaattctcagcaagactttctctgaccataaaattataattgcagctcctgcacttcctattatgtcctctgctaattgttaaaatagacggcaagcttcacaaggacagaaatagtcttattgcttttaatcctcagcaccatatccagcacatggtagggattcagtaaatgtctgtaaatgttgaatgaaagataatatagttttaaaatataattttgattcatttttaattcaacctttgtcatgtcctattatacaagctattcagtatttaaaagcctaacaagcctcttaataagcatttgtgaaaagcctggtgtatttaaattactgaatagtaaacatcagccaagacttgcagaacttgatgaggtttgaaacaaaggatcttattcctctaacttgcatcaagctaagtaccagttaccgtgtttctgagggcatttcaagagagtgaggtgatgttcagtttagagggatgaactgccagctttcccgcagggctggatttctgttagtgtcagaactgctgacacacctgctcggggtggactcagggcaaaacctgatcaagggcaagcctgggtaagtaaagagtgcaagttagcatctgaccactttttccttagacattaaaaaaaaagttttcttcaataaatatgaaaaatctttgatcaatgttcacatgttttcttggaaatgcacatctaaaagtggaactatctgctcttctctagaaacttctaggggcaagagaacagaatagccataatagagatcagagtataaattagagggctgacagcatcattacaaaatgaggattggtatctaaaatgctagagccggtggctagaggagtctctggcctcctgtcagacagagagaaacatgcttcttcccaaagtttctccccctgtgcaataaccttaataatatcaaccagttctaaacaacatattctgtgttgggtctgttagatactttatcaacattatctcataattgttcaaaatacttattacccgcactctgaagatgagaatactgaggctcagaaaggttaatcagcttgcctaaaatctcccagctagtatgagatagggtcagtattcaaactcaagtatctatgaccccaagcccatgttacgcctctaatactaggctgaagctgaagctagggtttagagaaagcacccaggcctggaaaagggagtaggctggcatcatagcagtgctaaggccccagtaaagaactggaggccacccagggcataagtccagtctcagagcctggacgcacaccagagcatgagtgacaagactaactcagtgggcacgaatgataaaggcttcactccatggttagagctacagtctaatccttggcagacagagaggtgaactgactgacagacatgtggagatactgacacagatggagagggacagtgcagggctgggactgtcaggagggaccttcaccactctcctctcccctaacatccaaagtccgtcttcacatcctcctcagccatttttctcctccagctccaccattctctccaagcacaccttagtggctctacaagggagcatcctgggtttgaattttaccacctcctgcctcccaagaaggccactgagccctaagcttgagtttttttattgtcacccaggtaacgataatccataaagaggcagaaaataagccacttggaggtaaagtaacctctcacagcaaatgtccttacagtagtctttatagcctggcacacggactttaggtagcagagtcaatatacttgcatgctacacaactttctcatgttttgcctgacactcacttattcctgacctttccatactagggagagacaaacccttccatttgtttagcattttaacgttacgaaacgctttctgctgcattacctcactgagccctcactagagtgtggaaggcctaatccccgtgtcagatgaggaaatggagcctgggagaaggtgaacagaccaccctaggccataggagtggccaacctcaaacagcagtcagagcccagagccagtggtccctattctgggccctgctcgcctcaccacagcgaaagagagaatgactccacctgcaattgaagcaaagtcttcttcagcccaactttcatttcctcatggtgtaaactttgcctcagttaatataagtaaaaccagctaaaacaaaagcacttgccacaactctgggagtggaacatcaaactccccacgctgacctcagttgacagagggcttcctgactcagagatttcctcctaacctctacatatttatatctcttttcctaacgaaaacaccagacaccataaggagggtatgtacatggaggacaattttagactgtgaacaaccaaagaaatgatgaatatgggtcatgtaaaggacaagagacaagaagacatgaggagggactcacacagataagcctgggcacgtgggaagtccccacctgacgcagacagctctcttcatcgtcagccctctgtgctggcccagatgaagctcagtatccagccaccttcccctgctgccctcagctcatttgttttgtcttcccaccaggaacatgtgtttcacttcccagcctcctcctaaaacccctggcctgtcgtctgtgcaccatgtaaagagaaccagatgtcaactcaaaaatcacgaggttttcacaaattcagagagcaagctttatttcttaatgaggattacaccctgagaggtgatcattttgataggctgggaagcatagcctctaacagagaaagcaagcaagcccttcaagggggagaaggatgggacaggaatttatactgaacaggttggtcaagtatgcatattcaacaggttattggaggagctatgaatattcaggaagggggtcctaatgcacacatactaaatgatcatgtatgttacatatgacccatgctcactttggggtagagacttcgcatttaaatgcattataattagcctgtataggtcaaaagataaaagaaggacacgaaggctcccagttcacaacctctataaacgggccagaactagttcatcaccagtggtctctaattaggagaaggttgctgaaatcagtctcttgtccaatcaaaatgggagttatggcttatggaacaggagggtgagctagtcagtgtcaggggtcagtgagctgcaattgttttaacattttttatcttgagaccagtgcttccttagctgttagaggaaaaaacaaaaatggaaactgtggcagttagaacatagtttattctttaagtgagggggaagggggtggtgcatgaattaacccttgcctgacatggcctcagatcccatttataatttggaatcttattgccacaaagagcccattccctcttgcctgtgggcctaagggactttatttttattttacacaggtatataagaaattagccaaagagacataaaaataagaggaagatagaagacaggaaaactggcagtaaaattcaagcatagcagaacttgatttgtttatcttcagccttatgtgaatggctgatcaaactggagttgccttggaacacatttttgtagactgataacctcatttccgacatagtccagtacccagaacactgagaaccaccagcacatgaaaactcagatgacttcacctattggggatgctgctgtatccaaaagagaaagaacagaaagatatggaaacattttctgtattcaatgggcaaagcatgccagtgagtggtgaaggggagaccaacatgtcctagaataacgtggggagcatgtagtattctgtgggctgcaggcttcccccagtcactagcatggttatggctttctcatcacattaccgggctcaatgtaaaagagatccatagacctttcctgatcttctttctaaaataaatccttctgttattctctttcacagcactctattcgtacccttcttaacatttaattattgctataattggtttgttgttgttgttgtcattgttgttcatttatcagtttttttttgtttgtttgttttttgttttgtttttgttttttttattatactttaagttttagggtacatgtgcacattgtgcaggttagttacatatgtatatttatcagtttttttatttgttgactgggtctcccaaaagatatacactacattaacattaatcactaatgtgatattaactaagggctcaattctcaatttctcctttattttttctttttagagataggctcttggtctgtcacccaggctggagtacagtggtgcactcatggttcactgcagcctggaactcctgggctcaagtgatcatcctgcctcagccttctgagtagctgggactacaggtgcatgccaccatacccagcctatgggctctatttgtatcagtggaatgaatgaatgcgtattaaaatctttagcacaaagcctgatttttagtaggtatttcatacatccaagttttcctctcagagctttccaactgtctgttggggcttgcacatgtacatacatgattctacacaaagctcagagtgacatgctgatttagatctgcaaaagaagagctggtagtgaagattaggttcaaggaaggtcttaggtatggcagtaggggccacatgcacatttcaaggatctttggaaacaaagagaagttacacccaagttcatgtccacttgccctgtcccctttgacctctggtggtgttggttaaaataaagatgcccaaaggcctggaaagaattaacagagacattaaatttaaaaactccctagtgcaataaagcctcaccattccagagtgcctatcatttgatttttgtatatatttcccttattttttccaacaaggatttgaaagagggtgagtgaaaatgcccccattcacaaagtgctctgtcctcagaaatgtctcctaaagatacatttcagagcttttcccccaagcagttggaggacagcatagagtctgaccttggcaggtgacagtggggaagaatcggccccagactccagggttgttagtggacaactttctggagaccccaaggagctctggagcacccctctgcgcataaattagcagctgattgtttctgctccccactttcttttcttcttgaatgagactgcacacgtcttccctaatcccagtaaagttactgcaaagcctgtgggagagagataaggtgaggaagagctggggaatgcagaaggactgtgccttttcctttaatctgactctaccagcacctgcctagggaggcccagaggtctcttcagggcctgtccggctagaagcacactttttccatgtgctccagctacacttacagcttctacaacacctacctgtgctatctggaggctggttgtcactcacctgggctattctttatccaaaccttttttttctttatttccaaagatttttgtttcattattttgggaaatgaaaatgcaggaaaatcaagacacagctaaaactctttatattacattttactgaaaaaagaaatattataacccaactccaatgtgaggaatttctcattttccttcttggcttttgaagctactgaggtcatgtctctgatatcctccatcagagctctctgctggcaactgtacagatctagtctaggtgtacacaagggacaccacgctctcctggttttgctcactcctcattcaacaaccttgctcagtgtgactcattttctaaattttgtcttcctatcttctctcagcaaaatgtatcccagtaaagaaattttagacttggagtctaaagactagtagaatatgactcttaggaacggggcccccagattccctaaacagatgcccctgaagataagtgcctgaaggactgtcattgaaagcttttcaggctacctctgtgtccctgcaggataggattggggccaatcagtagaagctccaggaggcagattgtgacttttctcacagtcagagctctgagttgcctcacaagacaactcctgtcaccaagagcttgctagagcagtgattccttagcttagctgcctattaaaatcactgaaaaattttaacagatatacagatactccagactcagagaatcagactctgggagtcagaggccagaacacagaacctgtgtcagagagcatagatttcagatcatcatctcacacttactaattagagtcactgaaacctggagctgcagttttcttgttagccaaatagtataacaataccaactttacaggattgttgtaagcagtgagaattagttatgtgctcaataatttgtaatagctaattcacattcaggtgcttttgggaatgagttagaagcctgacaacatctgtggatttattaatggccccccaaaaaacaatgggcctatatctgcctaggttaataacatctaataaatgagttttcaagtcaggtatggcacttcataattcacaaggcatattaatacacattgtttcatttagactttggttcttacaacaaccatgaaaggtgggcaagataatgttatgtcaagtttacagataagaaaactgaacattagaagggttaagtaatttgtccaaggtcctactgctagttatccaaaggtccttagacaaatacgtagccggatactgtcatatcgactacctgaagctttgttgccactcaatggattcagaggcatacttcttgtcttctcaagtagacaaagaactagaaaatgtattttgtgtttcttttttccccctaccatcctgcctggcactatcttgcatacagtgggagtccactaaatgtacattattatagtggacttatggaatggtctgcggggagagcagtgctatttcatcagcataaccctcaacttgagacttaaaacttttctcaccactctcagtatccccaaggcttttggtcctaaggtttgtttaaatatcttctttcttaactgtttgcactcattttttctcaaagcctgctaatttttgtgttacagttttctaaatgttccccatccccataggtaagtccccagtacccctgccattcttctccacttccctggtcaagtggaaggacatggagtatacatgagtttgaacctgcaatcttatttcagtaggttaagtaatttgggaaatgttacttactattgctaaatgtcagtttttcatctgtgaaatacaaggaatacttacataccaaggttgttgtggagataaagagagatagtggaccagtgtgccaggcacatagtcactacacaataattgctgttggtcatctcttccctccaactgctgtcttctccttgcaaatttttctaagctgccacaatcacaagaacataatcctcaagtataatgttgattttgtcacctatttactcaaatcttctattcagcatctcctaagcaatattcctttcaagttctaagtcaacactgtccaatagaaatttgatgcatgccacaaatgtgacttgtatatgtaattttaaaatcacctaatatctacattaaagcaaagtgaaaataaatggctaattaattttgatgatttaattcaatatatctaaaatattataattttctataagaaacttaaacaattgaacaagcaaaaaaaaccctattaaaaatgggcaaaagataagaacagacacttcttaaaagaaagcatacaagtagccaacaaacatatgaaaaaatgttccacatcactaatcatcagggaaatgcaaatcaaaaccacaatgagataccatctcacatcagtcaaaatggctattactaaaaagtcaaaaaagaaaaaaaaacagatgttggcaaggctatggagaaaaggaaatgcctatacactgttggtgggaatgtaaatttgttcagccactgtagaaagtgatctcattatcaacacagtgatctcattatcaggtatgtattcaaaagaaaataaatctaccaaaaagacacatccacttgcgcattcattgcaacactattcaccatggcaaagacatggaatcaaccatggtacccatcaacagtagatggtacatatacaccatggaatactacgcaaccataaaaaagaatgaaatcgtgttctttgcagcaacatgaatgcagctagagaccattatccttagaaaattaatgcagaaacagaaaaccaaataccgcatgttctcagttgtaagtggaaactaaacattagatacttgaggacataaaaatggcagcaataaagactggggactactagatggcacagagaggggagggagacaagtctcaaaaaaactaactgttgggcactatgctcagtacctatgtgacaggatcattcatattccaaacctcagcatcatgcaatatatccagataactaatctgcacatgtacccactgaatctaggataaaagttgaataaatacatgaaaattatcattttaacatgtaatcacatagaaattactaattagatattttacattctttttatgctaagtcttcacattcagatgtgtgttttatacttatagcacatctcagttcacactagctacatctcaagtgctcagtggccatatgtacctagtcgttattgcatcagacaatgcagcccaaccctcagtttaaccttcactcatcaactgctcctgtttgctaatggttctgattttccaggcttgtcaaatgcttatcaaaacactcatctgcctggttattatcaaaaagtcaaaaggtaaatattggcaaaggtgtggagaaaagggaatgcttgtatcttgttggtaggaatgtagataggtgcagccattatgaagaacagtatggaggtttctaaagaaacaaaaaatagaactaccccatgatccaacaacccctcttctggtcaaatactcagagtaaatgagaagtggagatactcactgctatacttacagtgaaagcccagaggaaaggatcaccactttgtatctgcactcacatattcactgcagcattattcacagtagccaggatatggacacaacctgagtgtccatcaccagatgaatggataaagaaactgttctatatatatacaatgaaaacttatttattcctaaaaaatgagatattgccatttgccaccacatggataagtctggaggacgttatgctaagtgaaataagccaaacacagaaaaaaattgcataatctcagttatatgtggaatctttaaaatctcaaatatagagagatagagaacaaaacagtggttgccagggtggggggtgggagaggaaatggggagatgtagattggagtatacaaaatagcacatatgcaggatgaacaagtctagagatctaatgtaaaacatgagcactataggtaatataggtatgggatttgtgccaaataagtagattttagctgcatttgccacaaaaacaaaaacaaaaaaaatgggtaattatttgagataatgggtatgtggccaggcgtggtggctcacacctgtaatccaagcactttgggagtccgaggcgggcagatcacctgaggtcgggagttcgtgaccagcctgaccaacatggagaaaccccgtctctactaaaaatacaaaaaaagttagctgggtgtggtggtgcatgcctgtaatcccaactactcgggaggctgaggaaggagaatggcttgaacctgggaggtggaggttgcggtgagccgagatcgcgccattgcactccagcctgtgcaacaagagcgaaactccgtctcaaaaaataaataaatagtgtgttattttgcttcattatagcaacctttttactatctccatatattccataacatcattttgtataccttaaacatacacagtaaaatttattttaaaagcacgcatctgtgaagttttccctttcttacctaaagaaatgcatacatcttttatctgtttggaaagccctccctccttcctcttctactctgctacttcagaaccttgagtgttggacagctcctctggggaccatgcctacccaactccacctgggtgagaggccacaaactgagaagagagatctattgattacaaggtaaaaactgatctggtgacaagcaagggctctgaagtgaggcaggcctggctttatgttcatgcctaggctctgccattaggtttccttgataaataggggtgaaggtggggctgggaccagtagctatcagtattttaaaagctcctggaataggccataaccatcaataataataatctagtttagtccaaggaatccacacttgagaatgccttttgatagcatctttgctttttgataagatctttcatagataccttgaggtttctgttgtcttataacattaaggcatgtggttacaactacatgttggcctgtgggtgttagtgccatccaaaggcagccagagaccaaggtggctattgcttattcttgccaaatccatcagccacatcaacagtggttctgtttttatatttaggaattgatacttaatactttagtcaccttgtttttatataacatcatcctattgccttgaagggctatgcacgtgggaagctttttgttaggaaattattaagtccaaacctgagcagttgttatttcctcaccacgaagttaatcaataacgttcccacagcctagcagtgctttctttttaaacagtatcattctgaaggaataagcattgatagatagaaaccagaagaaaacccaataaaatatttaatagttcagttaataccttctaagtaagttattttttgctttttaaaaatagaggtaagaggcactcaagttgcaaattctggttagtcaaagtaaaaagtcctccaggcttcaggaaaaagcactgactaccacaaatcatggtcttaataacatcattatgaaatactttttagaaactctagtattctttcataactgattttattgtgtgtgtgtgagagagagagagagagagataataaaccttgatggtcccatacttttgcaaatagtaaactcactttttagtatagataggatgagaaatatgtttttctcacccattctacattgatggctgaggcctctataggctgagcccctataacaaaagacagattaacaagagaaaagcatacacatttatttaataaagttctacgtggcatgggagacttcataaagaaataaagacccaaagaaatggataaacctgtgcattttccatactaggtttggtgataaagttggtagtcatgaagaaatatgatttaattttctttaaaagtgatctattggtaataaactggaaggaatttagtaagacctgtttattccaattcctctctgtgccctgtgtctttagaggtaaagacgttcttttcttctgagtatgggaagggcacctctcaaatgagggccttataacctgcttcgggccagaaaaattcttcctaagttttattacctgcttcaagggaggagggaaggtgagagtgaccttcctgcttttgctgttctctcaaattccaaggtgtcctatttggggataccatgtcctaaatcccatcaagtaacacctctttgtgtatgtatgcacctaagtccatgtctgtatatggtgtacaacttttagttacttcatttacaatttaaaaaactttcgcgacacccaaataatcaaagaggaaaatgtagttaccacagagactccctgatgaatcagagagtggtatctggacaaactgtctctacttaattcaggaaaccttacatttaaaaaaagaacaaatcatgttccaaccaactgtagattatgaatttctactggcaagaagtgcagacagcttttatttatctttttaaccatgaaagcaaattagcaagtatctctatattgaatctatgaataggtttagatggactggaaatttctcttgagcatgcttgatttagaaaaacaaataccatccaaggacaaagtggcccagtaggggtggctaaggataacaaagccattttgcatttccatccgggaatccatatgaggatgctcttagaaataggaactaagaaaactatatctctggctgcagccatgacattttccaaaataaaggcagtgccatttaaaaaaaagctgaccctgatttactttcacatgactggaatgaactgcatgaacaattcaaaaagtcagatcagactttttggttcctatcctgataaaaggaagattaatatttatatccaagtttcctcattgagtctcatcatatttttgtaatatgcttcagtgtacttatgggtctggagtttctaccttgctgcctgatgggaatgaagtagcttttaaacaaagacttttgcaaagatagcatgagaaaaacatatccagttgaatgctgaactgtgctgcttatgggaattaacataatgctcaggaatcaagtgaataaaacaactggagaatgatacgcaaacagcacggtagggcagagacagagtttcaaaattgtggaggtaaccagggctttgtaaaataaagtttgaatgcagaacctcaatttttattatttatttttatgactgctgcttttgttcatgagcagccaagagaaagtactaggaaaatactctaattttgacacttttagtactttcattattttttttcttggaaaataccttcaaaaatttgagtaaaggaaaagaaagaaaaaaattcaaaactctttggaaatagaatatttctgcaaactacttatttttaaataggctttcttccaaaaggtgaaactacaaatgaatgtaactgaaaggaaaaatatctttgcctgacaaaattgaaaccttcttaccagaaactttgggtccactgttactaaggtaactcaatcaatgaaagtttgggaaatattcctgaaattattaatggaatacaggaggaggaaagaggttaggtttggggtgagaaaaattgagaatcaaggattaagtgggctgctgacaaccctcccttttgcttttgcatttcaaataagaattttcagaacttgctgatttgaaaagataaagaaactaatgagattctgagtgctcaggtgaaaaatattttataggataataattgaggtttaatgttatggcaaattttgctacttcatcactagaaaaaataaagctagtgatagcagttgtagcctgaattttaaaatcaagtttatggtcatatttttctggcaactttataaaatttgtcatcaaatcttattgatttaatgatatgatacctcaggttctaaattaaatggggacacaataaataactacctttttaattaaaaaacaagtataatgatgaatttataatgggaagagaccaaggaatagaaattgtgcagcacataacaaataaatatgccaactttaagctgaagactccataacaatgctttttcacttgtaatttgttctattatagatggaagatacatatcccagaggcctgaaatggttttgtccaatctgcaatttcaggaaaaatgaaaggacaagcaaacaaaaagaaaaccctaaagatagactatctagtgtttgctttttttttaaccattgagtttctagctcaaatttaaagtttttgtgaacttcgtatttatttatatttgcataggctttaatttttgtggaagggccaaaagaaagttattgaacatgaggcaaagaaagacagacttaactaaaggtggtaaacgttctcatatttctatcaaataatttgaatatctatatgtaccagctttgttatcagtatttatttttatttgaacagcaagtgtttcagtaagtatttatacataaaaaatactctttgggaattaaaactataagaaatagagaaaagagaaaagaaactaaacttatcatcagttttggcttaagtcaaatcagtctttagagaaaattgctgtgtattacaaaattttaaacaaagttagcattcagaaaatcttgagtctaaagaaaatattgttgtttattataatgcaaatttctattgttatagtggatttgtgtcattctctcctcaaaaaaatgttagttaaaaaaatgtacattgacttgataatgatgagcatctttataatcctggacttttaataccatattttttatctcattttatggaactttgtgtactgttaaaaagggtgttaccagctagaaccgccttgcatttgtatagcatcttagaagttataagccgggcacagtggttcatgcctgtaatcccagcactttgggaggctgagatggggggatcacgaagtcaggagatcgagaccatcctggctaacaaggtgaaatcccgtctctactaaaaatacaaaaaagttagctgggcgtggtggtgggcgcctgtagacccagctactcaggaggctgaggcaagagaatggcgtgaacccaggaggaggagcttgtagtgagctgaaattgcaccactgcactccagcctgggagagagagcgagactctgtctcaaaataaagagaagttatggaagaaagacatccagatgatctgatttaacacccaaatactctggaaaatacctctttctcccttcctttctctagaaaagaaaacatagaccttgcatggataggacttaaagtgagtgagtagtaaaattgtagcttgaacttgggtcttctcactctagtgacatgttcatacactactctgcaatatctccactgaaacaatacaatattactgtggaaacttaccaaaggaaaagagaatacatcacctatgttttcttctccagacaaaggaaaggagagagaccttaaagtgtagtgtaattgacattttatgcaaatttagattgtgcaaatttgaaatagtgtgatatattaaaatcactgtatacacaaaattttatataataaaaatctgtgtttttagaaatcaggaaatgtgttatttctgaagtagaaagccaagtgaattataaactgtattatgccatcaccaaatggcaaaataacttatcctttgccaaaatcatgtgaatcttatcattgtatgtatcagaactttggcagataattctggtgactatttgacttttagtgtgatgcttactattatgaatgtatgtagccttttaatatactataataaagtttctaattattcatcaaatcatagtgctagggcaaaaaaaaaagcctccaaaaataacaactttgggacaaaggttagatatgctaaaacactttaaagagaactagatgactgccatgaaacaatgaactgctgatttaggagagaagtgtgataaataataaataattttgcaccaaaatatataaaagcatcattgaaggaagaggagagggataagaggaagaggaggagaatgagaaggaagaaggaagagaaagagggagggagtgagggaagaactgagacaatggggatgtagatttttgtcctctgacatgcactcttcttctttacacttactactttgggaaaattagccttggattatttaaattatgttttatgcaaagtcattaataacaaaccactcacataaaataagatttccctttctaaatcaatgcagtcagattcagcactatggatagttcactcatggaagattgaatcatgacatggtgtactaaaggttggaatgaaactcagagttcttctgcttcaaacgttttggcagggaatctatggaatcatctttaaaagtgactcaagtgatctagcgatctataggtcaattaaggcctttgagtttgcaaagtatttttatgtttataatcttttatttttttaagatggagtctcactctgcctcccaggctggagtgcagtggtgtaatctcaactcactgcaacctccacatccagagttcaagcaattctcgcaccttagtctcccgagtagctgggactacaggtgtacagcataattccccattaagtcttttttttttttttttttttgatagagacggggtttcaccatgtttcccaggctggtcttgaactcctgacctcaaatgatccacctgcctcagcctctcaaagtcctgggattacaggtgtgagccacacctggctttttaattttttttaacttttgttttaagttcaggagtacatgtgcaggttttttttttttttaacatagataaacttgtgtcatgggcatttcttatttcatcactgagttattaagcttagtacccattagttatttttcccaattatctgcttcttcccaccctccaacctctaatagggtcccagtgtgtgtttttcccatctctgtgcccatatgttctcattatttagctcccacttaataagtgaaaacatgtggtatttggtttcctgttcctgtgttcatttgctaaggataaaggcctccagctccatccatgtccctgaaaaggatacaacctcattctttttatggctgcatagtattccatagtgtgtatgtaccacatgttatttatccagtctatcattggtgggcatttatgttgattccatgtctctgctattgtgaatagtgctgcaatgaacatacgcatgcatgtgtctttataatagaacaatttatactcctttggggatatacctagtaattgttgggtggaatggtatttctgtctttaggtatttgaggaattgccacactatcttccataattgttgaactaatttacattcccaccaacagtctataaatattccattttttttcacaacctcaccagcacctgttattttttgactttttaataatagcaattctgactggggtgagatggtatctcattgtggttttgatttcatttctctaatggtcaatgatgttgagcttttcttcatattctcattggccacatgtatgtcttcttttgaaaactgtctatgtctgcccaatttttaatggggttgtttttttcttgtaaatttgtttaagttccttagagatgctggatattagacctttgtcagatgcatagtttacaaaaatttttctcccattctgtaggttgtctgtttactctgatgatagtttcttttgctgtacagaagctctttaatttaattagatctcatttgtcaatttttgcttttgttgcaattgcttttagcatcttcatcatgaaatctttgcccatgcctatgttttgaatggtattgcctaggctgtcttcaaggaattttatagttttgggttttatatttaagtcattaatccatcttgagttaatttttgcatatggtataaggaaggggtccaatttcaatcttctgcatttggctagccagttaacccagcaccatttattgaacagggaatcctttccccatttcttgtttttgtcaggtttgtcaaagataagatagttgtaggtgtgcagccttatttctgggctccctattctgctccattggtctatgtggctgtttttgtgtcagtaccatgctgttttggttacttcaactctgtagtatagtttgaagttgggtagtgtgatgcctctggctttataccttttgcttaggattgtgtcagctgtttgggcttttgttgtgttttgttttatataaagtttaaaatagatttttctagttatatgaagaatctcaacagtagtttaataagaatagcattgaatttataaattgctttgggcactatggccattttaatgatattgattattcatatccacgagcatggaatgttttcccatttgtttgtgtcatctctgatttatttgagccatgttttgcagttctcctaatagagatctttcacctccctagttaggtgtattcctagacattttattctttttgtggcaattgtgaatggggctacattcctgttttggctcttgacttgactgttgctggtgtatagaaatgctcatgattattgcacattgattttgtatcctgagactttgctgaacttgtttatcagcttaagaagcatttaggctgagactatggggttttctagatataggatcatgtcatctgcaaattaggatattttgacttccactcttcctgtttggatgtcttttatttctttcttttgcctgattgtcctggccaggatgtccaatactattttgaataggagcagtgagaaagggtatctttgttttgtgccagttgtcaaagggaatgcttccagcttttgcccattcagtatgatgttggctgtggatttgtttatatgactcttataattttgaggtatgttccttcaataacgagtttattgggactttttaacatgaatgaaagttgaattttattgaaagcattttctacatatattgagataattatgtggtttttgtctttagctctgttaatgtgatgaatcacatttatttatttgtatatgttgaaccaaccttgcatcccagaaataatgcctacttgatcatggtgaacaagttgttgatatgctgatggattctgtttgccagtattttgctgaggatttttacattgatattcatcaagaatattggcctgaagcttttttttctgtatctctgggaggatttggtataaggatgatgctggcctcctacaatgagttagggaggagcccctagtcctcaatattttggaatagtttcagtaggaattgtaccagctcttctttgtacatctggtgaaattcagctgtgaatccatctggtcctgggctttttttctttttcttttttttttttagttagtagactatttattactgcctcaatttcagagctcattattggtcttttcagggattaaacgcattcctgtttcagtcttgggagggtgtgtattagtctcttctcatgttgccaataaagacatacccgacactgggtaatttataaaggaaagaagtttgactcccagttcagcatagctggggaggcctcacgaaacttataagcatggcagaagcggaagcaagcatatcctccttcatgtggcagcaggaagaatgagtggacagtggactggaatccacttataaaacctcatgagaactaactcactatcacaagaacagaatgggggaaaccgcacccctgattcagttatttccacctagtccctcctataacatgtggggatcatgggaaccacaattaaagatgagatttgggtggagacacagtcaaaccatattattcccctcctgtcctctcccaattctcctgtccttataattcaaaacacaagtatgcccttccaacagtcctccaaagtcttaactcattccagcattaactcaaaagtccaagtccaaagtctcatctgagaccaggcaagtcccttctgtatatgagcctgtaaaatcaaaagcaagttagttacttcctagataaaatggggtacaggcactgggtaagtacacccattccaaataggagaaattggccaaaacaaagggcctacaggccccatgcaattctgaaatccaataaggtaatttttaaccttaaagttccaaaatgatctcttttaactccatctctcaaatccatgtaatgctgattcaagaggtgggctcccagggttttgaacagttctgcccatgtggctttgaaaggtacaattcccctcccagctgctttcacaggctagtgttgagtgtctgtggcttttccaggtgtacggtgcaagctgtcagtagatctaccattctggggtctggaggatggtgggcttattctcacagctccaccaggcagtgccccagtgggaactctgtgtggtggctccaaccccagatttcccttctgcactgacctggcagaggttctccatgagggctccacccctgcagcaggtttctgcctgggcatccaggcatttctatacgtcctctgaaatctaggcagaggttcccaaacctcaattcttgtatgctacacactgcaggacaaacaccacatggaagttgccagggcttggggtttgcaccctctgaagctacagccctagctgtaccttggccccttttagccatggctggagcagctgggatacagggaaccaagtccccatggcacagagcaggggggccctggactcagctcaggaaaccttttttccctccttggcctccaggcctgtgatggaagggtctgccattaaggtctctgacatatcctggagacattttccccattgtcttggtgattagtgtctggctcctcgctacttatgcaaatttctgcattaggcttgactttctcccccacgaagtgggttttcttttctactgcctcatcaggctgcaaattttccaaacttttatgctctatcaactcttgaatgtcttgctgcttgtaaatttcttcctccagttaccctaaatcatctctcataaattcaatgttccacagatctctaggtcaggggtaaaaaatccaccagtctctttgctaaagcataccaagattcacctttattccagttcccaacaagttcctcatctccatccgagaccacctcagcctggatttcattgtctatattgttgtcagcattttggtcaaagccattcaataagtctctaggaaggtccaaactttcccacatcttcctgtcttctgagccctccaagtctctagggagttccaaactttcccacatttccctatcttcttctgagccttccaaatggttccaacctctgcctgttacccagttccaaagttgcttccacattttttggtatcattatagcagcaccccattctcccagcaccaatttactgtattagtccatgctcacactgctaacaaagactcacctgagactgggtcatttataagataagaggtttaattgactcacagttcagcttggctgggaggcctcaggaaacttacaattgtggtggaaggggaagtaaacatgtccttcttcatatggcagcaggaaggagaagaatgagtccccagtgaaagggaaagcctcttataaaaccataaaagctcatgagaactaacttactatcatgagaacaggatgggggaaaccatccttatgatttaattatctccacctggcccctcccatgacctgtggggatcatgggaactacaattcaagatgagatttgagtggggacacagccaaaccatatcaggtgaatgtgtacaggaatttacccatttcttccagattttctagattgtgtgcatagaggtgttcataatattctctgatggttgtttgtatttctgtgaggtgactggtaatatccgccttgtcatttctgattgtgtttatttgaatcttttctcttttgttctttattattctagctagaagtctgtctattttatcaaatttttttcaaaatatcagctcctggattctttgatactttgaatgtattttcatttctcaatcttattcagttcagttctgatttttgttatttcttattttctgctaccttttggatttctttgcacttgattctctagctctttcagttgtgatattaggttgttaacttgagatctttctaactttttgatgtgtgcattttcttctataaatttcccttttaacatcaccttagctgtgtcctgtagattctgatatgtggtatctttgttctcaaaagtaaataatgatattatttaccaaaaagtaaattacttttaccaaatagtaaacaatgaaattcagaaggaagtcattcaatttacttgtaattgcatggttttgagtgaatttcttagtcttgatttgaatttgattgtgctgtggtccaagagattgttagttatcatttcaattattctacatttgctgaggagtatttcacttctgaatgtgaccaattttagagtatgtgccatgtggtaataagaagaatgtatattctgttgttttggggtgaagagttctgtagatatctatcaggtccatttgatccagggctgagttcaggtcctgaatacctttgttgattttctgtctcagtgatctgtctaatattttcaatgggatgttaaagtatcccattattattgtgtggaagtctaagtctctttgaaggtctctaagaatttgccttatgaatctgagtgctcctgtgttgggtacatatatatttaggatagttagatcttcttgttgaattgaaccctttaccattatgtaatgccctttttggtcttttttgatctttgttggtctaaagcctattttgttagaaactagaattgcaacccctgctttttcctgttttccatttgcttggtatattttttctccacacatttcttttaaacctatgtgtgtcattgcatgtgagatggatttcttgaagacagcagcccaatgggtcttagttctttatccagcttacctctctatgccttttatttggagtatttagcccatttacacttaaggttattattgacatctgtggatttgatcctgtcatcatgttagctggttattttgcagacttgtttatgtggttgctttacagtgtcactggtatgtgtccttcagtgtgttttcgtagtggctggtaatggtctttcctttccatgtttagtgcttccttcagaagctcttataaggcaggtcttgtggtaacaaattccgtcagcatttgcttgtcagaaaagaatcttatttctccttctcttatgaagcttagtttagctggatatgaaattctgggttaaaagttttttttttaagaatgttgaatattggtccccaatctcttctatcttacagggtttcagctaagaggtctgctgttagtctgatgggcttcccttcgtaggtgaccagaactttctctctagctgcctttaacatcttttctttcatttagatgttggagaatcatgattatgtgtgttggggatgatcttgtgaagtagcttactggggttctctgtgtttcctgaatttgaatgttggcttgtctagctagtttggggaagttctcatggaaaacatcctgaaataagtcttccaagttggttccattctccccatctctttcagggacaccaataagtcatagattcataacaccaagagtcacagattcatatctttacataatcccatattttttggaggttttcttcattctttttcattctcttttctctattcttgtctgcctgtcttatttcagaaagccaatcttcacgctatgagagtgtttcctccacttggtctattctgctatgaatacttgtgattgcattattaaattcttgtgttttttagccctatctggtcagttacattcttatttttactggttatttgtctgccaactcctgcattgttttaccataatttttagcttcattgcattgggtttcaacatactcctgtagctcagtgaatttctttcctatctatataccgaattctattttctgtcatttcagccatcttagctcagttcagaacccttgccaaagcagtgatgcagttgtttggatgaaagaaagcactctgcattttttagttttcagacttcttgtgctgatttgttctcatctttgtgggtttatctaccttcaatctttgaggttgctgatttttggatttttttcttttattctattggacaaccttggagatttaattgtggtataaggtggattcagctgactgactttgtctctgggagattttagggggccaaccctcagctcccaactgctagactgcatgctccaactctgggggactcatattcggccccaactttattatctggctcttcaaggtttggagtccactgtgctgggagggccaaggtgcagcagctgcagcagagtgctagcagacgcagggctgcctgccatcctgtgggcatccaccacagtggtgggggcaatgcaaccagggggtacagagggcccctgctggagcctatgtgtgctgttgcactagaagtggtgttggcttggggcaggatgctgactagctcaggcctgggtgccttctccatgccctgcaagcaggatcactcagggcatagaaggatccattgttgtctgcacagtgttagtgcaaaagcagggctctggtgagggtggggcttgctggctctgtgccagccaaggctccctgcaatggtggttagtgagtgaaggggagtggactgcactcttgcatcctgatgggcaaagtaatgcaaaacccacctgtgaagacacacaccagcaaagtgatatgaggaattgatgtgggcttggggaaagctgcagtatggggagggggcatacaggctggtgtgaggccataggggctggctcactggagctctgtgccagtcaggtaaggtctgccagtacagaagctatggtgtgggccccccgggcacccaaaactgctctgtaagctggcatgaccaggctggggccctgggagaggccaggagaccaaggggtgctcaggtcagtccaaccccgtctgatgtccaagaccaccctgcggagatcagaactgacaattcccctagggctaaagtctcctatgagagcaatttgagcttagggggatggctgtccctgaccgtgctccactacagacactcctgcaccaaaccctctgggcttcacatcagctggcttgccatcccaccacttctctaggcagctcttgctgctacctcaagtgtcatgtggtggtcgagggttcccctcctgccggggttctagaggcctgtggcaagaaagagtttctccttgccaattgaactcaccagttcccctggagctgttgtggttcaaaaatgagtcccagtgtgcaatggcccatgcaaggtcggtgcctttcctctgaagatctgaaagttctggcctttttccagcagctctaggcatctatccaagccagtattaccaagatgactgagagttcttgactcaagcctacagaagacactcactttgcctcttttaattttcaaaataattctgtgcagatataattacattaattttacaatgcaaatattaatgcccatgttagttgcttatggatactaaactagcttaaaaaaataccagatcttctcacaaccaattcagtacttatctcctatcaactaaataattccacttcactgtctaaaacatttataggatttctttaaaattccattttaagcctaaaggcttaataaagtacacatatattttggaaagtatatacacaagctctcttatagcctcctatccttaccagggaggtaaattaaatccctggaccactggaacttagattcagtgaaaggacttttcaggccatacagtgatattgggctagcccaatgcccttctttctcaaaaggaaaacaagcccaagaaggtgaaaagatatgctctggatcctcacatggccatttccttacagaaaataagaattctaaatatcctcccatgcctaatatgactgagatttaggaagagatttgagaagatatttgcaacatatattactcgtgacatagaaacaagagctcattactttttccagctaactcatccccaatcaccaatatctttttgatgagtagtgtaaaaaaaaaaaccaacaacaagaaattgttgatgctttaaactactcttcaaacaaagttttaaagctatagagagaatggatattagccctttgtcagatgagtagattgcaaaaattttctcccattctgtaggttgcctgttcactctgatggtggtttcttttgctgtgcagaagctctttagtttaattagatcccgtttgtcaattttggcttttgttgccattgcttttggtgttttagacatgaagtccttgcccatgcctatgtcctgaatggtattgcctaggttttcttctaaggtttttatggttttaggtctaacatttaagcctttaatccatcttgaattaattgttgtataaggtgtaagaaagggatccagtttcagctttctacatacggctagccactttccccagcaccatttgttaaatagggaatcctttccccatttcttgtttttgtcaggtttgtcaaagatgagacagctgtagatgtgtggtattatttctgagggctctgttctgttccattagtctatatctctgttttggtaccagtaccatgctgttttggttactgtagccttgtagtatagtttgaagtcaggtagcctgatgcctccagctttgttcctttggcttaggattgacttggcaatgagggctcttttttggtttcatatgaactttaaagtagtttttttccaattctgtgaagaaagtcattggtagcttgatggggatggcattgggctaatatccagaatctacaaagaactcaaacaaatttacaagaaaaaaacaaacaaccccatcaaaaagtgggtgaaggatacgaacagacacttctcaaaagaagacatttatgcagccaacagacacatgaaaaaatgctcatcatcactggccatcagagaaatgcaaatcaaaaccacaatgacatatcatctcacaccagttagaatggcaatcatcaaaaagtcaggaaacaacaggtgctggagaggatgtggagaaataggaacacttttacactgttggtgggactgtaaactagttcaaccattgtggaagacagtgtggtgattcctcagggatctagaattagaaataccatttgacccagccataccattaccattttgggtatactgggtatatacccaatggaatataaatcatgctgctataaagacacatgcacacgtacatttattgcggcactactcacaatagcaaagacttggaaccaacgaaaatgtccatcaatgatagactggattaagaaaatgtggcacatatacaccatggaatactatgcagccataaaaaatgatgagttcatgtcctttgtaggggcatggatgaagctggaaaccatcattctcagcaaactatcacaaggacaaaaaaccaaacaccgcatgttctcactcataggtgggaactgaacaatgagaacacttggacacaggaaggggaacatcacacactagggcctgttgtggggtggggggaggggggagggatagcgttaggagatatacctaatgtaaatgacaagttaatgggtgcagcacaccaacatggcacatgtatacatatgtaacaaacctgcattttgtgcacatgtaccctagaacttaaaaagtataataaatatatatatatttaaaaataaagaaatacataaaaataaataaataaagctaatgagagaatttgcctggttgagtgtgaaactgagccccactgagctgtattacaagagccaaaggtcctcccctacaggattttactgtgactgcctatcaaaactcacttaattaatgccacttacattctatgtagacttttcaagcaaaaataaatttcatctaatgattttttaaagctccaatagccttcacatctacacaaatatcagtgctaaaaaacagttaatcaagggatatgaaccgagtctgagaccatcactgtcaaatctttgttcatggaagcaggtggagttagggcagatacgccagacattcttccttactaaaagcatctagtcccactgcctgatacaaagtgagttcttaacaacttttcctttacttctgcttaagtagctttatcctacctgcttcctgcaactttatcatcatgtatatagtaatgggcttgttggtagggatgtattttcaggccaaggaaaggttgggagacaagaggagaaggatgaagattagttatgtagttaattgtacagatagccttattccctttaagttttaagatagtcaagaaaaatatttgaaggatgattaatattaacaggaaaaaagggaaagagaatcagtaaataaacaaaaaggagagagatgatgacaatgaccacgagttcttgaccaataatattaataaccatctattcagggctcctatttgctaagtgccgaatacattcttatctctatcaggtactcatagactcattttgcaagtgagaaaaggggttgagtggagggccacagaactggaatgtttttggagttgggatttgcctacatgctttccaccattccattattcccaaggctttttagaaaaacagaagtggctagataaaggggagaaaaaaggaaaaggaaggtatttagttctccatttgtactcctctggcctcctgctggtcatttcagtcaggggatgatatggagaccctggtaagtcccattcaggcacccacccccccaaaaaaagtagctgttcgtgttcattattcatgttgaaattgataaagaaaccaagggttttaatcacagcaaagagaaactgttattctttagctaacagtactcagctaatgctggaccaaaattataggaaaatatatatagcataaatgagtcataaaaactttgagagtcacatgaatgtatgaacattctccacaggccttgtttatgtaatcatgtatctacttacatgggtgtgtttatcttagcttttccatgtggaacccagcttgctgtagacccaatctctttctaaacagtgagtaatcaaaaggaattcatctgtgagtaacttcacacatttattataagatgttagagtgaggaacaaggtggtttaaatgatagcataaagtaacacaattcccagagttttaagtccagaaaaaattcaagagtcaggtctgtggtgaatctctcaagcaataaagaaaatgctttcgtttatagaccaattgacatcagaacttggagaaaagaatcatttcactttataatgctggaatttgaaagatatggcattagaaattgacaaagtctttttatgtttaattttatttaaaatctccatcttccagggaaaacaaccaggtttcaagtgtcattgtaaaaattgacatgccctatgtttgatttgctatgtaaatcacactcccaaacaaacattttctgacagttcaaactcatcgtggcagctcccaagcagagaggtcaactaataagagatagtctcttcccttttttatgctagctgtaaaatattctgggtatcacccctgcatacattccaaacctagaagcatactatgtgtttcaaatttatctagacttagatatctgtctagatatggtagtcattagccaaacaaggctaaattaattaaatccaacaaaattaagaattccatattcctgtctcactagccatatttcaagtgttccattgtcatatggggctagtggctattgtatttattggcacatggttatagaatatttctatcattgcaaaaaaaaattttcttcatcagtgcttctctagacaagtatcttcccttcacaaagatggaaatctgtttttaaagataccttgttggaagggagaacaagaaagcaatcaccttacttcctctcctacaatttaagaacatgagactcaagaggttaactggctttgttaaactcaacaccagttaatgagagaaccaagactaaagtccacctttcttgcatcatgctcattcccaggctattcacagggtcgtttcattaaatgctatgaataaatggtatatttgaatggccaagatattttccaaccatcttcagttcctgactcctataagatgaaattttcacaagtctccaggctctttcatttctatttctacttctctaggtatataccaccatcaccactatcatcctttcctcctcttcaaactcaaatccaagttagcataaactctcctgtaagctcctttctagggttttctaagccaaaacccagactctctcccataaatccatggttccagatctcatgctcccaaccccaatcctcaagctggtagcctaaaccagtcatatcctgggaacctgcccacccactacatccctatacagcccttctggtagcttcacctcagacttttgagcagaggcctattctgagtccctgaacagtattgatggaggggtgattccctggacaattttctaggtagtcacttcctatcccaagcagcaaagaagggaatgaatctcaggcctgtgaaaaccatgctgccactgtgcagcagcttcttgggggtaagagataatatcctcacttgtctcttaggtcgttccataggctaaagctggcctagccaagaacttgtatcaggtactgtgaaattatgaaaagttgtttcattgtctatcttcaagtaatataaatgagagagtaggttttattttcataaaattaaagattacagaaatgttgttcaaattagagcttaatcacacaggaaagaatgcttaaaaataagttccagatacatacacactccagaagggttatgatgtttgcactttgggaaaaacttaaaaaaagaatgctttttatagttgtctgtaagagccttttctttgccaacaaaacctttaaaaattattgttattcattcctatgcttttgaatggtaatttatattcagcatatctgaaataatcacagttaaaaggaaataccaaaattggagtcaaagccatctcctccaggaaacagaatgtcaaataccttggagtcagtggtaggagaaataaaaccccatctccttcagccaaaaacattacatagaaacatagacatagaagcggaggaagaaaggcacaaatgtagaagacatactttggccttcattctatgaagctcctgcttctaccacccacacatcagaccaagacacacctttaaatatgtagggagggaggggaaaattttgtcttgtcggagctcacagtcagttgcccaaggctgaacatgaataaccactccaagacatgcactgacaacccacatttcctgcctttggtgtcagcaaccagagacagaaggtatttatttgcctacttctcaaattaccagctgcttgatcttccacaaagtactgagtcttgaagaatccgtgtttctatttgtagcaaggtcacgataatactaagctcacaggaattttataataattaaatgagataatgtatgcagaacgcctggcacagggaggacctccccacacaacagctgacattcctttttgcaattatatgcccttgacaaaggtaaggtgccattagcaaccctcaccatctagtctttgtttgtgtagaaataaccacatttggagcatttagaaggtccacgctatttcccaatgggtgcagatgacatttgactagacacaatatctggccttgtacccctttctaatctccaaactttcaactcccaatccaagccagcactactgagccctcaggaacttcataaaaaagaggaagtcattctttcccagtttgtaatccctctgccaggccccaactttatcacttgatgattaagaacagctctctctgcaccccagactctacccaactctaatataacttgctatctgcaccttcccaaatccccagttttttgcaagtgcgcattatagtccacaccaatgtttctgtgccttcaggaaaacaccagactcctctaccaaagaagctttacagttagcttgacttatttaccatatcaacacaaaacgcagccatcagaggactcacagaaagaatacaaatacctaatgtggatgacgggttgatgggtgcagcaaaccaccatggcacatgtatacctatgtaacaatcctgcacgttctgcacatgtatcccagaacttaaagtgtaataaatatatatacatatacagcaaaaagaaaaaaagtaaagaatacttagtctctttcatttgcaagtgcaagtggagacagaaggagaaaggcctaagggaggatatgagtggcaagtgatacttattttcagggtcaaatttcagggcctctggtataaaccttgaggtgagttgagtggaacagagacatctgctacttaccagctgtgaaacattgggtaaactaattaaatatttttatcattagttttctcatctgtgtaaagaagagaaaagtagctctcagagttgttgggatggttaaatgagataaaatattctaaataaatgagagcaattactgtcagtatctgcatgccagcactactacttggaaaaatcagaagttttgcttctgttgcagttggtactctgaagtgccatgctcttggcaggggtagagataacaaggataagaacctcacagctcctctcagatacttgtgccaatttcgcagtaaagatgatcaggatcaagtggtgattacctcacagtaattctgcacttggctgcccattaaaaccatctgagagctttaaaaattcctgatgcccagatgataccctgtgccaattctcagaatctctgggaggagaacccaggcataagtaatttttaaaggcgatgctaatatgcagccaacagtgaaaactgttaaaatcattaaatgggagccattagactgaggtgattctcacaccctgagttcctacctaagcaaatagaaacctagctcagattcatttcctgtaaggggctaatttaaaagaaaacaaaacttcagctcagccaatcacaggaggccaactaaccactacttatattgtctggaccttcccaccaggacagtccaagtaaggcaattgctcaaactttaaccaatcgaataatttatttgctctacttccacattcaacctattaaatccttccctttgtgcctcttggacagagccctaaatcacttccagtttggagctgactgattcatgaattgctatctgctcaaataaactctttaaaatgttaacatgccaaagtttatcttttaagagaaccatagtttcagtgtctgccttaggaggataatactcttattggggtttctagggctttctgtttgtagctctattatcatacctgcccccttctaggtaatcatttttaagtgtgctccagtgaatgcatataccctcacaagactgctcaagaacagggaccatggtttattcatctttgtactaccagtggtggtaatatgtaataatgataatggtgatggaagccagctttcatggagcactagctctctgtgcctggcattgggctatgctgttaaaaaacattctctcatttaattctctcaacaaactgtggggtaaaatgctattgtttacctcattttacacctgaggaaactgaggcacttacagtgtataaaacttgctcaaagctatacaggtagtctgatggcagagcttatactgttttccatgaagttatagaaacctccataccatagtgtggccttagagtgggactttaccaacaaaaataacaacagtagcaatagcatcacctacaacttattgagtgctccctctataccatgagctatgttgatccctttacctgctttatttcatttaattctcagcaaaaaaaagcccctataacacaattcctattattattcccttttacaaagaggatattgaagcttagtaagaggttaaataacttcaaatgtagtcattcagacagatagatttgaacctaagtgtgtctggtttttgtctcttaattactaacaatacagcatgcatctgttaatttaccaatgggtgagtaaaagaacaaatgaatgaatgagcgaatgaataaataatactctaaagtctctttctagctttaccttctttatcaacattcccagcaagcatttctgatttataagaagcttaactcctcttataggttaaaggaggaaaaaatagcagtgtactagttctatttaggggaagaagaagggaaaatcaacatgaagaaaatgagtctctgcaaattcccaaagatttggagccgaagccaatttgttagtttgcaaatgaaaacgttgtctccacttttcactactctgtttcatgcctttaaaattcaaacaggaggattaacatctgctatgtgtattggaatatcaagagggctgtgaacgcgaaacagaaaatgtactggatattttcaaatgtttccggttgccaggcaacagttttcctgctttccaagcatcgtggctaaatcacctgggcttcagctctagggaagtcttgaattaaacttctagctataggctatggcaaagtattgaaacagaaccacagaagatggcatttaattttacactggttttctgagattgtcactagcagcagtcactgtcagtgctaggtcaatagcaaaagacgggttaacacaatgtggattttttaagactgttttatatacagtacgattccctaactcaaacatcagaaagggcacatctgaaatggtaaaaagtataaattgcagaatattatgcagaatggaattttgttcattcagttaagttcagtgacttcaaatgaactcacaaaattttcaagtagaaattttgttttagtggaagttgagaatttttaaaaattaacacattaagacaccagtttaggcaatcctggtatttgtttcccagtcttccccagattttatttgtactgctcatttaagccattctatgtacatcttgtttcatctccactacaattctgggagaaaaatattttcactgattttacagataaagcagctgagattgtatggataaggtccctgtgcaaaatatagttagggtccaaaaactttcagaggagcccaggatcaacagcaatttataccgagcacttaaatctcagtctaagctctggaaatgcacatttaccttctctgaactctgaagctcctgtgtgtacctatccattcagataacctcccatccctggcaggtagcctccagggacctgaagtaatatagttaaccaaaaattaactatattaatttagttaatataaagttttattttttccctaccactggcaggaggaatccaaggcatgaactaaatggcaccctcaagccactggagtcaagcaggggctcacttcagctcattctcagagcaaggccttttcagggcccagaggtatattcacttctgaacttcccttgaggtttttttcttctttccccattgtaagaaagtactaccttgaactacccatattcaaaccggggaaaggaatgcagggcagtctaggactttggagagaaccttattgggaagacacaattctcaggtgccttattccaagcctcagacctcaataatcctaaattccagatttgcatgccagctagaagaaaccaaacttgtgtttctcctccccaacctataggaacccctgtttatagagggctataactaagcccaaggcctggaggcaggttgttttcagaggtttcccccactcatatgtgtatgtgtgtgcgtgagtgtgtgtgcgtgtctctgtgtataggaggaggccaaagaaaagccattatgcagatgaaagccatttaaaacattcaaattctccctagtactaaatggggtagaaagcaccttgaaagttttccttgaggctcttattaattttattttaacattaaacctccttatagtattgatattttacttcagcctcgtgatctgaggtccttctaatgcttcttctgttacatccattatgcattcatttgtttactcaacccacatttaatatttgctgagtgcctactatacggaaggagctggagacacggggctgaattgaatggacatgggttctgccctcaaggagattgctatcaaggggacattaactgagtgcttgctctgttccaggaactatacctatccgtttatataaatagtttattaagttttctttgcatcaattctcataaaaatcacctgaggtagatattatgattaatattctttttacagttgagaaaaagtgatgagaaaatggcacttgccaatagtcagtcaaaattcaagccagggtattccagagcacaaactctttaccaccatgccatactgcatttattttaattgtgtatatttgcaaatattttagttataaagattaaatatcacagtacaagtaaaaactcttaatattgtgcctggcatttggtctgcagcaatttgtttttattcttgcatcctgcacagagagaacttaactaatcctgagctcccaaaacttctaccatacccatcaccccttaatatagctccagacaatcattgtggccttgcgctgtctctcccaccaagacagatttctacctattctttaggaaccaagagacaagatttggtcataagacactaagaacgcaggataagaaccaacttcggaattaaatttacttgggactgggagcagtctcagccagtaaagccacttcctatacgaaacccagagaaaacagagtcttcagaacagtccaaaagccccagttaaaattaaagtcaggctaaacatcacttccaccatcatctctggccagccagaagaaataaaataaaacttcctttaatattctccacttactgagaattttctatgtgccaggcttaacgtagtgcagaaaggactggttttggataagatgaccttgtttcaaattatgttgtttccttagaaaattatgtaatttctctgaacttctgattccacatctgtggagtggaaagtgtaaaatgctgcgttgttatgaggattaactaaaatcacttatctggtctctgatgacatgcaacaaatgttggctccctcagttccatcctctctctgtcagacaaaattttgccgttgtcactgtgagtagggagtatccaattctgtattttctactttgatgttgtgagtttaatccttctattgtgccacctaagtttgaaaaggtctctaccttagcatgcctattcaaaccaggagattaatagtgtactggtagctccgtatcacttttttcccaacagaaaataacaagagtaacatatttactagggggcctaaccacctacgtgccataatcggtagatgttgtgtataatgggaggaacttggaactgattagaaatttacctgttattttggatacctatcccaagatattccctgaagactgttcagttcatactgcatacagtctagttgaaggaggttgcagtcatgtgaataagtgtggggttacgttgactcgacaaatatttattgaatgtttcccaggtgccagccgagagtctgggtgctgaagatgttgaatgagacaaacagagttctggctcttgtagcatgtcaccccagtgaaaaaattctgccaatgatagctgacatttattacacgcacactgtatgtgaggcactgcaatattaggtgttgtcggtgtgtgttattttcttaggaaccctacaagcatttgctgcttttattatcttcactttacagatggggaacctaagcacagagaggtcagttaacttgcccaaggtcgtacacgtgataaatatcagagccaggattcagacagactccagagacttctgcctcaatcacagtgcaaactgcctttctatataatctggagttttgagtggtattttatattattcaaagagattttatattttattctgtgaacttcgtaacacatctgtgaattgggaatactaggtattacacatcaccattttaaaaactaaaactaaatagaaagttaaagcaactggcaaactcatagccctagcccacagggggctggaaacaagaacccaggtttctcctacttttcgtctttagtattcctcttgctacatatacatacacatttagttgggaaaagagaggaagggcctgttcaaatatgaaatggactgagagatcttataccacgctcagtctcctcctcataaaataaggttaaaactggctttggattggttactgtaaggactgagaaagcttgtatagtgattagcatgtaatgattactttgtaaatgttagagcctcttcatcctgtggttacagattcatgtttttatcctttcacattgggtatgggcaaatactcagaaaaattgcatttcattcttgggaaatatctgaacagtcaaatcactgttaattacaaaacaaaaccagctctgtaaagctggtccacatgaatgtttaatgggcagacaaaataagaaaaataatgttgtagctgcaaattaagagaaagatttacctactcctgaagtcacccactgctagagcaaaaatatttcttagagattactttatagatctggtccaacaaatctagaaaccaaacacagatatgaactactctgtccaaagttccacatccaattggggcaacatcttgcagtagactcctgctctgccagcctgccccctacctccactcttcaccccacccccataggtatggtctctgccacacagaaggtatggtctctgccccaaggctctccatgggccctgcaaagctacctgatgagccatgctctgacgctgcttccacacaaagccaccttcacatggtctatctttagtacaatttaatgaatggaggcccttggaggtgctctgagaatgaccatcattataaaaatctcagctctgtggagcaaacctgtgtggaagctcccaagtaatatagcccctggaatgcatgaatccctcatcattaaccctgtgggaaaagcatttgtgttgtcttactagtctgctcatgtttttaagaaaaattctgcttgcatataaaaatattatcattatcttcttaaactctcaagtttttctgttgcctgtgaaaaacaaaacccttcagaaaagtagctactgaccagaaaacttggtattaatttttcaaggaatagattcccggttatacttgagctgcatgcctcttccttcagtcacacacacacacagtggaaataccagacacactctttcttcttcagtgcttctggacttaccatgtatttcatttcaatattttttcatttattcattgagcaaatattccttcagacctgctatgcattcggtcctatgctagacataagctacacttcttgctctggaggcattcactggggagacagaccctcaaacaagtaagttacaagtgctctcctggactcatgaggagggacacagtgttggctgaggcagcagaaggagcagccatctcttcctgagacatctgggaagcttcacaaaataagtgactttgcactaggtcttggaggaccagtgggaattttccaggtgatgactggggagggttcttggaagggagaagagcatgtgtaaggatgtagactcgggagaaagcacgacatggttagtgaatgacaaggaacagtgcgcagaagtgaatgagcccagtttggaaagataggttgcaataataatgagaagactcttttgggtcaaatgaaagcacttgaacttgttcacaggtaggtgggcagttttgctctggtgaaggcttctaaacagtagtgagcagactcagggtcattttgggaaaatctaatgttcgtcagccgttggcaaagcttctgcccttgaggctgggcccactttcttagactttgaggagagattgaacatggaaatcacggctgcaccagtctcctgtctagaaaaaacatctagacttctgtttagaaaaaacagctagttgcatctgcagcttcctgaagctcttcattcctgaatatgaaattctatatgtctgcccgggcatttttatagcactgaaaagaaaaaaatatctgaccactttgtttattttggaggaaaattacagagagattttgaaggttccagcctactttttctgtttgaggattttaaaaagagagaaagagagagtttgggtctgatttgaataatggcctgtgttcccgagagctttgtgctttggtaagcaatgtgggctgattattgcctcatgcttttctgaaacagctgtctgtctgcttttagagctctattctagggggattgcaggagccacagaagaaaatttaactcctaaacactcacatcacttgggaagaacagatccgaaagagcagtggtatagttttttctattgtctttttcgttgttgtttttgttttttggttttttttttttttttggtttcagaaagttggtggttggttgaggcaaatagagaaagattccttctgtgggctcaaatggaaggtttacatgagccattcctctgaagttcaccttctcaacattttgatgtatgtctccctgtgtctttgagttaagttttcagctaggatctactgtttcaaggaggaacaagttaggacctatatcactaggctgcttttctggtttctgagtcctactgtaaatcaagcatatctggaaaccacaccatactgctgtcatgggttttattgttatatccaactgggacctgcctcttcctcatgtggtgattatttactaaacactatatgcagttggcatttgtcaagtactctgtgtgtttagttgatgaagtttttttcctatcactggtgttacaaagggcccttggcttagtgagcttccctttcatggtaggatgacaactaaaccaacctgaccaggagaccagggccctgggagaacagaagtcaacttttcaggtagcaagtccaagacctgtagtggtccaacagcactgattgagatctggataagatgccagaactgcctgcccctctcttatgctttataggactttcctgtcagtgcctctgaccctgtgaggtatctttccatactgtcagttgttcccaactgaatacacaaatctctctaaccaaagcttacagttcagccaactcccagtggttcttctgaattaacagaattagcagagcattctgcagtttgatcacatacccgctaacagtgagtttagcttctcttccatatttgatatttctgaatttttctgaatgcccagagaatgtacataataacattgatagtatcaaatatttgttgagagtttgcaatacgtcagggtcttgttaaacattcacgttatcacatttatctccctcacaacaacctcatgagctacatactattgcccttcccattcaattgagagaaaactgagtctcagaaagataattcatcagtggtcacagaactggtaagaggtggagccagaactaaaacctgcattttttttttttttttttttgagatggaatcttgctctgttgcccaggctggagtgcaatggcacgatctcggctcactgcaatttccacctccgaggttcaagcgattgtcctgcctcagcttccggagtagctgggattacacgcatgctccaccatgcccagctaatttttgtattttgagtagagatgggttttgccatgttggccaggctggtctcgaactcctgacctcaagtgatttgcccacttcggcctctcaaagtgctgggattacaggcatgatcccaaaacctgcatttcttgatatcacaggccttgagagaatctcagggacaggttttccacatatatgcatattagtaactgcaggaagttgggaggaacgggtccctggaccaaattatatttcacccccaagtcagagactgaggacattccagggacaccccttctttctccaggatatcattcatatccacaggtcatagtagagtcagtctttaggcattgcttaaaaaacataaagccctgcctttttggaataagttaaatgatcagcttgtcaggcttatgcccacactttatgtctgggcaaatttcagcaacttaaaaaaaaaaaaaaggatgaactattcaagttccaacatgtctaacctaaaataagtatatgtcaacatcaagatgtatccatatataaatggaaaattaaagagaataaaactagtgtatttctattatgctttttaacttcatatctagtttggcctgggcttttaaactggccacctgtttccaaagtatggacttccagcaccactgtgttcatgaaccatttaccttcatcctgcttgcaccaaatttttttcactcatttctaacctcctcagatcctgcccagggcttcacattcatactttgcgtcctttgattatgtttcttttaaactgaaattgatttccttccttggctgtaaattgctagaaaattgcttccagtccctccagttaatgatgaagcctaatgcaacctcagtataggatgctgcccaagggccagtctgccaggtccaaactcccctgagtttgcttcaactctcccagagagaattggacaattgaagttaaacaccctttctgttcacattaagtgtgataactgactcctggaattgaaatagcttcagggaggcatcttctcaagagatacaataattccttatgtagccctttagagcttacaaagtcaacattatcaacttattcagcaagcatttattgagtacctgctgtatgccaggcactctactagagtagtctaataagtgatacaaagatgaataagacagcctcgggataacctggggagtaggtagacaaagcagataagttatgggaacttaggcaggaaggaagaacagagtcagaattttgtcagtactttctttacaaaaaaaaaaaaggcatcttcacctttggtgactcctgagaatctgaagtgagatcaccattcctaaactctcgtccatttctagagacttacttattttgtttcaaaactgccaccatctttaacaataataagtggacatgacttatcccttttgtaaatagagtttactttcatgcatttccctctgaataatctttactgtttctcacttgctgtccttctatcagcaggctctgatctgagcccctttgtgtcagccactctgcatcccttctgtgatagaagtagatcagaataacacttaacaaattacaggtatttgggatacaagcgtcttgcagctttgtgcctgagaagaaacttttccttataatttcctctctagcaggtgttacgttccattgcattgccctgtatgcaggtaaaaacccaaccaaacaagaaaatcttaccaagtccctgagtttttttctgtctgtctatctctgtatgtatgcatgtgtctagctagctagctaatcttcctctcaaggacataaactttttctctcagaagttaggtaggcctgcctataagatcaaaatcatttccttcgtgttcccccactctggaatcagaagatctgagttaaagccagtatggcactaaatgacagtgttacccaagacaagtcattttgtctttctgggactcagtttcttggtttgatatcagaagtggcatagattaggtgagctataaattggaatacactgggagattgctctagaccatgtgttgagtcgggatagagctggggtttagacaaattcccagtttctttccactgccccacaccttctcagaaagtcaaatcatgaagcactttagcatactttagtctgattttttttctctatatcgtatatgcatcttactgacctaagcaaatatatggtcataccaacatcagagacacaaatctctgtctcattctaaactcatagtcctggatttggaagcccaagtctaatgagatctatcccatcacagaagcagccagaagaccccaagtggctataagatggggtttaacacaagctatggacatctagaggtagggctgggtctctaagctaatgatctctcgcagcctccagcccagccctgtgactttttcagaagcatcactgcatcagtctggatctattatctcttgattaaggctgcttatagagtacaacattttacagcttagcccagcttcttgcattttcatcagttgctttattcttttccttaacaattactgcatgtcaacaccctttctcctgtcagcataccaaaccctgtacaggaggctggcattgttccaagtagactaaagttgggctttcctcttattacagtcttttaaacccaagggagttgaatgatctttgaacattcctggggattccatttcaagatacttccctacaggctgtggcaatgccacatttaaccttgatccccagaaactaggaatggcctggctttataactcataggtaacagcttgtgtgactctgttctgggcctctaggccacttcagaagtgattaaccctgttatcagaaggcagtgggaagcatttggcttcactatattctgtctccaagtttgattcctttttctttctttttttgcttataaaacctggctgaggaatagttataattttcaggtggaataaactcatgatttttatgttctctcctgtcccacatcaaaaataccattgcaaactggagacataagcaagatttttcagcttctaccatctttatgtccaaatatacatttttctctttaaaaaataacatacagtaaaattgactctttttttggtgtttgattctgtacattttaatacacatagtgtgtcatgtaactatcaccacaatcaggatacactgttctctcaattccctcaaattccctcctgctgtattcaaatctctgccgtttgcccagtacctagcccccggcaaccactgtcctaaagttttcccttgtccagaataacataaatggagtcatagggtatataatcttttttttcagtgtttttttttaaattatactttaagttttagggtacatgtgcacaacgtgccggttagttacatatgtatacatgtgccatgttggtgtgctgctcccattaactcgtcatttagcattaggtatatctcccaatgctatccctccccactccacccaccccacaacaggccccagagtgtgatgttccccttcctgtgtccatgtgttctcattgttcaattcccatctatgagtgagaacatgcagtgtttggttttttgtccttgcaatagtttactgagaatgatgatttccaatttcatccatgtccctacaaaggacatgaactcatcattttttatggctgcatagtattccatggtgtatatgtgccacattttcttaatccagtctatcattgttggacatttgggttggttccaagtctttgctattgtgaatagtgccgcaataaacatacgtgtgcatatgtctttatagcagcatgatttatagtcctttgggtatatacccagtaacgggatggctgggtcaaatggtatttctagttctagatccctgaggaatcgccacactgacttccacaatggttgaactactttacagtcccaccaacagtgtaaaagtgttcctatttctccacatcctctccagcacctgttgtttcctgactttttaatgattgccattctaactggtgtgagatggtatctcattgtggttttgatttgcatttctctgatggccagtgatgatgagcattttttcatgtgtcttttggctgcataaatgtcttcttttgagaagtgtctgttcatatcctttgcccactttttgatggggttgtttgtttttttcttgtaaatttgtttgagttcattgtagattctggatattagccctttgtcagatgagtaggttgcgaaaattttctcccattttgcctgttcactctgatggtagtttcttttgctgtgcagaagctctttagtttaattagatcccatttgtcaattttggcttttgttgccattgcttttggtgttttagacatgaagtccttgcccatgcctatgtcctgaatggtaatgcctaggttttcttccggggtttttatggttttaggtctaacgtttaagtctttaatctaccttgaattaatttttgtataaggtgtaaggaagggatccagtttcagctttccacatatggctagccagttttcccagcaccatttattaaatagggaatcctttccccattgcttgtttttctcagatttgtcaaagatcagatagttgtagatatgcggcgttatttctgagggctctgttctgttccattgatctgtatctctgttttggtaccagtatttcagttagcataatgcatttgaaatttgctcttgttgttgtttgtatagtttgttactttttattgctgagtagtatcccattgtagagctataggacagtggtttatccattcaacccttgaaggatatttcaatagttgcagtttatggtgattgtaagtaatttgctataaacatttgtgtgtacatttggtatgtaacataagtttttatttttctggaatgaaaaccccagagcgcaattactgggttcatgtcataagtgtatgtttaactttgtaagaaactaccacactgtggatgagtgggtgtaccattttgaattcccaacagcaatgcaaaagagttccaggttttccacattttttcaaacaccaagtattaattgtcagtgtgtttccgctttcgccattttaatcaatgtgtcatactatcttattttggcttgaactcacacttcccaaatagctgatggtgttgattacctttttatgtggtaattttccatttttaaatctactttggtgaaatgtctgttcaagccatttacccattttaaaattttgaatttttagaatttttttacacatccttcttacaagtcctttgtcagatatgtaatttcaaatattttctcttagtccatggcttgtatttttattctcttaacagagtcttttgcagagcaaaaggtttcattttgataaagtacaatttaccctttttggtgtcatatctgacaactcttgcttaattcctagtcacaaagatttccccattttttttctaaaagtttagagtttgatgttatagcttttacctatcatatatttttagttaattttttaataagggggtatgaggtttaaaatgaggtcctttttttacacacatatatacatatataattgttccaatagccttgttgaaaagacttgatcagttttgtgttgctaaaacagaataccactgactgggtaatttataaagaaaagaaatttatttctcacagctctggaggctgtgaagttcaatatcaaactgttggcatctggcacaggccttcttgctgcatcatcccatggtggaaggcaagagggtgagagaggataagaaagcacaagagagggctgaactcatttttataacaaactcactctggtgataatgagcctactccagagataacgacattaatctattcatgagaattctgccctcatatattagtcacctctaaatggtcccacctttggcggggcacggtgacatatgcctgtaatcccagcactttggggaccaagatgggcagatggcttgtgctctggagttcaagaccagcctgggcaacatggggaaacctcgtctctacaaaaaatacaaaaattatctgggtgtggtgatgcatgcttgtggtcccagttactcagcaggctgaggtgggaggatgggttgagccctgggggcggaggttgttatgagctgagattgcaccactgcattccaacctggacaacagagcaagaccctgtcttaaagaaaaaaagttcccacctttgcattggggattaaattaacaatacatgaactttaggggacacattcaaaccataacagtgtcctttcgatattgggctgtctttgtatctttgtaaaaaaaaatcagttgactatagttgggtgaatcagtttctagactctccattcaatttcattcatctatgtgtctatccctaccacattgtcttactatagcattatagtaatcttaaaatcagtaatataataatataattcctccaacttagtttttcattttcatatataatggttctggctattctaattcctttgcctttccgtataaaatatagaatcagattgtgatatctttaaaatatcctgctggaattttgattgaaattgtactaaatctatgaatcactttgtggataattgacatctttactatattgagtcttataattcattagcataatatgtctctccatctattcatgtctttcatcagcattttgtagttttcagcaaataaaataggcagatgctctttagaagagtgtttttaatgcctaagtgtttggagattttccccaatatctttcctgtttttattttttattgttttattgtcattcaaggaatacatgtgcaggtttattacttattacattatgctgaagttggggattctaaggatcctgttgcctaagtagtgaatatagtacctgataggtagtttttcaacctctgctcctctcttcatctccctcttttggaactcccagtgtctattgttcccatctttgtgtccatgtatacccaatgtttagctcccacttacaaatgagaatatgtggtactttattttctgtttctgtgtttatttgcttaggattatggcctctagctgtatccatgttgtttcaaaagatatgatttcattcttttcatggttgcatagtattccatggtgtatgtatactgttctttatccagtccactgttaatgggtgcctaggttgaatctatgtctttgctattgtgaatagtgccatggtaaacatacaagtgcaggtatcattttagtagaactatttattttcctttgggtatatacccagtaatgagattgctgcattgaatgatagttctgctttaagttctttgagaaatctccaaactgctttccccaggggctgaactaatttgcattcccactgacagtgtataagtattcccttttctctccagcctcaccaacgtctgtttttgttattgtttttgttgttgttgttttactctttagtaatagccattctgacaattttgagaaggtatctcattgtgattttgatttgcatttctctgacgattagtgatgctgagcattttttcacatgtttgtcggccactggtatgtcttcttttgagaaggatctgttcatgtcctttgcccactttttaatagggttgttttcttcctgttgatttgtttaaattccttatagaatctggatatcagtcctttgtcagatgcagagtttgcaaatattttgtcccattctctaggttacctgctttctctgttgatagtttcttttgttgtacagaagctctttagtttaattaagtcccatttgtctattttttattttcttgcatttgcttttagggtcttgttcagaaattctttgcctaggccaatgtctagaagagtattttctagggtttcttctaggatttttatagtttaaggtcttacccataaatctttaatccatcttgcgttaatttttgcatatggtgagaggtaggggtccagtttctctcttctgcatatggttagccagttttccagcaccacttattgaatagcgtaccttttccccactgtttatttttgttaactttgtcaaataccattttgttgtgggtgtgcaggtttatttcaggggtctgtattctcttccattggtctatgtgtctatttttgtaccagcacaatgctgttttggttactgtagctttgtagtatagttcgaagttgggtaatctgatgcctccagctttatttttattttttcatttttgctcagggttgctttggctattcagactcttttttggtgagaaatgaattttagaatacttttttcaaagtctgttaaaaatgacattggtaatttgaaaagaatagtattgaatctgtatattgctttggcaagtatggacattttaacaatattgattcttccaacccatgtgcatggaatgcttctccacttgtttgtgtcatctctgatttgtttaggcaatgttttatagttctcctcatagaaatcttccatctctttggttacatgtagtctcaggtatttgtatgtgtgtgtggctattgtaaatgagattacattcttgattttgttctcaccactcctattcaacatagtactagaagtcttagccagagcaatcaggcaagagaaagtaataaaaggcactgccctccccccaccaaaaaacgaaaaagttatcaccactaacaatatgattctatatctaggaaaccctaaagattctgcaaaaagactcctagacttgataaacaactttagtaaagtctcaggataaaaatagtcaacatataaaaatcagtagcatttctatacacgtgatatctttcaactagatttatttctagtttaattctactgtggtcagagatcatcttttattatttcagcttttcaacttgttaaagtttgtttttccccagaatataatctatcttagtgaatttcccatttgcacttaaaaaggaatatttcatgtgctgttattcgatggaatgttgtcagatattaatataaacatgtccatttacttttgattagtgttttcatgacgtatcattttctaaccttttacctttaacctacctatattatttcctttgaagtgagtttcttgtacatagcatgtagttggtttatttttttaatccatctatcctaacaatctctatgttttagttggtatatttagatcatttgcttttaatataattattatgaatttagctctcccattttatttgttttctctatttttcattcctttgttttctattccttgacttttttggataatttaaatatttttaatgcttaaatttaatttatttaatgtgtttttaattatctcagtgaataatattttagtggcccttttaaagattacagtctacatatataacttttcatagtctacatacaatcaatattttactagttcaagtagaatgtaaaactctcaccaccaaataggttcctttatcttccccctttatcttacaattattttatatatgacatctgcacatactgaaaacctcatatgacaatgccctaacttctactttcaaccatcaaccatacttaaagaattcaagaggaaaaaaataatctactgtgtttaccatttctgttggtcttttctcatttgtgatgttctgagtttccttctggtatcatttatcttctgtcagaagattttctttactgattcttttagagtaggtctgatggcaacaaattctttcagttttctttgacttgacttgaaagtgtttttattttaccttcgttcctgaagaatattttcactgtatattgaattttggttgacaggttttttttcaaatatttctttagatattttttagatatacactgcatctaaagaacactggaattgcttttacagaccagagtctgctccattttttctctttatgataagaatatatgaaataaaatagacattcaaatatattacttacttgcacttctgcacttgccctgaagatttcaaagtagaaaagtttctatagcaaacataaaatgtttacttatgataatatgagacattgagccaatgtagctcaagatcacagcctgtcactatttttattaatttgtctttctcccataatttattgaaaagatatattgtctctttcattacagtttcagctgttctttcattgatttttccattctgttgcgatcacattttcattactaccctggctagagatctaaaaaacaaacaaacaacaaactctatcttcattaataacaccacctgcctccctcgtcaggctgctaattaaattagaataagtaagctaataacagcaaaactcttgctatttaggtgtgtattgaagtaacaggaaatagccatatacccttttgaaataccaaggaaatatctattctagctctcaatgttcttgaatctacgtactggcctcaatacatattgctctcatctaatccaaagttcccatctggtcaagattctcttccccatatttttccccttcccctatatacctgaataattttagtttcgccttttaggactcaaataaattgtcactcccatttagaaggcttttattagtgtcctctttctccaccgtggtaggcagagtagtagacaccctaaagatgtctatgtcctaatctctagaacctgagaagatgttaccctacttggcaagaggaaatttgcagatgtgattaagttaataaccttgagatttggaaattatcttgtattatccttgtgagcccaatctaattaaatgagtttttagaagtggagaaaacttttcttggctatggtcagagagagacatgactaaggaagaaaagtcagagagatgcaacattgctggctttgaagatggaggaagggagtcatgagccaaaaaaagtgggcaacctctagtagctagaaaagaaaagaaaatggttttcccttagagcctctaggaaggaatgcatcactgcacacacctttattttagccccatgagacttgtgtcagaattctaacctctaaaactataagataataaatttgtgttcttttaagctactaagtttgtggtaatttgttacagcaagaatagaaaactaatataatcccctccaggccaggttaaatgctacttttaaaagttcttgccacattccacacatactgctaacaatacgtgcatagcacttaccatacagtcagtattgatttcatattcttatttatctgttccttgcaatagactgtgagtgccttggaaacaggtataggccttatgcatggaactggctatctgtgaattttttcattaatcacccaaaattgttgttgcatcatcactcacaccagcctctgggatagactctgataatggcaatgcatattaatattgccttttcattccaatcagtctccttcctgtgatttttccttaaagagagtgggcaggaatcagacataataaagatgggtggcttcacccagacatggaccctaacagtattcacatctttagatctagcagtcagagaacattaaagacacatttgtatcaacaaaatctttccagtgaattagtgaggttattttgggaaacatgatgggccaaaatgggggagaaactgcagaaaggaaatgcagtttcttatttttcatataaaaagtgttgggcaggaggcatcaagcaatgctgcccgtgacacaaacagacagattactatttctaagagaagttatgaatcacgtgagcgctgtctgtccaagaagcaaaagagatgagatcagctttgggatgaatctgtgttcttgacaactctttgcaagaggcacctaccagtcacctccattagcctcaggtctaggggggtcccactctctctcatccactttctccctctacctgtgctgtccttttatacacagggtgactacctccatccagagttacaattatgcttcttcaaaatgagcttttctatggggatacactctacctacaaaaaatagtatatacacttgaaacttggcatctcaccctctattaaattgagaacttttctactcctggaaagttactcagggatgtgatcctatttcatcatttgtgcttatctcatttttctccaaacttacttagtctgttctcaacgttagaaccaaagaatcaagtgttggtaagttgatacatagctctacttaactctttaggagaaaggtctgtgtgttactctggcctatcacataattttccagatgaaatgtaagataagcaaacaaaaggaagttacccgtgtgataccaggttagaaaatcttcacaaacactgcaaaaaaagaaaaaagaaaaacaattgctagtcaggtttgttaaccaagaagagacaaggacatggagaaggaggaaagaaacagttcctcagtactgtatttttatcaaaaacggactcaattttgacacagagtaagttaataagtcaggcaaaatatataatggtgtctaggtctcatcagcttttcctgggctgtgcttcatgtaccacacaatcaatttggtcccatctcacagtattgattaggaagatggccgaaattgttgtaccttccagaatcaggttcagcaactgcaagcagacaaaaatccagctaagtatgtcattcatccctgtcttctccttctaattttttttaactccagcacaatccatgatcttgcaatcctttatcactttgagaaattctgtttctaggttcctgctatcttgactttcatattttatgtggtgagattttcaattagtctggtgctggggcgaagtcagccaggtcaaagattcctgccaaaagttcttttactaataaatagactaataaaatgaccacattgggcagattgcaattttatttcatttccaggcatattttacactttgtgtcatctcagcttgttaattgtatgtatgtatgaagcaaatggtctttgaatagttgtctttcccaggcacttcctggaagatggtttggtttttctgtctttaaggttttgcttttgtgccacataccaatcatcatgggctagattatgctgcagttataaacaaatcgtctaagttgattaaaacaacagaagtttactcctcactcaggctacatgcccactgctggttgacaaaaggctctcttcattgtagtcactaagcaggaaactgagattgacaaaatagccgtaatctcaccatcttcatggaaaaaaagacctctagagaatcttgcattgacaattaagtgctctagcctagtttgacacatatcactttcatccacactcattggcctcaaccaaccacaagaaaactaagaagacaattctaccacgttccaagaagttagagattcaaaatattggtgaatgaccctaataacaatcacatactactaaaaaatttgtgctttgaggtggccctatgatctgcaaattatcaaattgcataacttgctcatgatacagatgcttgttataataacctactagatatttacggtacttgcatgtataaagtcagaaggtatctgcatgttttaatttttcaaattttgaactgctttcctttatctttgtcactactgtcccccaacacccccccacacacacacacacacacaaacacatcccctcatccaatcctcagctactccaataatttcctaactgatctctttgtttccacccttgccctgcaaaggccatttcttcacataacatccagagtgcttcttcgtaaaatgtaaatctaatcaaatcttctcctacttaagaccttccaatttatttccgtcaaacaatgaaatgggaactctttgccatgacttatgagagctcaatcctgccaacttcttcagctttgcctggtaccattccttcctgtccactctgttctagccacaatggccttcattctgatctttaaataagctcagctaatgcctgcagtagaccctttgcatcaagccttccccctgcctggaatgctctttcctcaaatcttcacatgacaggcacctccttgtcattcaggccttatatcaatgcaccatctgcagggaggctgtccctgactacacaatctaaaacagtaccccctctaattgctcactgttattcattcacttaacaaatatttaagcattaactatgtgccagacactagtttatatacttaagtatcttcataaacaaaacaaacaagtattcctgctttagtggaagagacatacgatatacaaccaacatattaaattatatattttattaaaagatggcttttaacaaagggaaaagaaagaaaaaaaaataaggaaaaggaagaaaaccagagccaagtgggagcctatatgaatagcctcctactggccccagttggaacaatatcgagcatcatagtttaaatcataccatttctatatgacttgtacctcaggataccagaagtttatgattaaactttgagaagtttctctaatataaaaggatttcagcgaaccagtggagcagaaatgatagagtgtcaccattttccaacatttcgggctagataattccctgttgtgaggggctttcctgtgtattatacgatagttagcagcatatctggtctctacctatcagacactgccaaatgtcccccgtgggaagaaacatattgtccctgattgagaaccactggtcaaggaaatgagcatcagcggcaatgtatacgactagatgagaaacagacagacattatgtgttccctgatggaagtacaaaacaacctataagcagtcctgccaaaaaattaaaataattaaaacctagccgggcacagtggctcatgcctgtaatcccagcactttgggaggccgaggtgggtggatctcctgaggtctggagttcaagaccagcctggccaacatggtgaaaccttatctctaataaaaatacaaaatgagcctgccatggtggcacatgcctgtaatcccagctactcgggaggctaaggcaggagaatcgcttgatcccgtggggcagagtttgcagtgagcctaggttgtgccgctgcactccagcttgggcaacaagagcgaaactccgtctcaaaattaaaatctgaatctgattaagcctgtagatctaactacgaatatacaggaagtacaggggacagaggaccttattagacaatgccagaagaaccaccagcaaaatccagaccgtgggaaacaatctatttctgcaaccaaggattgcaaggtaaaaacaagagagaaaaaagacagagagaggtcgagagaaaatgtacagattaaaagggatttaagaaatatagaaaaaatttgcgagatacaacagtgactggatatttgattatactaaggaattattaaaatttttgtaaaataataatattgtgattgtgttttttaaaagaatctctattgaaaatagatactaatctacagtaggtttttattatttgcagattccatatttacaaatttacctacttgctatacaatttatttgtaacctcaaaatcaacacttgaagaactttcacagtcattcagagacatacatgtgcagagaggcaaaaaatttaagttgcctgaagtacatattcccacctgaggctgaacaaggcaacagttgtacagctctcatactgtaaagtatactttttatggtctatttagtgtcacatttttgtgggttttgttggtgattttattgtttaaaatgtcccccaagcatagtactgaagtgctgtctagtgctccaaggtacgaaaaggctgtgatgtgcttaatggagaaaacacatgtgttaaataagtttcattcaagcatgagttataatgatgttgccctgagtgcaatgttaatgaatcaataatgtatattatataaagtgcatttaaacaaaaatatacatgaaacaaagttgtgtattgatctattgatgaaaatgtgaccagaggctcacaggaacctaactctgtatttcctccaggagtcatggtttagtactcgctggctcagtgttcacagtggatttatggaacgtaactaccacaaataatgagacgaggctatcttacaaatgtaatcacatgactctgggattcactttaaaataatctgggatgaggagcagtgatgggggataaacagcaaaagacaggccatagatgatgatagttaaaattgcgcaataaatatttagggtttcattgtactctactcttgtgtatctttgaaatattccataataaaaagtcataaaaatagagtagataaatggggtagaaattttagcaggtaggcagcaaagtttacaatttcagttaagatgggcaggtgacatttcagaaagaggtaagagagttggccatacagatagttggaacaagagcaatcaaagcagagagaattgttgatgcaaaggtcctgaggcaggacatcactgatatactccaagcacagcaaggaagccaatgtggctggagtagagtgagctggggcagatgagatcagagaggtcacgagaagtcaaacaacacaggacatcataggcctttgtaaggggtttgacttttactctggattgaataggcagccaatggaaagttttgagaagaggagggatataatctgatttaaatttattttatttatttatttatttattttttgagacagagtctcgctccgtcgcccaggctggagggcaatggcacgatctcggctcactgcaacctccacctcccaggttcaagtgattctcttgcctcagcctccctagtagctgggactacaggtgcatgccaccatgcccagttgacttttgtatttttaggagggatggggtttcgccatgttagctaggatggtcttgatctcctgacctcgtgatccacccgcctcggccccccaaagtgctgggattacaggcatgagccaccgcacccagcccttaaatttttaagtgatcatctggtttctgtattgaatctaaactctaaactatgaaaaattcacaataaaagcaaaaaaactcagaagaacattgtagtaatgcaagtaagaaataatggtagctggattgaggtgttgtagcagtggaggaggtgaaaagtgattgaattctaggtgtattttaaaagcagagccaataataggattttctgaccagttggatgtgggatatgagagaaaagaaggatcaaaattctgtagctgagcaacatctacaggttgagtagccctgtgtttcaaatttcagattttttcaggttttgaagcatttgcatatacataatgagataacttgggagggtgcccaagtgtaagcccaaaattcatgtatgtttcatatgcaccttatacacataggctgaaggtaattttagacaatattttttactaattttgtgcatgaaacaaagcttatgttagtacctatgtgtgaagttttccacttgtggcatcatgccttcactcaaaaacttttggattttggagcatttcggatgttggactttcagattaaggatgctcaattgtatcttgtttatttttgtgcttcctcagtctcccttcactaaaataaaaacaccattaagtgcaagaacttcagccatctggtccactgatatacctctggcacctggcagagagcctggcacatagtaggtgcttagtgatacttgtagaaaaaattagctgcacagcttgtctctgcttgaatgttggcatgcacaattctagcgttacctattattttgtccagtctttaaattcctgacccaaggtgtgaaaccacttgcctgtgttcaaagaacaggttaagtggcaaaaccaggttttagacccaagtcctctgattccaaatttggagccagattccagaagaattctccattctaatcccaccttcttcctacaagtcaaagaaccgagttaactggtgtcttcaatcaattgattacagtatatctattaaaaggcctaccaagaaccacttttgtctcatttttaatgacttccaaagattcccacaaactctcactaacgttcatattcaagttttctgaaaatccttattcttgtatgccagctaagatcttttcaccttcataaatctctgccacaattagcccattatcagatcaatatcctcatcatgatttatctctgtagcagagtagtgaataagactagggagtcagatttaccttcttagcagctctcctgccctgaattaaacaggatgccccagcatgttgccttctgctacaagctttagtgtctgtctgtaaacaaacccaagtaaggttgaaaagcactccttatgaagtaagatagccagagagtgacagggatgccacaccagagaagctgagcagtctgcccctgggcagcatccagtctgccacccaccagctggtcagaactaaggcaggacagagggacacaggagatggcctggatcacagttctcaaaacagtatgacttcactccagggtgccaagaaaggcaccaaaaataaaaactagtaacaacaaaaacccaaagcctgcaaatcggagttgctttctacctataaatagagcagattatctgcataatatccagttcactccttagtatgcgagccaacgcacactctgaagagtcctggctaaggggttgagagcccagttttggagggtgtgtttaaaacaaccgagttcaagttccagctccttcacaactcactgtgccatgactttttctaagctcagtttccaatctttacatatctaaatcaatacatatctaaagtggaggtaagctctatttctgagcattgtatacattttaagtgtgatgatatgcataccaggcttagtactggtacatgtaactccttgataaattgtttcatggttattgttacatctcaaaagacagagcagaatcagtcagaagtgcaagagaagagtaaggattaatggaaaaggggttggaagaagagactcactttttctatgtaatgagagtcagcaccgtgcttgatgacaatagcacagagggacagagacaatcccaagaacacaaaatacagatgtgtctaccatcagggataattcaactatgtccagtaaaatgtttataggagtacaaataaagtctgccggtttttggtgtctactacacatttggcacatttcacacatcttttttaatactcataacatacctgacgctcagaggagacacaaggattgccctgggattccagactagtgagtgatagagctaggctgcaaacccaacactcccctggacgctgaataaatgtcttttccagaacagcatgtttacttgaaactagtatttcaaatatggcaataagaaaactttcaattacatttcataaaacagaacaatctatgtcatgctgcttatgaggactcaataaccttacttaaaagataacccatctaaacgggttaattaaccatttaaataccaaggccatgatgaatgttggctttagatctttaaagggcctgcttctgaattctgtacctgttttgctagactgagactcctgcattcacacccactcagactgtctcaccaaagaacagactgtgctctcctttccagaccttttcactctgcagctaaagaggaatgtctaggactaagccccacaagctatacaaactcctgacacagcgccaggggcacattcacctctgcccacgctgtaaccggtttgatggatggctttggatgacattcagaatgggcaccagctttcagaaggagggctgataaagcagcctctttagaaacatagaccccaaaggctcctaatgggcatacacaggtgcccaccacatagagttatagaaaataagttgaaaagtctgagtgagaactgatactaatgaaatatgtttaaagctaacaaaaaatgtttaatgttttaaattaatttaagtactggtgccaaaacaatgacatatgatgcgtgaaatgtccctggtcaggtaattatacaagaagtctatggatgaaagactgtctaaccaattttatcaaaaaacagcaaaagttgaagtaagactagcacctaattttttccctcctgaactctgttactaaactttgttacaatagcattatgggccagacacagcggctcatgcctgtaatcccaacactttgggaggctgaggcaggcagatcacttgagggcaggagttcaagaccagcccgcccaacgtagtgaaacctcatctctactaaaaatacaaaaattagccaggcgtggcggtgcccacctgtaatcccaactgctcgggaggctgaagcaagagaatcactggaacccaggaggcggaggttgcagtgagccgagatgtgccactgccctccagcctgggtgacagagtgagattctgtttaaaaaaaaaaaaattgcattatggaaaattttagttccatctcttcccccaagataaaccactaatggtgctaggtatgcctttcagaatgcaagaataaaaacagggttgtttgtttgtttgttttttactttttaacaaaccacagcctaagggatttcagtttaggtctcaaacttcgtccttattacgttctaggaaatgttcctacatttacattacagcacattgttagtagaataaaaaatgagactgaggaatatcaaatttaaaacttgtctataatatcaaacactcaaccaacaaccatttgctaaataatttccaagtgctagacctgtgcttgacactgaggaaacaaaggtgaatacaacatggtccctgtcctccagaagcttccaaagtagtgctggaaacaaagaatgtatactttagtatgaaaaaaagactataatggctttggtatagtggcttaagagagctacacataaaatgtaagttgagggtaatatcaggaaaaacaactcagagatgaggattactcaggatttgattagaacttttctaagtggatcctcaatgttatcactttttccaacgtaacccaagatattcactttgaagagggctgtgagatatcggcatttgctaacaacactggtatttagcaaatactcaactaggtatcagtaagtgtttattgactgaatagctaaaaattgtcaatatcctcccccgacccaagagatcagaaggtattggtgtttctgttgtcaagagaaagtcagtgtatttgctgattgattaaccacttttattaacctttagtactaatttcctttcctccagaactcctccccctccactactccttatctcaatgagtgacaccaccaccacccaagacagaaacatagcagtaatcctaacaccttctcactctcattctcactccccatctttaaccccacaccaagtctgctcttcaacttcattcccacccttagtcccagccaccggcatctccagccttctaacctgtgctcatctattgggccctccctccaacaatctattctactctagcagcaagatggatgtttttacaattcaaatctggtcatgtgactcccttgcttaaaactattactaactccacactgttttcagaatactaccaaagatcctcagcatggctccaaagtctacatgacctggcagcttcaggttgtacaactcttcctcattattcaagcatgaaaccactggtattctctaagttgttcccataagccaaacttccttctgtcccaggtcctttgaatatcttctttcctctgcctggaaccctcctacccaacttaaagccccatttttgaccccaggacaaatttcacttcctgagaagagccttctcttgactctccatagtagattccttcctacaccctaattctccccactcacctgcctcccagcccattaggccctcacagtacttttccttcactgaaacataaacccctgagggcggaaactttgtctttaccagcatctatagtttgtaataacataccgatgtctgttctccgtgctcaccaaactgtaagtctaatgaagtcagagactacgtctagtccatgatgtgcctgcaatgaatacctactgaatcagtctgtttcccaacatgtagaaaataatgctgtgcaggacaagggcatatatttttataaaaatatataatttccagtggtcaattgatatgtagtaaggaaaaaagtcataagatgaaaggctaggggcctctagcttagaaaaatgtccctaaataacagaaaaaaaaaaaaacatgtatatcagcaggaggtagaaagagcataaagagaggattcagaagtgggccaaccccacttccataacccacaggctgtgtgactttaggctctgtcacttaacctctcagtcagcttccgcatctataaaactagaacaaaaacacttacctgcccgcctcaagtgataagttgaaggagagacttctatgtcaaaggaaaagagttatacaaaagtaacaggccattatcatatagccatggaaatcatatcttcttattcctgctgtttgagtgtttcaaagaatttacctctggggacaactccagatttttttattgcagagatgaaaggactcctcaaaggcaaatgaattatctagttcaacatactgagtctgaccaaattttccagcaaattaccatgcttggtataggctctccatagggcagatagaacttaacaggatattgtcctttccttgaattcaagagtgattgttgaatatagtttctgaaggtagagaagctaaatctctctgacctccaaatcctttggaaaacagtgtgctattgaaacatagtctacaggaaaaagatgcccataaaaagaggtcacaatctctaacgcttactggggcaggcaggtaacataaaggtgagaggtggtgcaagtaggcctaaagcataaaagagatgaagggaatatataaaacttctccaaatcagaagaaaaggggatgctattaataattatgctaggtcagtgggaacaaaccaagctgtcccaggaaaaccagaacacagactcaccctgacactgtgtagcatgatcctgctgacatgggacagctactgctcagctccagctgacgtgggaacactaacctactcttgacaaatcttcctatttttcaagaaaatgcagaaatttagacttttatgtaaaatttttttgatttgaaatgtcagcaagtgattttttttttccttctgctgctgcttctgcttcgtaaacatttttttcttttttttttcagacagagtcttgctctgtcgcccaggctggagtgcaatggtgcgatctcagctcactgtaagctctgcctcctgggttcacaccattcccctacctcagcctcctgagtagctgggactacaggcacctgccaccacacctggctaatttttttgtatttttgagtagagacggagtttcaccatgttagccaggatggtctcgatctcctgacctcatgatctgcccgcctcagcctcccaaagtgctgggattacaggcattagccaccacgcctggcccccgtaaacattttttattatagatattagcagttggttagattttctttatctacccatgatgttcataaatcagtgcatccactataaataagaaagaagaatgtgttaaagcttacttatattcttccacataataatcttaggagctactgttaagcttagtatgccatacaaaatatatatttaggaagcctacttgtgctctgtctttaaggattttctgtatcattattcaccatcatcaccatcagcagagttattgttctccaaggagatattctctgtaccactttctgcttcggtgggagaatctttggttgactaccttaatgaacacacatgttgagcacctgccatctgtcaggcactgggctcttttgcatacattacctcatttaaactacccaacattatgaaagaaagattcttactatccttcaccttacagaagagaactcacaggctcaaagtaacaaaacaatttaatttcctgaacagcagacctgggatacaaaatcatcaattcttcacaagtgacaaattaaaaaaagcttaaaagggtataaggcttagaggcaaggagaggagaaacgcatgaaagcccaaaagtaaggagtgagagagaaatatcctcgactgtctggcagacaatagggctcaacatttgttgaattaataaatgaacatgtttgtccatttgcagttgaggtcttggcatctgtcacgtaaacagagtgtgtttggagatgaacacacctgtgtttgaacatcacttttaccatgcattggaatgtgaattttagtagatatttaaccttgctcacttcattctcccacctataaaatggacataacatcaacttacagggctgttttaagaaaaaaatggaacacctgtgaaacacctagcacactgtatggctcatagcagaaacccaatgaatatttatttcctccattcctcctagaaggaagggaaaatatctcttgtttttcttttttccactggctttattagttttctacaaagatctcttacctccatcacatttatccctatcccatgcttcattttttacttccctccccttaactgaatctgtcttaccaccaacaggtcatccctccctgtcttctaccaggaagattcctctccccacaatccttttcctgtaggctggggttaaaaggggaggacattgatcctctccaggcttccaaatgtcaatttcagaccaggcgtccacaaccttccttcagctatgagaaagcaagttcttcaagggtcagacttatcctcctcatgttggtgagacccccagcctagtgtgtagtctggtcaacaacagaccttagtagatgcctgctgaggggatgaacttgcccttatgaactatttaaatatttctctgataaatcccaactctgcatctacccaaggctcataggatagatttagtcttctatttattctggagaaatccaacattaatgggtaatgaataagcacctatctagctcctaagattattatgtggaagaataaacataagctttaacaagttcttctttcttaactattacagatgcactgatttatgaacataatgggcaggtaaagaaagtctaaccaactgttaatatctataataaaaatacatttgactacagaacgatagcattgaaagtcatagaacaccttataaaggcagtttcactgtcagcatgtatttcatggagtagagccattaaaactactctacggttaatggttaggaaaatcaggctcattcatttagaaagattcaaatgatactcacattcataaaacctctaatggaatagcacattctttcaacaagggtgggggctttgtttaaacgtgttctacacctgcacacctatgtctttgctctagagaaacccctctgatctgaggcttatttcgtgctgtaaggatcatggctgtggcaaagcaagtaactctaaatgacattggatttgcctcaaattttatttccatttgacccctaatacatcactatacaacttataggaataataattatttttggtcgaggcaaaactaaagccaaagtttaaatattctttgtttagatttctcaagcttgagacaaagatgtcaattaagccctaataaagcaagtctgtcactggtataattaacacctcagttgaaacctgagcctcacttctctcctccctgcacagcaacaaggcagtcatcggagaccccttgtcaaaaaaattcccaaagtggtaaaggcagaaaaacgtacctgtagtaccaaacatatggctggggatggggtaatctctcaaagggttttgagttgacggcctcacacaccttggaatattgcttcaatatggctgtggggtatcatttttcatcactgtgctgtgtgtacactggccaataaatatgcaatccagtgacctgacagagggagacttggtaaacatcactagggccttgtccaggctgtctcagaggcctgtgtggtattcagggtaaggtaaattgaatgattttttgagtctgtggctgttacaagaaacactattttgagggaataccaaggcctgtgggcaaaatgagtgggattcctagaagggaaagtaaagggaagaaaagtcttaagataagacagtgtggcctccatagcagtgtagcagagtgtgcagaaaaggagtccaggagccctgtgaccatatcatgtaacaatgttcttgcttgtcacacatcctctccccaaagtttctgtctcctagaaagaagttgtaagtgtctgaattatgctaggataaatctactgtagaaatggtacacataaatttatatttctagtttttatcaagacagacacaaaaacagattacgatggtaacctatcatggccattgcagatgtcagatgatgcccaccacacttcctccttaaagcactatcctctgaggatacagaggctcagagatactcagagcagctaagccttctaatcttctgaattttccctgagaaaaagcaagcatatactcccacgtgctactacaagtggcctgactccccaggctcctgctgtgttgacaaaattctgcaagcacaaatggacctggtcagaaagagccctggttactgtaattccctaatagtgacattttccaatctctgcgtcgtgttgatcacaaagttcctctgacagtagagtgttctgatagcaaactgtttcagctgccatggtggggggaaccacaaacacaaaagcttgagcagaaatacagcctgaaaggttgacttttcatttacttctatctctggagctcatggcgctataagctccagcattaaattttaagcatttgatgcaggaggatcaaggggaagcctgggaagtgtttggcttcatcgaccgctggtcttgctatgaattttcagcaagaaaaagagaggcattgtttgaagagaatgtaacattggacagaattaaagcatctatttctggagatttgtgaaatatcattagcaaattttagttcagagggtataggcatatgaccctcaagaaggtcagtattcactagaatatggtttgctatagcgatagaagttaaatctttttttaactacctgcagagatggaaagagactgtgagctctttgaaatgtctatgatcagggtgaaatacacataatattgtaagttaataacacggtatttcatgttaaatgaagccataatggggcttttattgttaggcattctgcctgataaattgttgacatgataaatatagattaataacctgaaatatctttttgctccctcagtccttcaagtaataggaatttgaaacacttattttataactattgtacaattccttctgtttttcaacaaaaggtcatttttctataactatgtagactagtgcatgaggaattagtcattgaaagaaatagttatatcagtaattagaagaaagcagtgctttacatttgttttactccagttttttactcattctttcaaaaagttatttcaggaacccctactatgtgctatgctaaatgttaggtggatgatggtgaccaaaccaaaccaatccctgtttccatggaacaaaaatctttgacaaaccttgtttcttcaagatagagcaagggttgacacccagtggctcagtgtcatgcttggaacagaggctcactggagccttctcctgaaacgggaaacttcctgcaaggacacataggatcttgtgggatccgaaaaaaaaaaaggattaggcatggccaggcttcccaagacctgcaatgaacccagggcagccataaatccccacagcctgattttgctcttcttacacaagttatcagccacttctagggctcagctactttctatttgcctgctctacattcttcttgctgctactcatcaattatagagaagcagtggaaggtaatggtgaacaagcagactctgaagccataaagccccacttcaaatgcaagctttgccacctactacctgtgtgacaggaagatgttaataaacctgtatgtgcctcagtttattcttccacaaagtggagatattaataaaataatcctcataaagttgttgaaagattcactgacataaatcacataaacacttagtatgatacctctcaggtaataagtcaaacactgattgtattagtccattttcatgctgctgataaagacatacccaagacggggcaatttacaaaagaaagaggtttaattggacttacagttccacgtggctggggaagcctcacaatcatggcagaaggcaaggaggagcaagtcacatcttacatggatggcagcaaagagagagaactcgtataggagaactcccccttataataaccatcagatcttgtgagacttatttactataattgagaacagcatgggaaagacccgcccccatgattcaattacctcccactcggtccctcccacaacacgtgggaattcaagatgaaatttgggtgcagacacagccaaaccatatcattccacccttggcccctcccaaatttcatgtcctcacatttcaaaccaatcatgccttcccaacagtcccccaaagtcttaactcatttcagtattaactaaaaggtctacagtccaaagtctcatctgaaaaaaggcaagtcccttaggcctatgagcctgtaaaatcaaaagcaggttcgttacttcctagatacaatgggggtacagcattgggtaaatacagccatcccaaatgggagaaattggccaaaacaaaggggctacaggccccatgcaagtctgaaatccagcagggcaatcaaatcttaaagttccaaaataatctcctttgactccatgtctcacatccaggtcacgctgatgcaagaggtaggttcccatgatcttggacagctctgcctctgtggctttgcagggtacagcctccctcccagctgctttcatggactggtattgagtatctgtgacttttccaggtgccagtgcaagctatcagtgagtctaccattctggggtctggaggatggtgacccttttctcacagctccactaggtggtgccccggtagggactctgtgtggtggctccaacccaacatttcccttctgcattgccctagcagaggttctccatgaaagccccactcctgcagcaaacttctgcctggacacccaggtgtttccatacatcttctgaaatctaggtagaggttcccaaaccccaattcttgacttctgtgtactggcagtctcaataccaagtggcagctgcaaaggcttgaggcttgcaccctctgaagccatggcccgtgctctacattgacccgtttcagccatggctagagcagctgggacacagggcaccaagttcctaggctgcacacagctggggcccagtccactaaaccatattttcctcctaggtctctgtgcctgtgacaaaaggggctgctgtgaagaccttagacatgccctggagacattttcctcattgtctcggggattaactttcggctccttgttacttatgcaaatttctgcagccggcttgaatttcttctcagaaaatgagattttcttttctatcacattgtcaggctgcaaattttccaaacttctatgctctgctccctttaaaaaactgaatgcctttaacagcacccaagtcacctcttgaatgctttgctggttagaaacttcttccaccagataacctaaatcatctctctcaagttcaaagttccacagatctctagggcaggggcaaaatgccaccagtctctttgctaaagcatgaaaagagtcacctttgctccagttcccaacaagttcctcatctccatctgagaccacctcagcctggaccttattgttcatatcactatcagcatttttgtcaaagccattcaacaagtctctaggaagttccaaactttcccacattttcctctcttcttctgaatcctccaaactgttccaacctctgcctgttacccagttccaatgttgcttccacattttcaggtatcttttccacagcaccccattctactgataccaatttactgtattagtctattttcatgctgctgatgaagacatacctgagactgcacaatttacaaaagaaagaggtttaatgggcttacagttccacatggctggggaagcctcacaatcatgcagaaggcaaagaggggcaagtcacgtcttacatggatggcaccaggcaaagagagagcacttgtgcaggggaactcctctttataaaaccatcagatttcatgagactaactgccatgagaacagcatgggaaagacatgcacccatgactcaattacctcccactgggtccctcccacaacatgtgggaatttaagatgagatttgggtggggacacagctaaaccatatcactgatgtagaattagcaaaatgccagccactgttctacgggtttatcatgtattaattaaaatcctcacaacaatcttataatgaaaattatctccattttactatttatttactattatcttcattttactgacaagaaaccagaaccttagagatgttaagtaaattgctgaagatcacacagctaataagaatctacatccatttcactccaaaacctatggtctcaatgactatgctaatgtaataactgacttagtcttgtctttgagtctataaatcttttctcaacctcactgttacttgattgaaatgatcctaacttcggctcaccaagacttctcttggtcctgattctacctcatgtttcactctgtttcctatttcaaatccagttcatctttttatgataaacctcctcaaagttagctagttcaccttatgacaggtgttcaccctgaaccagttttctgttgctgtaggcaggaaagttacttggttgaaatagcaccaaatagaggagtctgtttgcatggcagcaatatgattgacatttctaatgtgcccattctgcagattcagcaacgaaggtttttaaaagtctgatgactaacccaacttcattccattaattgtcaccaaagataggacttcaatttggaactttttactctgaggccagtgaacgttccatattttctctggatatttctctctgtttctagaggccaaattctgccttgtttggaaccatcactcaaagtgactatagccaaaattatattcaacaatagcaagttaaagaaattgagaaatattccatatcctggagtttagtctactgtaaaataagtgttttgttcacccaaatataataaatttgttctaataaacattttctctttccccttattgattcctgtatcaagatttcctgcttatgtcctaagaagggagaaacttttcacagctctgccaactcacagatctatagatcttatcagctcacatagtcagatgccactggagtgttggagaaaagactcccagaatctcccagaataatctgtaaaaattcaaagtttagaaaagaacattaatggcttatgaatgggaattaggcaacatgagatacaatcctttttcccacccctaagtagagagtttgtataaaaactaattctctataacaagattagattttagtatgtaccttttcttacaggcctgcaggaaatattctgaactttatgcttttaacaattttggattaatgttcacaaatagaagctagctattgaaaattgagaaccccgctattgaaaattgagaaaattggtacccccagataccttagaacacaaactatttcttaactatcctgagactttgtgtcttggtgacctatgtccactatgttgaaatattgactgagacatgttctctgctaagggaaggaagacaggtgctcatatttaagaaactcaataaatttatctcctgttggcaagtaattgtgaccataacaaaacaaagattccagtttagcaaatcaatggcttgtaatctcaaggagagcacaaggaactttattaatgactttcttaatggttaaatgctgtttaccaagtgacccagaggcagcgtggtttagtggtttcaacagcatggtcccgagagtctgacaaacctcagttcaaatccttcttttgtcttcacttagtttttcttcctgagatttagtttcttcatcgttaacaatgaggatattaatatgtttcacacagttgttatgaagaatgcatatattagaatgcctgcagagaaaaagaaaataaataaatgttattgctttcctttcttttctcatgagagacgttttgtaaaacaaatttctactacaacagtaaaatttggcatccatgataatcttatctcatttcaactggtaacacctagcacaaagctataagcccctagagatcttagagaagttatacaataataattctagtccaacttattcaaaagctggttacacctttcctttcaacctttccacttcatcagtaaagtaaaggaggatgtttctggatacctatatcatagttgagagagaaaatttaatctagatactgttctgtgccatctgctcatttcgtatccagcacagctctgtggagggcaaggaagctcaagtctttgaagatatgatgctggcactcaccaagaatttttataattcgcatctaggaaatgcttaaagcaatacacttggataattaactaacttggcattgctcaaagttctgagtgtggagaattaattaaaggcagcatttcaagtgttagcaaggggtaaatggggtgaaattgtgacagctgaattgaacagattggaaaatagatgtatgaatacagaggtagctgagaagtgtttctaacctctgggaaagctgatttaatttaccactcagtattttcttctgctcttaatttggttatgagacccagagtaactatgtaagattgaagacagaggctctttcccatgggcatggacatgaaaatcacagtagaactacaggagagcttcctttaagtaagtatgttgtgtgcctttaagacactaaatttgtagagaaagacacatccattaaccacttttagagctcagatgtgggaactctttccttattgctgaggaagtcacttggaaaagaagtccaatgggaattaaaataatccacttactctgccagtaagataccatgatcttattagtcaataactttggcaaaaaaaaaaaattagaaaatagggcatggtgatgtaggtgttttgggaaggaaaagaaaaggaagtaaagttttgactttgactttttttcccacaaatgaatctaaagtagctaattatgaagtcatttcatgatattattttactctgcgacagccttctacaaaaaaaaacaaaaacaaaaacaaaacaaaaaaacactgctcagtcaattcagctttaaacagtcttcattgataagggcaatagaaaggccagtcagacattctactctgaaggcagaatccaacagatctgattccagagcctggtacatggagtttcccagataactttatctgcccttgccgtcgtctaatctaacctaggtagaaggagtcactttgtctcctttagactcaccttgtcattcagcacacactgcccagagcatgcagacagacttttgcacccgcatgggcacagagtcagttttcccaacaaaagtcctgatttggcactgcttttcagacagtaggagcttatggggtacccagttggcagagcctcattaggtaataagagggaaaacttttcaccctggcagtcctaaagagatgaataataattccctgtgttacttcctcatcaactccagcaggcaaattaacttcctgcttcatgtaatgctcatgttcttttaaattctgcctgagtacaccatagcactttcttctcaatggatcgacttgttatttaagggaggagtagattaatctacccccagatattaaaaaacattctcagatatgctgcctagaaacccaggatagttttgcacgactaatatagacaactcacataactaaatagtttgcattttttttgcctaccaggagcatggaagccattcacttattccccatttattgagtcaacaaatacttatctattgatgttatgtttcaggcattatactctgcaagactgaggctttcttttaggttccaagaagaccagagtaaaggtatacaaagaaatagttcagagacaaatagataataataatcttttaaatccttcaaaattaaaagcaattacagccaggcacagtagctcatgcctgtaatctcagcactttgagaggccaaggcaggtggatcacaacgtcaggagtttgagaccagcctggccaacatagtgaaaccccatctgtactaaaaatacaaaaaattagctgggcattgtagcaggcacctgtaatcccagctacttaggaggcaggagaatcgcttgaacctgggaggcagaggttgcagtgagccgagatcatgccattgcactccagcccgagcaacagtgcgagactccgtctcaaaaaaaaaaaaaaaaaaaaaaaaaaaaaaaagcagttacaagacactactgagtagattattttagagcaaatggaaacatgctggcagttcacaaaggtacaatagggaagagggaaatgtttatttggagagtgtgctagaattaaactgcacacatgttttattatgggagacaatcaatccctgagactggatggctcatgccaagactcagcaacataaagtgttgtgccaacttcaaacataaagcaaccaatcaatggctacctttttttgagatcctaatatatccagtgctttgcagatgttacttctcttagccctcacggcaatcattgaaagaagaaattagaataacttccttttggccacctgcccaaggaagttaactggtagaagcaaatttaaagttaacaccccaaatacagaagcaaactcatgttgcaaatggtcactgcctgccaaagccaacagtatatgtggggagatgagccctacatatttaaaaagctaaaaatatatgacaactatgctagttgttatatagctacaaagttgaattattttctaaagttcgaggagcttccaatctattatataaaaggtatattactgatctcataatataaaacaaataagtgtcagaagagaactataaacatagaattgttaggaatagcaatgaattttagctcgggataatcagaaaatgacattgagctgcgcctttaagaaaatcaaacattttaacaggtggaatttttgacaagaatgtagggcatttgtcctgggaacatgggagcatatgacccatttttggaatggtgaacagcagtctggtgtggttatagtatatacaattaataaggaagtataatgggaaatggtgtccaaggagcaggttgggaccacattgtggagtgagtttatggtctatcttggaggtaaatggaagccattaatgacttttaagaacaagggataataccagatgtgcatttcataaatgtaaattagagaatggaaaactggaggaaaaactggagaaaatacagatcataccctgagaggccagttagaaacctattactgtggtgtaatcaaaaatactgaagttaatggtagtcagagtagaagagagggaatatctttcaaaaacacttaatgggcaggatttagccaccaactgaaggagagtagaaattaaagatgacacgatattgtctagcttaagtactaaaaaggatatatttgagagtaaagataaagtcagtgaataatcagtctgtataagagacaaacttaatgcatagtcttttggggaagcaaaaaactaacactgtgggttggggctagtaatcagaattcacccagaattagccgaaatactatgggccccaagcattaggataataaagcaaagacttctttttttctacctttctttctgctgaacttgcattttatactaggtttgctcaactctctgatcaggtgcttgctctctgcatgttattgagctccaacatcagaagtaaaatgatgagatttccttcctctgaaaatgttacaggatgtcaatggcagtcatgtagtgatagttatgtctgtagtaaccgtagtaatgacttaaccttgtaaagcactttaaactttttaaacactctaacactcattcattcaacaaatatttctggacctcatttaccacgggaggtagccacgatgatcacaagtgtatgttctggagtcaggctgcttgggattgagttctggctctgccaaacactgactgtgtgaccttgagcagttcttaactcctctgtgccattttctgatcttgtctataaggtagtaataacaatcgtattggaaaaatgactgaatgagttaattcatgtaaagcatttacaaaaatgcctgggactcttaagtgttcagtatgctgtcattactttctatgagacattctggtgaatgctttaaaatggccaagggagttatcaaaaaaaagagtttctcttatgaaggagcacaaagttattgggagaaaattagatggaatatagaaaattcctaatatattttaattgataactaaaaagtatatatatttatggcatacaatgtgatgtgttgatatatgtatgcactgtggaaaagcaaaatcaagctaattaacatattcattacctcacatatttatttcttttgtggtgaaaacacttaaaatctactttcatagcagttttcaagaatacaatacattgttattaactataatcaccatgtcgtaggatgaatctcttgaacttattcctcctatctaactgaaattctgtatactttgacaaacatttctccattctcttgtcccatcagactctcataaccaccattctactctctgcttctataaattcaatgtttttagatttcacatataagtgagattatgcagtatttatctttctgtgcctggttcatttcacttaacataatgtcctccacatttattcatattgtcacaaataacaggatgcccccttttcatggctgaataatattccattgtatatatatatatatatatatatatatacacacacacacacatacatatatatatatatatcacattttctttattcattcatctactgatggacacagatcaattccagtcttagctagtgtagtaatgcttcaatgaacacaagagacagatatctctttgacatactaatttcattttagttcatattatctttaaaccaaaccttcaagaacttggttatttatctttgtacctgatctcactactccacccccaactaccactgaagtacttagaatagtagccagaataaagttggcacatctaataaatgtttgctaatctatttattatgtgtccaaagaaagatgctattaaaatgccaatagaattcaaaaggaaagactctgttcagttggaggaatcagaggtgccctttgaatgaccacagaggaggcagcatttgtggtgcacttggatgaatcattgagatttgatgttatgtcatgcgcccccacaacaggggaggtaggtagatcacattctctaatctgacgtttatagatgatactttgctgtaacaaagcatgaaggcgaagtgacttgctcaaggtcacactactgtagcaacatcagtgggctaggaactgagtgctcccagcttctagaccagttccatctggttgggatggcatagaccctgcagctttacagacagcttgtttagcacgtttggccctcattctgggttatgggctatgaacagactaaagttcctctcccgcagcctctaagtgccattgtgcactccatgtttgggcatcaatctgccttgcagccgtcattggcaatgaaattaaagctcagtgcagagcagatggaccatttccccattctggcaggcacacattaggctcccctaccgcatctaggagttgctaacaccagcagcaaaggaagggaagcatgaccaacagctatgagagtgccgtttccacggcaggcagtgtcagcaactcctccatctggggcagcagcaacaaggagacatgcctgtgcatagcaggagcactcaaaaaacgccccatgaatgaacctggcattttgaatataaaaaggcttcaagatagccaatatgagaaaaatcatagtgagaacttcctcacacttactgtacagtttcatattatgtttattttcaattacacaccacactgggggtgggaagcaccactgtcttttcaggtttgaccctttaacagttgtgatctgtttcaatttttgtttaaagcttaatgtagagtaggaaaatgtattttactatctttcctttggttgaggtcattttaagaacaaaaatacttttaacctctgtgggaccatagccacccttttgtatcaagcaggtaaaacaaaatgtcaatgttattgctatggtatttttggttttgcccaaattatttcaaatattaacttggagcagacaatgagattatgtggatggcaaatttttgacatttcctaggctatgcaaaggacattctctgggttattattccttcactttttttcaaaaaaactttcggctattggaaatttgacaaatttaatttcttggcatggctgtatcaactacaatacaaccgttttctgagttgcactcaaacactgttctcaaaaccagcagaacttttcaaaattagccacatgcctaaaatattatatttcaagtcacccaaggcagaaatacagaaagaaattatgccagatatagaatgagaaacacaacaatggaatgaggaagaatttcagacaatactcagttgaggtcagggttcaggcactgctgaggaggatataaattattacaaactttcttgctgaaaatttgctatattcataaaatgaaataaatgtcacgcagccattaaaaatcatgtgacaaatcagttcaactggaaagatgatcataatgaaatgttaaaatagaaaaaaagcaaattataaaattgtgaaaagcatgatcccattttaataaaatatacatattaaagggtatatatagattttccacatgtgtgtgtatatatatgtgggtgtgggtgtgtgtgtgtgtgtgtatgcgtgtgtgtgtgtttgtgtgaatagagaaaagtatgtatatgggcagtcaattctcattatttgcattatttatgttatgtaaagttgaattagccactattcctatgggaaataaagaattaggtttctgtgagcctctggtcacaatgtttctgtcaaccaatcaaaacaaaaccttgttttatgtgtgttttatgtgtgtttctgtttgaaatatgacttcatatatattttcacaaataattatatgcattatttctttataataacacactagtcaagaagagtttaaatttttcctgaacctgggtaaaatgaatataaatttctctgactttcagcctcagaacaatgttgtccattatgcctatttttatcaggcatcatctcatgaatcccaaattcagccatttctcccttccatagctttatcaggcactactgatgctactttagcactttccagagcaacctcacctacaggcacatatcagccaatttcctctttctttctctggatgtaccctattgtggattgcttagcattgggcttagagttaacagcattaaaactcatgcctgaatgaagcttatctaacacatgcattttttccataatgcacatcacagctttcctgagcttaaaaacactggacagcacttcagcagtactcttgggagcgattttaaagagaaaaattgccaagaaaaagtacaaaaatgggaagaagtggcactaaagtgacaatgaaaaaaaattcttggaaatatatatatatgtatatttcagagcctttcctcattacacccatccttgcttacctctcttacatttccgccccatctttgtttcttctttctccttaagtttatttccttcttgtaaaagaaaatttagctaagattgataggttcaagaagtaaaaccaaaaaaaaaaaacagttacaatcaaaaattaccagtgaaaattgtggtacacacatacacacatatatatatacacgtgtgtgtgtgtatacatatatccaagaggatatatatatatatatccatccaagaggacatatatatatgtatatatatccaagaggatatatatatatatatatatatatccaagaggatatatatatatgtatatatatccaagaggatatatatatatgtatatatatccaagaggatatatatatatgtatatatatccaagaggatatatatatatgtatatatatccaagaggatatatatatatatgtatatatatccaagaggatatatatatatgtatatatatccaagaggatatatatatatgtatatatatccaagaggatatatatatatgtatatatatccaagaggatatatatatgtatatatatccaagaggatatatatatatgtatatatatccaagaggatatatatatgtatatatatccaagaggatatatatatgtatatatatccaagaggatatatatatataagaggatatatatatatatccaagaggatatatatacatatatcttatatccatccaagaggatatatatatacacatccatccaagaggatatatatatccaagaggatacatatatatatccaagaggatacatatatatatccaagaggatacatatatatatccaagaggatatatatatacacaaggggatatatagacacaagaggatatatatatagacacaagaggatatatatatatatctagatatatatatatatatatctagaggatatatatatatatctagatatatatatatatctccaagaggatatatatatatacacaagaggatatatatatatacacacaagaggatatatatatgtacacacaagaggatatatatatatatatatccaagaggatatatatatatatatccaaggggatatatatatatatatatccaaggggatatatatatatatatatccaaggggatatatatatatatctccaaggggatatatatatatatatctccaaggggatatatatatatatctccaaggggatatatatatatatatatctccaagaggggatatatatatatatatatatatatatctccaagaggggatacatatatatatatatatatatatatatatatccaagaggggatatatatatatatacacacacaagaggtgatatatatacatatatatatctccaagaggtgattgatatatatatatatatatctccaagaggagatgtatatatatatatatatatatatatccaagaggagatatatatatatatatatatatatccaagaggagatatatatatctccaagaggatatatatatatatatctctctctccaagaggatatatatatatctctctccaagaggatatatatatatatatctctctctctacaagaggagatatatatatatatatatctccaagaggagatatatatatatatatatctccaagagggatatatatatatatatatatatatatatatatatatctccaagagggatatatatatatatatatctccaagagggatatatatatatatatctctccaagagggatatatatatatatatatctccaagagggatatatatatatatatatctccaagagggatatatatatatatatatatctccaagagggatatatatatatatatatatatatatatatatatatctccaagagggatatatatatatatatatatatctccaagagggatatatatatatatatatatatatatatatatatatctccaagagggatatatatatatatctccaagagggatatatatatatatctccaagagggatatatatatatatctatctccaagagggatacatatatatatatctatctccaagagggatatatatatataatatatctatctccaagaggagatagatatatatatatctctccaagaagagacagatacatatatatctctccaagaggagacatatatatatctccaagaggatatatatatatatatatctccaagaggatatatatatatatatatctccaagaggatatatatatatatatatctctccaagaggatatatatatatatatatatctctccaagaggatatatatatatatatatatatatctccaagaggatatatatatatatatatatctccaagaggatatatatatatctctccaagaggatatatatacatatatctctctccaagaggatatatatatctctctccacgaggatatatatacatatatctctctccaagaggatatatatacatatatctctctccaagaggatatatatatatatatctccaagagggatatatatatatatatccaagaggatatatatacacatatatatatccaagaggatatatatacacatatatatatccaagaggatatatctatatatatatatccaagaggatatatctatatatatatatatccaagaggatatatctatatatatatatatccaagaggatatatctatatatatatatatatccaagaggatatatctatatatatatatatatccaagaggatatatctatatatatatatatccaagaggatatatctatatatatatatatccaagaggatatatatatatatatatatatccaagaggatatatatatatatatatatccaagaggatatatctatatatatatatatatatatccaagaggatatatctatatatatatatatagccaagaggatatatctatatatatatatatatccaagaggatatatctatatatatatatatatccaagaggatatatctatatatatatatatatccaagaggatatatctatatatatatatatatccaagaggatatatctatatatagatatatccaagaggatatatctatatatagatatatccaagaggatatatctatatatagatatatccaagaggatatatctatatatagatatatatagatatatatctccttcgttacatatatatatccatatccaagatatatatattatatatatatccatatccaagatatatatattatatatatatccatatccaagatatatatattatatatatatccatatccaagatatatatatattatatatataatgtatctccaagagtttcgtgtgtgtgtgtgtgtgtgtgtgtgtgtttgtgtataccacaattttcactggtaactttttatcataactcttccttctttggtttcacttctctttgtacctatcaatcttagctaaattttcttttacaagaaggaaataaattaaaggaaaaagaagaaacaaagatgcagtcgaagtgtaagggagataagcaaggatgggtgtagtgaggaaaggctttgaaattgtcccaaacagcagatttaataacaaatacagtctctaaagaaaatgtttataatcagtttcttccttagagacaagtaacaaatagaaaaaatacatgtaagtgttggccattgaaggaaagaatgattatagaagatatttagggtttacttttttactgcttatatcattttctgatcaaaattttatctaataacttgatttactaataacaatatgcaccacttgcaattctgggctctagggcctcggcattaagaaattggataaggtctttaatcccttgaatttcataaaaatgggaaggtgtgagaccttcaaagtggcacatctttaattactcacatacttaagttgaggtgtgggcagtttctccgagtctgcactaactccgagtctgaatgaactttaacttcatttaaagaaaatctccatgcttagacaaagaggctagaaatgaatcatagtgagtgacatgctctgattctcattcctcgtctctatgatgtcaatgtttcaaggcagtttcctgtggtgccagagcaatagtagcattgtgcattcttctcaggtcatcacatggaacgagcaatagaaatccaatattattttctaaagcacagaagaaataaaattatatttcttctatgcaacatcatttccccataaatctttcttaacagatattatttatctgagtcaacacttccttacagtctatccacatcctattagtcctagtttagagttggcaaaacaaaagatagattttcatgtgggaagaactgttgaatggcaaatgtagccaagatggcttgtcattttgccttttcgtgcccaatatagatcaactgtgccactgatcagctaaagcaaatcctcccatccataaagagtagaaagtgttataccacagtaaaagagtcctttatgttcatgcactactcaacaagcattcttgccgagagcctagtagctgctgggagctatgccaagcactgaagaaaagctataaaaaaaatatagacaatgtccctaatatcacgcattgaccatttggttgaaggagatacacaataaacaaacaaacacacaaagtaatttcagattgtgaggactatgaagaaaaaattttaagaacagaaagtaggctgggcatggtggttcacgcctgtaaccgcagcactttgggaggccgaggcgggcggatcacgaggtcaggaaatcaagaccatcctggctaacactgtgaaaccccgtctctactaaaaatacaaaaaattaaccaggcgtcgtagcgggcgcctgtagtcccagctactcgggaggctgaggcaggagaatcacttgaacccgggaggcagagcttgcagtgagccgagatcgcaccactgcactccagcctgggcgacagagcgagactccgtctcaaaaaaaaaccaaaaaccaagaacagaaagtaatcggaagaaaaaggaaaagcaggtggagctcttagaaagtgtggccacacaaagcattcctggggacatgctatggagctgaacacaaaaaggtgagaagaatccagccaacccaagagtaaggaatggaacattccaggacatgagaacagtatatgcaaaagccctgagaagacgtggcatgtccagtgtggctatatcccagtaagaaaaggagtacaacacaacagcgttagagaaaatatgaacatgcagggcctatggggaattcagatttcaagagcaatggaaaaccattaatagatttaaaacaagggaagccctgataaaatgtcctattttaaaatgcctctccatctgctgcagggtgtagaatgtaagggaacagccaagaaaaaaataataccagtaatgaggctataactgagatccagatgagagaaaggttgaaagttgaaactggggtggcagtagtggtaatgaagagaaatgaactagttagagagatatattggaagtagaagcaacagagcatggacatttctggatttaggaaagcatgatgaaatagaaaaagaaattaaaagttattataaaattttaggcttgagaaactgagtagattgtatgatcatttactgagttgaaaaaaaaaaaaaaaggaatgagtatctgtcaggaaagtaatcagagtcctgttgggaagtgtcaatttttggatgtctagtagatacataaatagtgtcaggcagaagtatatgtgagtctagagtttaggagacaaatccagagatataaatttgggagtcttggaagtcacttagcgatagatgataattaaaggcatggaactagatgaggtcatctaggaaggaaggatgtatagatttgtggtggaaaaggcaagctatcagttaacaaactgaaaactgtgggaggtttgacaagaaaggtgaagatatgaattaattgtttcaaagagagaaatcaaactcattagggaactgtaggtgatggttgagtatcatttgaaatgtatagtcattctttaatatgaagccagtaagtcaggctttgtgattttcttcagtaaaggttggctgctgctgtacaggagcagaaaagatagctattttcaccaaagattggggttcagtcagataaggacaataaagggaaaatgaggcaaaggagttaggggtgactgcaagggaaggattataggaaaagactgtgaaatcgatttagatgaggagaaaagcaaagagaggaagtgagaagttgatggataatgaaaaacagctgggagattcagtaagctcaaaaagctattgcatagagaatcttagaataaataagcttcaggtgaatgctgttgaccaggagtaggatgtttaaaatcaagatttctgagatggtgcagatactagtgatgatacaatttaggatatgaccatgggagagagtgggtagatggagacaaaatttagatcatgtcttttgatactcagcaatttcttgtgagagaatcaaacgaaacacaccactgtgtagtggtagaacaaataatctttttggaagtagaaaaccataggttatgttatacttctgtcatttactggtggcatgccttggaaaagccttcagtgtctgtttcatgatctgaaaaaatggtgctaacaataactaagttaacattcacaggatttttgtcattgttaaatagagtgacatatatcaaactcattttaaagcagaaaaccactataaaatgcaagccataatcaggattattttataggtaagaaacaaggctcaagataactaaatgttcaaggttagatgataaatgaaggacctagaattaaacccccattatttgattcgtagtctactgctctttccaccacaccatttacaattttgtcaaacataaaatctacatctcattattaaaaagaaataacttcgcacattttgatctttgtgcaaatacatttattataacaagaaatgtggtggcacactgagttataaactgatttttcatgaattgtcacccaaaaagcagaaattcttaataccataccattacaacatattacattcatgcacctcttttttggtcaatgatgaactatataggacataggacaatggtctcataagattataatactgtagttttactctaccttttctatgtttaaatatacaaatacttaccattgtgttgcaattgcctacagtgctcagtaaagtaacaaacttcagatttgtagcctaggagcaataggctacactatatagtctaagtgtgtagtaggatataccatctaagtttgtgtaaaatacattctacgttactcacaggacaaaatcaacacatttctcagaaaatatccatgtcattaagcagtgcatgtgtgtacttccttgagtcaaagaatgagactcagcacaactcattattttgagtactaatgcccagtgcagatcctgttaagactggtgtgattgcaagaacaatccacattatgaacactggaagtttttatatttgcattacccagagtgacatgcatatatagcaactaaactttgtccaaaaataaaataaaataaaatctctcctggcccagagcattgtgttagccacagaagaaaatggaagggtatttaaatagctatttaactcactcagataaatgaactaatacaagtaaagtataatactttgtgtgactcatgaaaacaaatcaatgagaataataaactacatttagaacaaggaaaaatattgcatatttattactcttctttgatgtctagaatgaataacgtagtatgggaatcttcactaaattacagtgtgaacacatccaagctaaattgtacactattgctcacaaattatactttgctaatcaggtaatggtgctgtgtcttcttacaaagtaggcaccaaaaagtagtcatcgcagcatttgagactgggcatggactcctagagttcactcgttctttcccaaagtgcattgttgtggcaactacccctcacacacgtgttatcaaccacccactaaaaaagatgcctgtcactggccaactagtatagacccgactttaagatatggggtgagtgtctgcaagaatacttactacagcctggctcattttctgttttataaaataaaaccacctctcatttcttgttgactttcactttctaccttttcttctttatttttccaaagggagcctgaggccagatttttaaaaaggtgtttacttcagtaaacatgatttggcttgtcacctacacaatctgtcactaattcttcttccacaatcccattcacgttctcagcaaatgcctaagctgggcttctagatcagttctgctagaatttgtgtgtgtgtgtgcacgcgcgtgtgcatgtgtgcatgtccacgtgtgtgtgcatgtccacacatgtgtgcactggaggaacaagactgaaaccctgtactttctggttttgtacaagacaatgcttttattaatcacctgtctgttccctagtaccaataactccttaaaaattgctatcctagaccatcttcctgttcatcgagccctcaatcccacccatctctattatcatcacatttaattaaatgcctttgctcttacttctaccagaagatggtgattgtaagatatgaactaccttatcttccctactccaaatattccagagtctactttcctctgttcctttgattttcttccttcttaatctaagaccttctttcttccccaagactccatgcctagaatataaccaaatgtttttctacctctccacatctccactcctctttgcctgtccaagtctcattgaacaaaaagacccacctcaaatcccacctcctataggaagccttcccttatgttcccagaagaaaaagagatatacccctcttccatattcttatcacaagttttgtttttatttttattttgagatagggcctttctctgtcacccaggctggagtgtagtgatgccattatagcgccctataccctcaaattcctgggctcaagcgatcctcctgccttggcctcccaagtagctaaaactagaggtgtataccactacacctggttatttttttatttttttatggcaatggggtctcactgtgttgcccaggctgatctagaaatcctggcctcaagtgatcctcctgcttcagcttctgaaagcactgggattccaggcataagccaccatgctcagcccacaaatatttttcatacatgtgatttggcagttaacctaattctgccttgtgacaattgcataattatcttgaattgctgttttattttcctattttgttatttaacttcgtgcatatttctgatatgccttcccaactagattttaagtgttttaaaggaagacatgataacaaacatctcttttcacaatttattaaatatgcatagaattattcacttgatttgatatgtggacgttactttagatgcaatgtcaaataaaaacataaatggttttaaaagagtatcatgatgttgatataattttagagagtaattaaacaacttacataccctgaaacccacaattctgtctctagatgtttgccctaaggaaatgcttacatgtgtataccaggagcatgaccaaggaaacaatgcattattgcttgtcacaatgaaaaactggaaacaatctaaggcaatagttctcaatatgtaggttgccctccaggggacatttggaaatgtctggacatattttctgatagtcataattgatgttactggcatccagtgagtagaggccagagagggtactaaatatcctacaatgcaccgaacaatcccccaaaacaaacaattatctggttcaaaatgtgaatagtgctgaggttgaaggaccctgatctaactgttcatcagcagataagcaactgtattatatttattcaaaggaataacgttaaagcaaatgaaacaatgtgtatcaaaataggtagatcttgaaatgcaatgttgagtgaaactagaatgtggtgaaataatatacacaaatggtctgaatgtttgtatattccagaagcactcaaagccatgttataaatagaacatgaactggaaaggtatgaatcaaattcatgatttggggctgcttcaggaatgggagggagaagaatggacctagggaggataacttgaaatagatttcaactttatgatattacttcacatttaaaaaatcaaccaatattctctagagcccacataaatctgttccatcttgtggttagcgttagcaagatgttgttgcaaaaagaaatgcaaattaaactgctaaaaactaattatgagtgtaaaatgctcaaaagaatgccaaaggtagaaactcattttataaggagatgatgccccaaacatcttctttattcatctacaacccctgtgagtgggactatttgaggtcagatgccacagctgtatggctgtgaccactggttcctttccagcttctctctctcctcactcacatgtctcattcaaggccaacctgacatctacagcccaaggctgagggttttatgtagatttgtggctcttcagccatggatgaaacactccttatctacacacacactccatactgggccaatctattggaaaggacttttgtcaagacactttcttctttgatctgatcacttccatcaccacaggctgcagtgttcgcatttggctgatacccacattggttcttgcccagtcttttttttttttccaggaaagatatcttcccccactacctactatgtgcagacaggaatttaagtgaagatagattcccccagaacaatttattcaaagattattttagcaaatattttctaggtacttgctgtgctcctggacataaaatcttgatgtctgggccatctgctgccccactgctgtggcagcatctccttctaagctcggttttcccctgattccctatgctgctttagctaatgagtttctgcctgacgctacttcctctccttctccactgacttcataagaccaagatcattacactcatcccagcccattacactctccatcatactctccatctaacaaattgcagcgccctcaagtattttaaagcatcagagcaagtgaagactatacatgataaatatttatacatgataaataaaaatttatcatgtactctaaatgataatctcaaatcaaagaaatggtttgagaaaaaaatatatattcagtatatttttgttttctataatacacactatagaaagtaaaacctgacaaaatgttcttggctggcagaaaacagaatgaaaagcactgcaggaggtatggattttgaaaggtcaagaagtcttactctcaggacacctgctttgccatttcacttccctaaaggagctctgcccatttctagagagaggcaacgtgcatttacttctcaggcagatctgcattttcgcctcatagatcttactgacctatttcttatttcccccacataaacaataaaagtaataaaaagagccacatgtacatttcacagagcaaataaaaaaccaagacatactcatcaattcagtgtatctaattttcacatttttcctttagtttcacatgagtgaaatctgaaaggaagaataccccataatgtaccaacattgcacggtgaagaagtgatagcaatattagagagctgtctaatgtccaaagcaaaacaaacccagcaaacccaacccaatccctcctctaagaaacacttacatttacgccatctactgaaagttcacctgccacttgaagtgcaagacactttgagttttctaaatgtgccttcttctattgacttgatcaatttagcttttcactcatggtgtgtatggtctctgatttaccttgaattcactggaaccatttgatgttttggccattattttcccattaaagtatatatggtgtaaatggattttcaggttcactgagagtataaaaagctttcactgcttaatgaaagtgtgttctatcatgtcttatggttagtgcctacataaccagttcttgcaccaggacagggtaaaatgggaaagaccagcaaccctctgctggggtggggtaagaggggggtgtgatccagctgttgacactcaaagatggtgcagtttgtgcaaggcgtgagatcgagcataaggtaaaaataacaactacgggagagaggcaaagaatcctaccagtaaggtaccccaaaaggtggacacaggataagaattgcaaatccattaataatattccagaaaagaaggtagaaagtataaaaatacttgatttcgtaaaaatgttgattctccccaaattaattcaaaaattcagagaaattccaatcaagatcctacgagaatttttaaacttgtaaatgtgacaaactgtttctaacgtttatctggaagaaaaagtgctgaagaatagccaacaaatttttatgagaaaaaattacaatgatggtctagtgttagcaaatactaaaatgtgacataaagctacagcaatcaaaaccttctggatgccagaatatgcaaattatataaataaattagagtataatttaaaaacagatctatgtattacttacaaatgtagtctctagtaaaactggctcttaacagaaaaaaatgtctgtaactcagtcaataatttatacaatttattgtccaaatcagaacagtttgacagtaaaaaggaataccaataggatgatagaacaacagccaaatattgaactatcctatgcaaatcttgacatatgtctacatagttacctatagggctgtttctgcataatttatagctcctcatttcactctcagagccagttcgggtactaaattctagttgcccaagttataaggcctggtctccaggcaggtgttcaagagccaagctccaggctctgagagaggctatgccaagaacaagacagggcccatattctcagacatgattggaagataacatctaggttacatctacaggaatttgacagcaatcaaggcagagatttagtttcaatgacttgaaatacaagagacaggagcttcaggttaccctgatgttgagcaccaaaatgctgatcaagagggatagcctcaggtttggagtgaacagaagatgaggaccaagtgcggtattgtatgaaggccaggaaacagacaggacctagcggtgttttcactttacttttacctacttcacaagtgtcataaatttttagggaaattcttgagacaaactgaccattatttttaccaacataaaaaagcaaactaccataaaatgattctcagtaagaaagcttcaacagttaaaatcaaaaaaaatatgtgaaaatggtgcagagggctgccaagaactctgatagagtccatacacattttactatcactgaaatttacataaagtatttattgctggacactttacatgcactatctcatttaaccacacccaccactccaagctattgtattagcttcacctaagagaagccgaggcttccaggagacgtacctcacatcctggctaattggcagagtcagaactcaagtctttttgactcttagcttttatgtcttgttggtatcaggattaatttgggggtaaatgaatagagatgcctggcagcacaggataagtccaacagatactctcaggaaaaacaattgcacaaaatctagtcagttatgttttagttttgaagaaaataaatactcattaaattataattatctggtttacccgataacaccaaaatcacaataccattcttagaataatccttggctcttcttttgctcacacactctacaatcaaatcctgtcagtccagtcctcaaaatagattcagcatctccaacgctaccctactgctccacaagcccatcatctctgtcctgactctttctaaatacaatgtcaaaatgggtctctctgttccaacccttgctcactgcaagggctcaacctgtcagccagaaggactccattaaaagtgacgttgatcatgtccattagatgctcaaagccctgcagcagctctccacttcactccaggcaaaagacaagtcctggacattgcctacaggccttttgtgatctggcttcctgctgactttctttttctttctttctttcttttttttttttttttttttttttttgagacagggtctcactctgtcacccaggcgggagtacggtggtacaatcatagctcactgcagcctcaacctcctgggctccagcaaccctcccaatcttggcctcccaaagcattggaattacaggcatgagccatggcaccagccctctactaactttctaatgcacctcccccacttccatgtgactcactttgcttctttgctgttcttcaaatacagtaagcacattatcacctcagggtctacatttgccattcgcctgccttgaatgggaaatctacttgcttacctcaccaccagatcccttacccctgatctcatggccagatcccttatttatttatctcatggacagattccttatctctttatctcatagctaaatttcttacctccttacttcatggagagatcccttacctccttacctcatgaccagatcccttacctccttacctcattgctaaatttcttacctactcactccatagctaaattccttacttactcgcctctagctaaatcctttacctccttcaggtcctcatcaaaatgttggtttattagtgaggtcactaatagattaactaacgatcccctcctcccacgtatcttcttcccctgcataatattctccaaggcattatcaccagccaacatgatatatatacagtcataattcgttatctttatctctttatcccacttgaatgtgttagcttgaaccatatgacactgccttttatgtaggtagaaaatggtcaaatgtctataatttcattttgtttaacttagtagttgatatggtttggctgtgtccccaaccaaatctcatcttgaattgtaattccgatgtgtcatgggaggaggctggaaggatgcaactgaattttgggggcaggtctttcccatgctattctcatgacagtgaataagtctcacaagatctgacagttttaaaaaaacaggggttttcctgcacaagctctcttgtcttgtctgccaccatgtgagacgtgtctttcaccttctgccatgattgtgaggctttcccagccacgtagaactgtaagtccaataaatctcttacttttgtaaattacccagtctcaggtatgtctttatcagcagtgtaaaagtggactaatacagtaactttataatgatctgtttcatacactgctaaatttcctaatgcagataacactgccttgcatataacaggtgttcaataaataattgtttaaaaatgacttgtttggcacaagttttaaataactgaaacatgtagaagtaggtagatgtcttgtctaactgatggtaattaatttccatctcagcccaatttagtccccaattatcacatcttatatacccagttaggaaattagttcaacctgaaccacccttgtggtttctttggaactcaaagctagcggtattcaccccatttgcctctgtctcttcaaagacttcaaagctctgagtttttcctgttgacagtttcaaaaaaaaaagaagttatctattactttttgttcttggacctcccctacatattccacactttggaaggggaaacctggcatggacgagggcattctggggtccctggcaggctgttcccggatcacacagtcacggcaactctttactgagttaggagtaggaaaaaggtagaaaggcctatcgtcctccctttctgctctctttgttcaaggcttagagagtcttgatccccaatcttaatatatactaaataacattttatttccacttcattattttcttgcagaaagttaactgctttcttactattcaacatggcttttatttttaaattttaagtattttaaaattccatggaagattatgtatttatagcagtaaatgctcaataatattaatatcagacctgcttttccccctttttgaatctgggtccaaaataatcaaataggctttaccctatttgttctgtcaaatgtatttgtactgggtctgagacaccgtaacacaaagaacataatcattactggaatgtaatgaggagaatgtgcatatcttgggaattaccatatatgcatgttcactacctcttcctccccactcttcccaccaactcagactccagatccatattcttttttgggactccagaaattcaccagggatattcttccaaaggtttgtgatacctccttttctcttgctgatataattgccaagctgtgtgaggtaaggagctctctatcctgccagttctcatttacagacagaaagccattacatcttcatttcagccacagaccaaatgttcagtgtgtcttattaaaaaatattaactcaaagttgttttagtacagagttttctgcttcagttactgtcttagtccatttgtgctgctataacaaaatgtgacacactgggtaatttacaaagaacaaaaatgtattttctcacaattctggagactgggaagtccatgaagaggtctgagcattggtgtctggtgagagaccactccattgatgaaatttttaatggtagcatcctcacatgacagaaggcagaagtgtgaaaagggccaaaggctgtgtgaagcctcttctttaaaggtcctaagcccacgaacatgggctccacctttatggcttaatctcctcataaagactccacatcttaatactatcacgctggtaagtaagttttagcagaggaatggggagaggggcattcagacctaccagttacagtcctacctttcatgtctacacctttctttggactgagccttggaaagatacaaggtgaaaaaagaaagaaagaaagaaaagaaagacaggataggaaacatatctacagagccctttctatgtcccaggttcctgttccatatattgccttgtttccatctcacggttttggggaatccattaaatctagagcaggtgagtaagaaaatacttgaagtcaagcaattaggtaatctaagacagtggctgtgtgggaagttacatggagatgggctctgaaccatcatggggacttgagcactctactctcatttatattccagaagagttgtggacattcctggccagatctgtgtaacagaagccaggaaaagcacacactgagggcacccccgctctggactgtaatgaaggcaaaagcgttaggcttgccaagaaacacttctacttccttgttccccatttaaacttgaaatgacttcactatccttctttccccctttgtaatttaggatatgtccaaaatgagcagacagtaagaacaatagctctaaattataccaacagtttaaataccattttaacacttagtgcaattttaaatgttgtgcattccttctacctagcatctcagtattttccttgttcctttgaccttagttttgactagaagctcttctgtgaggttgcaaaagagttcaacttctggaggttaccaagcctcccagaaccatctttacacaaatgcaggtatagatctgctatcagaaacagattcactttctttatgccacatgatattaatatcctaattccagaaatgcatctaaagttcaaggacatattgtagcatcttgactttctggaccaagaactaatatatgattcatacaaaaataagaatgctattaaaaactgtctacagtctaccagttaatattcactgccaaatcataaattacattttttttaaacacttgatttcttttaaggtttaccatattcctgatactgtctgaaaacagggaattaatccttcacatctagtgtgatatctgacacctactatgtgttatataacaaatgttatgtaaataaatgcatcagtaaataaaacacccagagaaattgttttaaagacaaagaaaaggagattaactttttttagagaaaatattgaggaggaatgacctaacacttatattctagataaaatcgaattttaactatctttttactgaaacctaaacttcctggattttcacgctaaaaatattagattcttaaaataggagttctttttcttaagcgataatcacttatcctcagatatactatgcaaaacatgtccatttcataccaaatagctacccttctagagtatttgggaaacattttgatataatgaatatggctcttgtcaaacatgttattctctatctaaatgcaaattcatttacaaatgacaagcaataaagaaaattagaatcattttgcttgagttttgacacaggaagtcatcaaggacaactcagggactttctcctctggggctcccaagaacaaaagctaaactgcagcactctctatgtatctcgagggagattacctgcctccagactggtttaagtcaatggatcctgctttcatttataattttcagaggtatccagtaactgatgcttctccccagggttccatcttaagcaccccttcccttctcaccctgcagaattttcttaaaaattcttaacactccgaagtctgtatctacaacctggacctttattctgagtcctagcatgtgtcaactgcctacaacactttccccaagtgtcttctttgtcattttctttacctttcccaaccactccctgccttccccaacaactccatccactcatccactcaatccctgctccaaagcacctctcattttattattttattatatttcccatactggttaataatgccaccatccacacagtccccaaagagagtttaaaaatcatttttaattcctccctccatcatcttcactctctttagtctaatcagtcatcaagccctgaccctatatcttctaaatactgcctgtatttgttcattcttttcacccctacccttggttggagtatggccattaccatccaattccctgctcatagtttcatctgctctaatttatcctcaacattaccttcacagtaacatttcaaatatgtaaatatgatcgagtggctgactcccttgcttaaaagcatgtgatgaagttcaaatttttaaaaaataatttaaatgtttaatgggacaccatcacctttcaagatagagcctggtacttctgcatggtcttcacaaggcaggtggggaatttcagaatctgactcttcactcacaatttcctgtatgtatcatagacgaccctcccagccaggaatgttgacatgatcacagaatacataaataaaaggaggtgatagttttgccatcctcagaagtaattagatgacaccagaagttgtataatcagaaaaacagaatcgtacagtgtttaaaagtgtagactcctaatgtaggctgctggagttcaaaccctggctcctctacttgccggttttgagcaagttatgaagctatgcaaccttcatcagtaaaataggaataataaaaatacctatcttatgggggtttccggcaactacattaattaaaatatacaaagcaacatgaaataataaatgttaatattgtaatgcccataatactttaagagagatattaaccaatggagcatagcctgacaaggtgaccagaatatgaagacaaactgagattatgccatgtgaagaataattgtagttatatgcaacttacagtaaagaaatgttggccaggcacggtggctcacgcctgtaatcccagcactttggcaggtcaaggcaggcagatcacaaggtcaggagttcaagaccagcctggccaacattgtgaaatcccatctctactaaaaatacaaaaaattagctgggtgtgatgacgggcgcctgtaatccaagctactcagaggctgaggcaggagaattccttgaacctgggaggcagaggttgcagtgagctgagatcacgccactgcactccagcccgggtgacagtgcaagactccgtctcaaaaacaaaaaagtcagaaatgttggcaagacattacatggcaagatgtactaaaatatctggaaagcaatccagagtgttgaaccaggaacattagtggaactcttgggaaacaaattctagctcaaattctagaaacacttttcataaaagaaatgtctaacaataagagggtttgtcatcagagaaagtgggttcccctccactaaaggtgtttaaccaatagctggataactcttcatttacaatatttcaaagaaattgatcaaaaaaatgcaggggagaaaaatgacttctaagggacttaggggtctcagatgacaaagggcttcatatgtcacctaacagtaaataggtgcttatagtaattatttttagtaaattccataaagtataaatagtcatggcatgagcttaggttgatttgtcatctagtttcccttaataaccctgtttacccagtgatgagtaaaatacagatctagggatgtgtcacatcatctgaaattatttccccagctccatgattcatcgtggacagctctagacaaatgctctcaagtggtagctgtccctggctactgcagctgcatttccttttgttcccatggaatttttcttgaaaaacacaatgactatttttttacctctacaatttgcttgcagtgtttcttttcattcatttaacgtgttttgaaagcaatatgccaaagggaatttgagaggagttttattttgaccctatgtatcagtttcaagaaggtgaaaaagttcagaaacaaagaaattgagtcatcttttgaccttgatacaactgaagctttaagataaatccattaaaaagagctactcagtcgaattcctactatgtaccaataataattctattttaaaaataaaaaaacaggctaagacgggcttaatagccaactcaaagccacatggtcaataaggaggaaagctgagagtcagtcatgtgagtctaatgtcaaatatattatgcctgatttctaccctttaagacacacacacacacacacacacacacacacacacacacacacacacacctgttccaggctcactccctgcatcatacagtaaagcatgtctcaaatcttgaaggtaggagaagccagtgtaccattctctatggtcctgaaccatctttcaccctgaggaacacaccaaggccagtctttgaatttgcatataatatttgatgttacagtttgtacctgcacgttactgtttggcctggatttgtccactggctcaggactagccagttaggctctccctccctgtagcaccaacaccctccaacccgactcctggcacctggccactgggcgtttccttaccaccacctgcacaagagcgatgtgataatttagtcatttaatcatccatttcagctggagtgtcaagacatgttatgctgtgattggttatgaatggcacagcataaagttttgcataacttggagtccatactgcagcctgacctttcagaatatggaaattccatggcatggaatacaagaaaatgtgtgaaatgtgaggggaaaggatgaagaaagcaccatctcgtattgatacttaaggggcaaaaggaatgtgcagtgatgaatcccactgtaccaaggaccaactcctcccagacccaagtctggatttttcacagtgggttattctccagctgcacaacatggaccttctacttgaggaggccccagcctcccacccagccttcacacaaaatgctcacatcagtgagtccatttgatggcctttcccagaaattcttcccactgttattcattttctttggctttcaatatccacctcttccagaagaccatctctaaagtttgtatttatgatcccctccttgaagtaaggcactgcaaaaatcttttttgggtttacttagagatgatgggaagccattgatggatacacgtaaactagaagaattgtactggcataggtaaaaatcaacaagaacaagggagaacatgactgtttttctttacaggttgtaaattagaatttgaaaaagttcaaacgtcatagtcaatatgtcctttaagttacatttaatttatagattctttctccattttatctttgcaatttatttctctaaggctccactttgtagtgtagagtttctcagtatcaattttgctgaccgattcccacaatattttataacatgttcctctgtcctctttactttctataaattgttcataggatctaagggattgattatattcaggttcaggttttttgtaagactaaatcataattgatattgtagttgttctctttttgataataaaaatcattcatgatcaaggtctcagtacattaacccattatgagttgcaaaatgatgatagtttaattctactataccatcctcattaactaagttaaatacttctacaaagaaaaactttaattcacctactatttggtttcccagtgctttagttaataaaagaaatataggataaatgatggattcttttcctatacttaccaggtttcaatataataagttgattccctagcatcttctaatggtgaccaattagttgttttttttaaaaaaaaaaaaaaaaaaagcactatgaaattatgggttaaacacatttgctgtatttctattcatttcagctgttgtcctgattgatacttagattgccctttctttgttccatcttcaagttggtccctgaactcctttgaagcaatcctgatagtctgatagtctttgatagatgccctgctatctagtgtaattcatcttccttatttcctgtcccacatctggaatcagtcttctccctaaggaatctttattccttataggaacaatgctggcattttctccaacgatcttaatccatcctgaatgtctattgcatttctgcacttcaccccaacaccatgcctcccagttgagactcagggatgcaaggagggattgaaagttcctcatgaatatgatgacagataggtttaggctcaaagatggctgaagcccagggatgtccatgacataaatgacttggtagaaataataaaataatggtattacaatttcaagtggctactatgacacagccatatcaaaataccctgctgtaaggcaagccaaccagttaggaggcaatttgattatttcaggaaaagcagcatgataggtattggagtcaaactaacttgggtttgaatcccgtatctactacttgaaaatttgcatgaccttgggcaaattacttaacctccctaagcctcagcatcctcattcataaaataggatagtaataacacatatctgatagggttatcaatgtaatacatgtaaaacataagacctattacataccaagtgctcaataaataaaaatagtgattatttttgacattttattattgctaaaatttatatactgacagacagcagattctaaaacagtgcaaaacagtagccactagccacaggtgactactgagcactccaaatgtggttggtctgcactgcaaagtgctataagtataaaatatgcactgaatttcaaagcctttgtgaaagtaatgtaaattataccattaattctttttatttttattacatgatgaaattgtaatattttgggcatattaggttaaataaaatatattattagaattaatttttcctatttcttttattattttaatgtaatactagaaaatttaaaattatatatgtgacacattctacttctactggacagtgcttctctagagatattaagaagatatttttgttttgttttgtttacagcaaaggggaccaaatgaattaagaatatatgacgggcacggtggctcacgcctgtaatcccagcactttgggaggctgaggtgggtggattacctgaggtcaggggtttgagaccagcctggccaacatggtgaaaccccgtctctactaaaaatacaaaaatcagccaagcgtggtggcacacgcctgtaatcccagctactcgggaggctgaggcaggagaattgcttgagccaaggagacagaggttgcagtaagccaagattgtgccactgcactccagccttggagcaagactctgtctaaaaatttaaaaaataataataatatatatatacacatatatatacatatatgtatatagtaagcaaaggtttggtgactgctgggatctgggatgaggggtgaggaacaggggggagtgatggaccacctctagttttctggcctaaatcatttctttcatggagcctatgcacctgacactttctaacatgaaaccgcttttttttttctttttttattatactttaagttttagggtacatgtgcacatagtgcaggttagttacatatgtatacatgtgccatgctggtgcgctgcacccactaactcgtcatctagcattaggtatatctcccagtgctatccctcccccctccccccaccccaccacagtccccagagtgtgatattccccttcctgtgtccatgtgatctcattgttcaattcccacctatgagtgagaatatgcggtgtttggttttttgttcttgcgatagtttactgagaatgatgatttccaatttcatccatgtccctacaaaggacgtgaactcatcattttttatggctgcatagtattccatggtgtatatgtgccacattttcttaatccagtctatcattgttggacatttgggttggttccaagtctttgctattgtgaataatgccacaataaacatacgtgtgcatgtgtctttatagcagcatgatttatagtcctttgggtatatacccagtaatgggatggctgggtcaaatggtatttctagttctagatccctgaggaatcgccacactgacttccacaatggttgaactagtgtacagtcccaccaacagtgtaaaagtgttcctatttttccacatcctctccagcacctgttgtttccagactttttaatgattgccattctaactggcgtgagatggtatctcattgtggttttgatttgcatttctctgatggccagtgatgatgagcattttttcatgtgttttttggctgcataaatgtcttcttttgagaagtgtctgttcatgtcctttgcccactttttgatggggttgtttgtttttttcttgtaaatttgtttgagttcattgtagattctggatattagccctttgtcagatgagtaggttgcgaaaattttctcccattttgtagtttgcctgttcactctgatggtagtttcttttgctgtgcagaagctctttagtttaattagatcccatttgtcaattttggcttttgttgccattgcttttggtgttttagacaggaagtccttgcccatgcctatgtcctgaatggtaatgcctaggttttcttctagggtttttatggttttaggtctaacatttaagtctttaatccatcttgaattgatttttgtataaggtgtaaggaagggatccagtttcagttttctacatatggctagccagttttcccagcaccatttattaaatagggaatcctttccccattgcttgtttttctcaggtttgtcaaagatcagatagttgtagatatacggcgttatttctgagggctctgttctgttccactgatctatatctctgttttggtaccagtaccatgctgttttggttactgtagccttgtggtatagtttgaagtcaggtagcatgatgcctccagctttgttcttttggcttaggattgacttggcaatgcgggctcttttttggttccatatgaactttaaagtagttttttccaattctgtgaagaaagtcattggtagcttgatggggatggcattgaatctgtaaattaccttgggcagtatggccattttcacgatattgattcttcctacccaggagcatggaatgttcttccatttgtttgtatcctcttttatttccttgagcagtggtttgtagttctccttgaagaggtccttcacatcccttgtaaggtggattcctaggtattttattctctttgaagcaattgtgaatgggagttcactcatgatttggctctctgtttgtctgttgttggtgtataagaacgcttgtgatttttgtacattgattttgtatcctgagactttgctgaagttgcttatcagcttaaggagatttggggctgagacaatggggttttctagatatacaatcatgtcgtctgcaaacagggataatttgacttcctcttttcctaattgaataccctttatttccttctcctgcctaattgccctggccagaacttccaacactatgtcgaataggagtggtgagagagggcatccctgtcttgtgccagttttcaaagggaatgcttccagtttttgtccattcagtatgatattggctgtgggtttgtcgtagatagctcttattattttgaaatacgtcccatcaatatctaatttattgagattttttagcatgaagggttgttgaatttgaaaccgcttttaatgaatgcttcttaacagactgatgtctattttcccaagaaaacaactgtctctattggctgctatagcctatgggcaaagaggcagttcttctgggtcttgacagcagatgttggacaaaataaccaaatctgttcttttgggagaaataatttacatttattagtacctatcatgttccagacatttaatatgtcttcttgcatcatagcaaaacaattgttggaggtagctattacaaccttcatttttacagataaggacattgagattcagaggttaactagcttaccccgtgtcatatagcaaagaaggatcagaagtgagaggtaaaagcaagtccatctgcctttttgatccatgcttcctctttgtaaactgggttgtcttttaggagtatatgtgtccctaatttagaactcaagaatctatatgctacaaaatgtaggagatgcaagctcttaaactattctaagttatttatgttatttatagggcttccttggcacccaagtcatcctattaaacattttccaggcaattctgaaagcatagatttttttaaaggagtatctaatttaatacttctcaagagtctttcaccatagaatccaagcaatttgacctgacctggtttttctttgacctgtagccatccaaagagaatcattattcctgttaactgatttttttaaatacatctttaagtataatccttcaatgagtgagagtaggatttagaatttcaaatacattttcctttatctgcttagtgtcttttgcattgtaaaagtcttttgttgttggatccatttgcttctaagtggccttttacctgaagccttaaaaaaaaaaaaaaaaaaaaaactatccaagaaaaccaaaaagtatccactcttaatgttggcatctggcccagaatatctctgacaaatgctaatattcaatgatttctctgaattatgtctcaaatcccttcagtcaggctaatgctcttaatttagcatgttaggaatcaggcagaaatatggccaaaagccttaaatgaaaaagaattaaagatgaaaaatatttttaaaaatctaataagcatctaaagagataataaacatcattattaatcaaagaaatgaaaatgttcaataagataccatcacacactcactaaaataactagaatgaaaatttaggcaatgctaattttttgaaagatttagagtaaatgataactattgtgctcaataagttataatataaatttgacaattgcataggagaactttttggcagtttctaataatacaatttaaaatacacatattctatatcctataaatttacatgatgaaatattatacagtaataacaataattgataattgccatacagaatgacagtgaggaatattaaaaatatagtattacaaacataatatttcaaatataacatgacaaataatattataagatacaaaaattacatattgaccgattcaaattttgcaaaatttaaaaacctatgaaatgaatctataatattaaaaaagcacaatagtggttatccctggaaagtaagtagagaatggaaggtgaataaaaaggggttctgtgattctgctacaattctgtttcttgacttggatgctggttttacacatgtgttcagtttgtaaaaacttattcaactgcacactaagttttatagaattttctcttttaaagtatacacccatataaagttaaaacattggcatgttaggtatattaggatatataaaaaagcatattcatttgtatacatataaataaacagctctgtgtaaataagtagctactaataatgtcaagcctattattttaattaatcttcatgagaaattttaaaggttgcattaacagtctcattttggagacaagagtattaagactcagaaaagttaattagcttgcacccagtgtaatactgatagcaaaagaacagaaatggaattcaaactcagtcatctctatctccagagtttcttaccacaattgcactaagcaataaaagacatgaataaatcaaaggaagctttgtcctattggcaaaaagaaagggctgaatgactcagtttcaggctgagaacactgagttcagtatgctggtttccttcaggaatagaattttacacatattatgagttcagagaggctgtggacaaatttaattatagttcacccaataaccaccacaattggatagaataggtccagtgaaccatattttcttggccacaaaatacctcccttaccaatttgccatgacacttaaaatttccacaattaatcattagctcccctttgggatggagtagtagtttatccattgcattagagatagggctccatggggaaatggaatagggtgaggaagaaataaggtacaaaaacgtggttggatcctaacaccataagaagttttgtgcccaagatgcccaactctagaaatgcagcccatagaaatcattaacaaggatcagtggaggactttcatttcgccttcccatttgatgcttaatctttccaccctcgactttactagatttgccatgagcattaccgaatattcatttacgagttaatgggtgcagcacaccaacatggcacatgtatacatatgtaacaaacctgcacgttgtgcacatgtaccctaaaacttaaagtataataataaagtaaaaaaactaaaaaaagtattaactgggtggtgtctcatgtaatatgactcacctaaagccaaaaaataaaaaaacctacttgcaatttttcaaaaaaaaaaagaaataaataaacaaaatgtaaaatataaattacatttaaccaaagacagattataagtcaaataagttgcaggaacagacctcgatttcaactttccaaagtagaacataagaaaacttttcaggtgaaaggaaccttagactcatctttttcaatcccacatgttacatataaggaataggagaccacgaggcaaaacgaccccagttacagatgagttaatagcatagctagtgctctttccatggctcactcttttctttgtgcctttctccataaaaaattaaatatcacatctatgaatgtctactgaatacatttaactgtgtgaacctttacaccgattttatctttcaaatctaatatatatgtaattcatttttaagtggtaatagcatatacttaatgcttcccatgttgcagacatttttcacacattaactcacatgtatatcatatatatattcaggtattaacatatatatgtattaactcacatatattcacgttacatatagtatgtactgttgcatacgcacatatatggtataaaattattgcactgtaacatcacaaagtatatcacataagttaactcaaccttcacaagaactttatgaggtatatactgttattatcacgctaattttacggaagaaaagacaaatgtaaaaaagcattagaaattgcccaaggccacttagataataaggagcaaagcctaggtttgggtccatctgttcatattcttaccattatattttattttcttgtctttttctcatcctgccacactcttctatcatccctcattttccctctctctctaaattttgtgtcatgaagaattaatggaagaaataagctgaatgttgccatcgcttaaccattacttctttgatggagttttggtacttcatttgcctagcaaaaattaaattctgaaaaaaaattaaattttgaaaaaattcaaaaccaatgagagaacgttggttttgaagttggacaggcttggattgaaattttatcttcaccaatgaacagttatgtgaactgagaaaattacttagtttcctgaaaattagtttcctctttgggtaaagagttctcataaaggttactgtcagatgcatacaaatgcattatgtacataggtctagagaagtatctcacattttcatgtctattgttgtcatctcaagttcttctccataaagagctcttattacagtttgaatccctatagaaacaagagttaaaccacattcaccatggaggaaagggtggtttcaacataaatctgtcatttatactgatctaggaggaacacatgagttatgagcaggtttcctcacaccagctgtgtatgcgtgatgcccaacacagtgaaggtttaacaattaagctggttttaaatgtgtagcatagaaggaatcaaaactgaacatcagttgtgattattcacttgtacagctcactaaaggtaaattatcaaacagtgaactaattaagaccatgtaaaaatgtgttttccatttcttcagagggcttttcgggttctttggaaaaaaatcaaacagaagggctttatgtatcagtatggccaaattttgaaaaaaaattctgctatttcccccaaatggaaaaaactaacatttactgagtacctacagaataccatatatattatttcaaataattgtcacatggaaatcctgtatgatatctgctgttactctaattttcttgatgaggaaaatgaaactcagggaaattaacaatgtatttgtgtcatataattactaaataatggagctgggattgcaacctgaatctaatttaaaagttctttcaactaaacctgagatggtcatttctgatagctgtgatgaccatagaagtgatgcaatgcaaaacttattttattatttatgaacatgcctaacaatcttatattaaagacacccatccacacttgtctgacctgcttgtctagtcctctagaccaaagttctataagagcagaggcattgtctgatatgtttatcaatatgttcccaacacccaactcggtgcctgccacctagctaaaagttcagtatttgttggataaagaagtgaatgctgaattgattaaaaagaatacagattagctccacagtcatattttcacagatggtgaaactgggggaatagggagtgttttgtctgcagtttaccattgctcagtgacagaatgaagattaggaacccaaagctgtgaataaaagcccattgctgagtttaacgaaccaagtcaacagcaggctaaaggacaggtacattatttaacctgagctgctgtcctcctgaaacagatgtcaatgcgtcatgattatatgagcagcagttgttttacataacacatgacagaggtcacaagtgaccaccacaccattgccagtcagaggagtccatacatggttgccccagcaactgaaaagcaggctgcaagacaacctaatagaaccctccagcaatcaccaccacttccaagcaataggaacactacatggaaagacaatccacacaagaaaacaccttcataagaagcaaaaatcaggtgagcagtcacagtacccggttttaaaatcataacaaggaaagcgcattgaaaagggtaggaaaaacagtcttgaattgcccacactgccacttccatcccctggcagaagctgcatggcacagaaaaagaatctgtgtgcttggagaagagcacagtgattgtgggactttgcattgaaattcacagctgccctgtcacagtggaaaacaacatgggggcagaacccagctggcaccatcagacagaatatttagacaagccctagccagagaagaatcacccttctcagtggtcagaacctgagttccagctagctccatcactgtgggaaaaagtcctctaaggtcctaaataaacttgaaaggcagcctaggccacaaggactgcaattcctgagcaagtcctgatgctgtgctgggcttatagcctgtggacttggtgggtgcacaacccagggagacaccatccggggcaactaagggagtacttgtgtcacccctcccccaaacccaggcagtgcagcttgcagctccaggagagactcctttcttctgcttgaggagaggtaaggggaaagtaaagagaactttgtcttggaacttggataccagcccaaccacagtggaatatggcaccaggcagagtcctaaggactctattccaggcccttgcttatggatgacatttctagatacactgtgggccagaagggaacctactgccttgaagggaagaaactagtccaggtaggatttatcacctgctgactaaagggtccttgggccttaaataaacatcagtggttgccaggcagtacttatcacggggcttcagtgagacccagggtcatgctggctttaagtgtgacccagcacattcccagctgtggtgcccatagagagagacttcttctgttgaggaaaggagagggaagactaaagggcactttgtcttgcagcttgggtaccaacttggccacagtagggtagggcaccaagcaggcttctgggatccccaattccatatcttggttcctgaatggcatttctggactcatcctgggctggaggggtgatcactgccttaaaaagagaaactcaggcctagctgggttcactatctgctgcctgaagggacttttgtccttgagtgaatatcagcagtagccaggcagtggtcactgtgcaccttgggtaagaaatagtgctgtgctggctttggatccagtccagtgcagtcccagtggtggtggccacagaggtgcttgtgtcacccctccaacagctccaggcaactcggcacaaagagagacacttcatttcttcagggaaaagttaaggaagaggagaagagtctctgcctggtaatccagggacttctactgcatcttaccaagacaattaaggtagtatctctacaagtctgcaagagccacagtgttactgggcttgaggtatcccataatgcagatacagctgcagtgaccaaagttttagatcacaacacttcattcctcttgaatacctggaaagccttcccaagaaggacagatacaaactactccagactgcaaaaactataataaatacctaactgttcaatgcccagacattgctgaacatccacaagcaccgataccatccaggaaaacatgacctcaccaaatgaagtaaataaggcacaagtggccaataccggaatgacagacatatgtgacctttcagacagaaaattcagcatagctgttttaaggaagctcaatggaattcaagacaacacagagaaggaattcaaaatcctaccagttaaatttaacaaagagattgaaatagtttttaaaaattaagcaaaaattctggagttgaaaaatttaactgacatactgaagaatgtatcagagtcttccaacagctgaactaatgaagcagaataaataattagtgagcttgaaaacaggctgttttaaaacacagtcagaggagacaaaagaaaaaagaacaaaaaacaatgaatcacaccgacaggatctgtaaaatagccccaaaagggcaaatctaagagttattggccttaaggaggaggcagaaaaacagatagagtagaaagtgtattcaaagggataataacagagaaaatcccaaacctagagaaagatatcaatattcaagtacaggaaggttataaaacaccaaacagatttaactcaaagaagattacctcaaagcatttaacaatcaaacttccaaaggttaggaataaagaaaggatattaaaagcagcaagagaaaaaaagtaaataacatataaagaagttccagtatgtctggcagcagacatctcagtggaaacctttcaggccaggagagggtggcatgacatatttaaagtactgaaagaaaaaaaaaaaaaaaaactttcctcataaaatagtatacccagcaaaaatatcttttaaacatgaaggagaaaatgttttcccagacaaagaaaagctgagggatttcatcaatacgagacctgtcctacaagaaatgctaaaggagttcttcagtctgaaagaaaaggatgttaagcaataaaaaatcatctcaaggtacaaaatccactgaaaacagcaagtacacagacaaactcagaatattagaacattgtaattgtggtatataaagtactcatatcttgagtagaaagactaaaagataaacctatcaaaaataataattacaacatcttttcaagacatagtataataaggaataaatagaaatgactaaaagtttaaaagtgggatgaattgagttaaaatgtcaaatttgtattagttttcctcttatttgtctgcttgttgtttttgtttgtttttgaaatcagtgttaagttgttgtcagcttaaaataatgggttataagatgttatttgcaagcctcatggtaacctcaaatcaaaaaacctaccacagatacacagacaattaaaagtgagaaattaaagcataccactagaaaaaaaattaccttcacaaaaatgaacacgggaagaaaagaaggaagaaagagaagactgcaaaacaaccagaaagcaagcaataaaattgcaggagtacatctttacatatcaataataacattggatggaaataaatgaacatcttcaatcaaaagacatagagtggctgaatggatttaaaaaaaaagaccaaatggtctgttgcctacaaggaacacacttcacctatatatacacataggctaaagacaaaggagtggaaaaagatattccttgcaaatgaaaaccaaaaaagagcagaagtagctattcttatattgtatgaaagagatttcaagacaaaaactagtgatggactaagagctccagctggggaagtgtcactgccaagcctgcagcctgacgccctctcaatagtgcctgcattgggtgtcacagcacctgtctgagcactgggcacacccaagggcaggctcagctcccacccagccttcccatcttggctgctgcttggagcctgtactgtcactgctgccctttctctcaggccacacagcccagtaaacacagccacaagctacatcgacagtgcccatgttctgctgctgagccaccatggagtcactcaatccttggagcctaaatatacacagccctgctctcagacatacttccattagatttaatagccagccttcatcaatactaattttcagctatggaatcaaacatatatggccctactctgggacacacctctaccagatttaatagacattcctcattaacactttcagctatggaattgcagacagttgatgatgaagcaatgatatcataaatgaatatcaagtcagggaagcagaatgatgcccaagggtggatgttctaaaacgtgacaagaattttctctcagtgatgacatggcagagaaataagctaggaaaaaatgataagataaagtttctctaaccaagacctcaaagctggactacagtgatggagggaaggaattgagagagcaagccaccaagcggaagctgctcttcaccctgggggggtgggcaatggacagcagaaggactcagacacagatgcttccagccagcccagtctctgttgtggtactgcaaggttgatacactccctgaagcaccacggcatgaaatggaggttcctacagccaagaagaaagagaagcaggttctgagcagaagacgattaagaaggagcctgtcatccagaagtccagcctgctatttggcatggggctatcagggatccaagccagctacctcatctctgaacaccagcaggtgactcttcccatgcagatgacagccaaggagtctgaaaacagcccagaggacaaaacaccaaatcacccctcccagtctacagtgtgttggaagggaatagctaactctgcctcaaaaaacaaagataaagggaacaagacaaacaaacaagcagagacctttctgcactgagctgccatctgaagggatatccaggacttcaaagggttcattagtgagtggatggacatcaacaccaaggtcttcacaggctggacagtgccgcatgtaacatgtaacaagggatattacacggttgcaaagcagccactggccccaggtacagaggtgaacactaagggcctggtgaacactacgcctttgcagaacaccaccaacaacaggcatgacaagattggcaacttcccttggcccttcacacgtctgctctgtcctgatgtctgggtcattctgtagcttcgtgttcccctatcctagctagtctcatggtgctgggcatgaggaagtaagtttttgcctccctaacctcaaagaccggctgtcccctctatctgcccccagctttctcaccttggatcagtacctgaacagcctctcacagtattcacaacaagcaccatctaaaaaaaaaggcttacatccatgagacatgcaggtctggttgtgttttatcaggtgaaggattacaccaagtggaaggaggcctgcaggagttgctgctggtccctgtcgttgtcactgtgggactgttagacctgcaaggcagatccatccaagtctggaatgaagtaataccattccacaggtatagccagtgcataggatgatagaatcaagaatcaaaaaatgacgattataaccagctcagaagcagtgagcactaagacgactcagccttcatggagaagtggctgtttccaggtctgaagcaaagaatgacatgatgtacccaaaaccctctgtcttgctggaaaggagggctggaactcacaggtggggagggtcttaagtaatcaccacagctctgtgaagagccccctggccataggcagtatagttggagtgtggtaaggacaaggccaaggggacaaatgaggccacatctgcttgcatccatcatactcctttatggcaagtcatgcctggctattgtgggagatgctggaatccacagtgcctagggtgtaaaaaacagttgcaaaaatgacaagtcactgtgggggatggaggggactctgaattaaagatttctgtgacaatcagggaaacctgaactgattacatatttgatgttaaaaaaatcctattaaatttttaggtaagataatggcattatggtttgttttgtttgttttttttaagggcccttccagagaaatgtactgaaaaagtctacgcaatgtctgggatttgctaaacaatacctggaaagcagacaggtatgagtggaatggcactggctgtgggctgacaggtgacgcaactggggcagggggcatcctttgagtttttatatttttgtaattatcacttttaaactttttattattgagaatgtcaaagaccctggaaacatggtgaggtaagcaagaaaatggtccccaagtgcttacatcacgactccagaagctatgggtatatgaccacacataggagattatccaggattatctgggctggcccagggtaaccacatgagtccttgcagtttaagagcttttcctggctgagccacacagataccaaaagaagcagaaaacattagagcctgagggccctcctcaggcttcttctggtatctggctttgctggccttggagtagggggccaaggaatgtggtggcctcttaggggctgggaacaggaacctcagtcccgctcctgccagcaccttgaccttagcccagttagggaggcagattttggacctctgacttccagaactgtagcctaagattgcagtgatttgttgtaagttgcaatagaaaactcatacacataaaaactctgtgtggattaaacaatataaaatataatatactaaataaaaatagattatgtgtgtgacaagactctatatcaagctttattacagattcttttaatgcactaatctcagactgaaataaagttgaaattaaatttaatatttgtacttgagttatgtgtatcactgtcctggtgtatgaaacacagtttgctgatgatgaacagctggacagcgctctggaaatgtcaccatgggtgttcctgccactaatattaccacctttatgcttgtgaagtcaagcaaggaagatactatcttatattataatgtaaatgaaaatgaaaaataaaccagcttacagaaacttggaaaaagaagaaaatgtataaaaagagacaaagaaggtcattatgtaatgataaaggggttaattcatcaagaggatataataattataaatatatgcacccaacactggagcccctagatataaaaagcaaatattagagctaaagcaagagataaatcccaagacaataatagcttcaacaccccactttcagtattggacagattatccagacagaaatcagcgaagaatcattggatttaatctgcactatcacataaattgacctaatagatatttacagaacatttcatccaatggcagcagaatacacattcttctcctcggcacatgcatcattctcaaggataaaccataagttatgccacaaataagtctttaaatattcaaaaaaattgaaataatatcaaatatcttttctgaccacaatggaataaaactagaaatcaataacaagaggaatttcggaaactatacaaatgtatggaaattaaacaatatgctcctgaatgaccaatgggtcaatgaataaattaagaaggaaattaaaattttattgaaataaaaatggaaatacaacatagcaaaacctatgggatacagtgaaagcagtagtaagaggaaagtttatagcagtaaacacctacatcaaaaaagtagaaaaacttcaaataaacaacctaatgatgcatctcaaagaactaaaaaagcagaagcaaaccaaacccattcttaataaaagaaaagacataacagagagcagaaataaagaaattgaaatgaaggaaaacaatacaaaagatcaatgaaacaaaaagttggttttttgaaaagataaagttgaaaaaccattagccagactaagaaaacaagagaagactcaaataaataaaatcagataaaaaaaaggaggcattacacctgatactgcagaaattcaaaggatcattagagactactacgagcaactatatggcaataaattggaaaacttagaagaaacagataaattcctagatgcatacaatccactaaaattgaaccagaaaggaactcaaaacctgaatagaccaataataagtaatgagatcaaagccataataaaaagcttcctgcaaagaaaagcccaggacctaatggcttcactgctgaattctaccaaacacttaaagaacaactaataccaatgctactcaaactattcaaaaaaatagagcagtagggaacacttccaaactctgtctatgagaccattattacccagacacaaaaaccaaagacatcaaaaaaagaaaactacaggccaatatccctgatgaatattgatgcaaaaatcctcaacaaacagcaaatcaaactcaacaacacattaaaaagataattcatcatgaccaagtgagatttatcccagagatgcatggatggttcaacatacgcaaatcaatcaatgtgatacatcgtataaacagaatgaaggacaaaaaccatatgatcatttcgactgatgttgaaaaagcatttaattctgtgaagaatgtcaatggtagtttaatgggaatagcattgaatctataaattactttgggcagtatggccattttcatgatattgattcttcctatccatgagcatgaatatttttgcatttgtttgtgtcctctgtgatttccttgagcagtggtttgtagttctcctcgaagaggtccttcacttcccttcttagctgtattcctaggtattttattcactttgtagcaagtgtgaatgggagttcatttatgatttggctctctgcttgcctgttgttggtgtacagaaatgcttgtgacttttgcacattgattttgtatcttgagatcttgctgaagttgcttatcagtttaagaagcttttgggctgagacgatggggttttctagatataggatcatgtcatgtgcaaacaaagacaatttgacttcctctctttctgtttgaatacggtttatttctttctcttgcctgattgccccggccagaacttccatactatgttgaataggagtggtgagagagggcatccttgtcttgtgctggttttcaaggggaaggcttccagcttttgcccatttagtatgatgttggctgtgggtttgtcataagtggcttttattattttgaggtatgttccttcaatacctagtttattaagagttattaagagaattcagctgtaaatccatctggtccttggtttgtttttgtgtttatttgtttgtttgtttgtttgtttgcttgttttggttggtaggctcattgcagcactattcacaacagcaaagacatggaatcaacccaaatgcccatcaatgatagactggataaagaaaatgtggtacatatacaccatggaatactatgcagccataaaaagtaacaagatcatgttccttgcagggacatggatggagctggatgccattatcctgagcaaactaatgcaggaacagaaaaccaagcactgcatgttctcacttataagtgagagctgaacaatgggaacacacagacacagggaggggaactacacacaccagggcctgtcagggagtgaggttgggggagggagagcattgggaaaaatagataatgcatgctgggcttaattactaggtgatgggttgataggtgcagcaaaccaccatggcacatgtttacttatgtaacaaacctgcacatcctgcacatgtaccccagaacttaaaaattaaaattaagaaaaaaaaagaaataaaaataaacaatgtgatgttggtcactgactcaaaaataaagcacttactaaaatacaatatctcttgatgataaaaaaaaaaaactctcaacaaactaggcatagaaggaacatatctcaacataagaaaggccatatatgacatacccatagctgatatcatactgaatggggaaaaaatgaaagccttttctctaatatctggaacacaccaaggatgcctactttcaccactgttattcaacatagtactggaagccctagttagagcaatcagacaagggagagaaatagaagacatccaaattggaaaggaagaagtcaaattatccttgtttgaagactatataatcttatacttggaaaaacctaaagacttctccaaaaacctattagaattgataagcaaattcagtaaagttgcaggatccaaaaatcaacacacaaaaatagtagcatttctatatgccaacagcaaacaatctgaaaaagaaattaagaaagtaattccacttacaataactacaaataaaaaaaaatctgggaataaacttaaccaaagaggcaaaagaactctacaatgaaaactataaaacaatgatgcaaaaaattgaagagttcacaaaaaatgagaagatattccatagtcacggattgggagaatcaatattgttaaaatgtccatactacccaaagcaatctacagattcaatgcaatccctatcaaaataccaatgacattctccacagaaatagaaaaatgatcctacaatttatatggaaacacaaaagacctagagtagccaaagccatactgagcaaaaagagcacaactggaggaatcatattatctgacatcaaattatgccacacagctataataaccaaaacagcatggcactggaagaaaaagagacaaatacaccaaagaaacaaaatagagaacccagaaacaaatctacacatctacattaaactcattttcaacaaaggtagcaagaacatatattggggaaaaagatagtcttttcaataaatggtgctgggaaaactaaatatctatatgctgaagaatgaaaccagactctgtctcttgccatgtgcaaaaaacaaatcaaaatggattaaaaacttaaatctaagatctcaaaccatgaaaccactgtaagaaaacattaaggaagctctccaggacattggtctaggcaaagatttcttgagcagtaccccaaaaacacaggaaaacagagcaaaaatccaccaatgggatcacatcaagttaaaaagcttctgcatagcaaagaaaagaatcaacaaagtgaagagacaacccacaaaatgggagaaaatatctgcaatctatccatctgacaagggattagtaaccagaatatgtaaggagctcaaacaaatctataggaaaaaaatctaataatctgattaaagaatgggcaacagttctgaatagacatttctcaatagacatacaaatggcaaacaagtatatgaaaaggtgctcaacatcattggtcatcaaagaaatgcaaattaaaactacaatgagatatcgtctcaccccaagttaaaatgacttttatccaaaagacagggaataacaaatgctagtgaggatgtggagaaaagggaactcttgtacactgttggtgggaatgtaaattagtacaaccgttatggaaaacagtttggagtttcctcaaaaaaatataaatagaactaccatataatccagcaatcccactgctagataaacccaaaagaatgcaattcagtatgtcaaagacatacctgtactaccacgtttgttgcagcactattcacaatagccaagatttggaagcaacttaagtgtccatcaacagatgaatagataaagaaaatgtggtacatatacacaatgaagtactattcagccataaaaaaatagatcctgtcatttattccaacatagatagaacttgaggtcattatattacatgaaataagccaggcacagaaagacaaagttcacatggtctcactcatttgtggaagctaaaagttaaaacaattgaactcatggagatagaaagtagaaggatggttaccagaggctgggaaggaaagtcaggaatggagggagaaaatgagaatggttaatgggtacaaaatatagttgatagaatgaataagatctagtatttaatagcacaacagggtgactgcagtctacaataatttattgcacattttaaaataactaaaagagtaataattggatggtttgtaacacgatgaaatgataaatgctcaaggtgatggataccgcatttactctgacatgattgttacccattgtatgcctgtatcaaaataactcatgtaccccatactatatgctatactatgcacccataaaaattaaaaagaaagaaagaaaagaagtctgcaataaaaatccaaagaatgtattctctcttatttcattcttctcaaaagacaatagtgttctgcaatgcactcttcttttcctctacaactgggcagtaagcagggctattcattcaatcttctaggcatcaaattgggagagaaaagtatttttcattcttgttatgaagcatcaagagactattcagtagtacttgccagttcccaaaattatactgacatttaaggggtagttagagaaataagaatccacaaaagaaatggaaggagcagctagataagaagaaggaaagctaagaggtcattgtcctctaagtcaaggttgcaaagcatttacaacatttctctttatagtagaaggaaatgagcaacagtatcaaattcagcaagctgagagcttaagtaaatgtggagagacaactattatatatacctgctgggaagtcatagcaaccttagaagagagctggtctggtgtagtacaaatgttgatttgttattctgactcttccatggactgcactccttagaagcaggtctgaatgttttggtccccacagtacctaggacagtgcctggaatgtaagaggcacttaataaatgtttggcaaatgaatgaactaaaacaaagtaaagtatgtagttgatttggagggaaaagatcccaatgacatttaaaactgcttgtaataagatgcaccaatatttccttaattaaatccctaagtctaaaattatcaccatatatttggcttcttccccaaaggccctgaagccaaaacaactcagttcctaaggagaatatataatctgccacctacaaagataaagtctcaaacataagaagcaaccctaaatttctgtgcttagagtgaccttttgagttgccagagtgatgtcattagtgttacagttttctgcaaggttaggcatataagtatgtgttaaatagttccatgggctcctgcttgctcatttaataaagaagagttcattaagagtatcccaaatgcgtagctcagggccactgacactagaaaactgcaaccactttgttctttccctgccccgtatctcacttgtccttgcagctgtcaccttgaggcctcagcactggtaggaagtgagaagacactgagaagtggcacccagtagaagcttctagaaacagaaagagtatccataaataattaaacttatgaaatcagaacctgagaggttatagtcatgtttctcggctgcccatcataattacctggacagcttccaaaaatacattaatgccagaggcccactcccagagattctcactggcctggagtgagatccaggcaccagtattttttaaaattcttccagataattctaatgtgtgaccagcattcagaggcactatctttatgtctttatatctcagaatgggtatcagaacttaatgctaatgagaaagtacttcagattttatcaccctatgtctcagaaaaccacttttcctctattgagtgccactgacccataagaaaaaagatcaatagtctaaatgtacaagtacaaagtgacttaatcgaatttttttacaaaaagagaaaattcaatccatttgtttttaagtttaataacggggtgaaaaaagagtaaactattggttagtgtgtgccactaaccaattattatgttattatgtttcatggtctactttaaacacttttacatgtattgttttacttagtctcccaagcaacccagaaaggcaaatattattattcccatttttacagctgaggaaacaaaaactcagagacgttaaattgacttgtccaaagtcacagagttggcatatggtgatgccaggaggcaaacaaacaaatggccccatctgctgctctcacttatcttttcatcaggccatgttgccctatctaaagaaaatcttagtgaatgatacttcaccaagcaacagaaattttctgtccaagccaatgaaagggatagatggagctggacaattgaaagaaggaaagagaagaagtagagagtaagaagaatgaaagacagtgcaagctaagggaagggtcagaaaggaaacatcaactgcacccagcagatgagtcacagtgcatgaggccaaagtcatactaatggccacatttcccaatacatacttagatggtcaaggcagcaaatacagccagtgtgttactatgtgtcctggattgtgctgtaagggtgcatgagacacagtcctgccctacagatgcttataacctagcatgggaggcagatttgcacgcaaacaggatagattttgccttgccttagcagaagtaagtaccgagaactgggagcagagatgaagaaactgttcatatgggtcagagaagacctcacagaagagggtcatctgagatggctttgaaacagggtaactcattcaccatgaaggcagaaggaatggccgaactgaatcatggaaacagaaactagcaaggtgtgtgcttgagaaatggaaagggccctttataaatttctgagacggggaaattatcacattctcactgactccctccttttactcagggctgagattatatctttaagctttgaattttcacatcatactcatctgcagttacataggaatggttctgccaggttcactccagttcctagatcatttaatggtggaattagattcaggtttcctctcctcactgcccacagctctgttcagccactatacaacgcagatctctgttttacgtgaggattccaaattacaaaattgtgtaaagtactttcttttttggtctctatatccctatcctgatcacaattcaaatgaaaagtttcttgtcctataaaatgagcaaaattgaattaatatcttaaggagttcaggggggctgtctttgagctgggaaagaacctccaagccagcttccattaacatatttggaattctaggtgtttctttgaagcctggaaatttttttaacctgcacagaacctttgtactgttgcctttaaagcagctactcccttttattttaattaacaatgacttcagcaggttttaaataatggtttgtctttatgaaagaaaactagggtggaaacactccaaatccacttattggaataaactgaggagtcactaagtcctttccaacaagatttagacagttcattagaataaatatatatttaatctccctctttctatatcatcttgaaacagagcaaagatacaatgctggaataatgacacacagtctgaaaaatattctaaatgtattgaaatcactgcagctcctttcactttgtatagtttcaaaacatttataatttgtatgatgtgtctattaaatgctgcctaatagccaggaacaggacagcactcaggaatttattggtttagctagactcaaattgtgcccaaaccctgtgaaggaatgactaaagcaatcagaggattccaccagagtccaagttgaaataacttcttgaaagtttaagccaatcctcattcttatgaagtaattcattcaatttagatgaaaagtattcttatttcctgaaagttaactggttttaataatggatgtagtccctattctatttgatattttagagatgttcaaaaagaaacaaataactttaaacaaccaggcctaagccatttaaagagatagcagatttaatttctacgtctttctaaatctagtgtctagggcatccattcaggtgaatcctttgattcctgccattatcctagaacaagagtagatgtatgaattcttgcatctgtactggttactaaactctcagcctctgttctacctcccacagtctctgttccccatagctctgatgctgacccaagggttatagaaggagatcaactcccaaacctaatcccagaaagtaaatacacaacgatatagtatatgcttagatccattcttcagtttattgaatcacaaaatattggcgctgagaggaatcttagaagccaacagtttcaaactctccgtggtacagactaagccctaaagatgttaagtgactttctcaaggtcacacagctagttagtgacaaaacagggcctataaccaatcacttattatgagtgcatgctctgatcctttgctgctcgctgttgtttgcagaccagcaatatcagcatcgcttgagagcttgttacaaaggcaggctctcagactccacccaagaccctctaaagcagaatttgaattgtaacaaatctttttctttttttttttaaacagggggtgtcactgtgtcatccaggctggagtggtgcagtgacacaaccacggctcactgcagcctggtactcccaggctaaagctatcctcccaccttagcctcccgagtagctggaactacaggcacacactaccacacgtggctaattttttttatttttaattttatgtagagacgggatcttgctatgttgccaggtctggtctcaaattcctggactcaagcgatcctccctactaagcctctcaaattgctgggattataggcataagccaccacaactggcccaaatctttaggtcattcatatgcacattacagagctgaagctaagccaggcacattggcacgcaccggtagtcccaactactggggaagctgaggaggtaggatttcttgaacccaggagtttgaggctgcagtgagctatgactgcgcatgtgaatagccactgcattcctgcctgggaaatgtagcaagttctcatctctaaagaatatatttttcatttaaaaactaaaagaatggaaggcaagtagatactggtttgaagcatgggtctacctcttctaaatgtaagcaaaaatctcaaccttctgaaagcatcatttagaacctggaaataatatcactacccaccttgcagagttttcattgtataagcataacacagatatatgcatgttcatttcatgaaatacgtatgtgcataaataatacattcaaagtgtgtggcatatagtagataatatggtatatagtagctaatgttatttcccatctcatgcttatcattaatattgtgcttaaccaaactgaaagccactaatgactatgcatccatgaaggaatcaccagtcttccttcctttgttctaatgtgttaaatatcattttaacttttatatatgattaaggcttttttatttaatgttcctaactctcaagaaaattattattatgtggaaaacaataatagctaactacttttagtgctgtgcttagagaggaaagaacttctcccaaagccaagtcataataataataataataataataataataataacccacaacattcttaaaatatcttgactctagagcctataaacctggcttctccagaagccagtgagtatcagctgccactgatgctgtaattttcttaggcagagactcaactgccatgggcagatgccacaacattggcaaaagtggggcacagttaaagatgacgtttcatcaccaacatgtcacacttgtcagcattttaaagaaaaaaacagattgaagaggaaagaagaagttgagttttagtatccaaatttgaactaaaattttggaaaaatacagcatagtacagagtatgaaaccataccaaagtgatattttgaaggagatacttttgggaaaatgtgattttaacatcaattagaaaaccacgttctcctaaggcagtaattctcaatcccggcagtatgttacaatcagctaaggaagatttaaaaagattgaatgcaaatttctgagagaggaccaggctctagtgttttcttaaaaattcccagtcaattttaatatgcagccgggattgaaaaccactgcccctatggaatcaaaaccctgttgttatgtaagagtcaatccactgagagctatttgttgctgttaacttcattgtgtacctcttctaggtctttttgccattcctccaggacatccaccataaggaaaggagaccctggaccaacattctctaagatgtttatatggaccagtggccggacctcttcatcttatagacatgatgaaaaaaggtaaatgcactgggattctgggcacttttcagaagcatttaacctgactctccaaagaggatactgacaggaaagtagtaggcaactgagccttatgctttgcaatgtggggacagactctacagtacaggagtagggtttcagacactttggccttccttctccttgcactttacatgttcgctttcagcacatagctttgcaaaagttgttccctgtcagaaattcccatgtcacaagctctttgcttagctaactccagctctgctttcagatatcaataagaaccaccactcccatcatcttctttaaccaaacagactatgttgttgaatttccagcacctagcactgtacctggcacatggcgctcaataaatactgagcaccaaatgtattaataataatttattaactgaattaattttattaacaacaaaaaataataaaaatataatataattaataaaataataaatactgagaactactggcaattcagtttcttcttctgaagtgatgaaaactgcatttctgggcactggacatatggcagggaaggaaaacagaaagtatgagaggaggaaaagaggacatacaaatccattgagcccttaaaatccttggaagaatagcctgggaggaagggaaaaatgagggaataagaagaaagataaagggcaaaggcagcattaatgaaagacaagatgacctttgtgcaactcaatccagtcctctcacttgggtttagggagtaaatgtattcataaaattctctagtcatttttaaatatttagtcttcctctttctcattgaccttgcactattatctgggttaagtgaagctaaattttaagtataattgcctttaccagcatattgcaatgtaagcaagttgcgcatcaggcagaatctgatagaagtcaggattgatttggttgaaggaaatttgtgaaaaaataataataaaataaaaattaaaaactacaattgataaatggtgctgggcacaaggagaagaacctgaaggaggtttgcctgaatactgttttcagagctgatacttttattttccttctaaaacctgaattgcctcacagataaaaattcttttaaaaatttcaaaagcaaagttgttcttcacaataattatatattatagcaaaaattgggaagcaacttgaaaattcacaatagaaaatgtgctaaataaatcactgaatgtaatataccacttagcactttaaaatgctttgacacaatattaactgaaaaaagcaagttgaaaatttgcatgcaaactacgattgcagccacaaaaaatatatataggcaaaagtctggaagaaatagcatggtttttactgctctgctttccaaatgctttgtaacatattgttaccttaattatggaaaaaataattatatgatatttaagtaaaattatagcccagaaggcaaataatgttgccttgtcagcatttaaaaaacaagtcccagtgctcatcatgacaccaagcagattaactgaaaatttactttacttgatcatctctaggttttcactgctttttctcaaggcttaatcaaattatttttcatttgctttcaagttgaatcatctttcagcaagatcttttctgtaacactataaaatttcatatgtcatttcaaattctatatttgaaagtgcagaaagacagaggtttggtcctgcaactttcatgccaggaccaaatccaagagttttgttgccctacaggaatattgtaactgtcaacagccagctgtcctgaaattctgaaggctttattagagcaagcgaagtgtaatatatttctttcaccttctatttactctcagcaaataatttaatatattttgctactttttatgaacaaaggaattaacatttaagaagcaattactgtgtactgtaggttttaattgtgttctcttaagatagatattattatgctggcttcacagatgaggaaactgaggctttttaaataactgagtgattttcaataacttccaaaggcccaacaactagccagtgatggaatcaggatttgaacccagctgatgctctctccctgtaccccagtacctgcccaggctcttgtcaaacttgaaatatttggagtgatagtgaacagccaagcccacaaggggaaaagtatgttaaaatagagttggatattgcatatcaaagaagataataaacatgtgactgacgtattggtaatatttgtggagtttgaaaggtgtgaacaattagcttagtattctgcatcagtaagattctatgaaactgaaattactgttttaattttttatttttaaagtatgatttcagaactatgggatttataataattaaaatattgactacgaagaaatcatttttcagctttatttatgggatggggatgcaaaagcttattaaataagtctgcatggccaaaaaatacaagcaatagaatctgccattaagcaatagaatctgccattccttagtttaatgttggaagttaatttgtctgtgctttttttttgaccacatcttcgtctttgctgcttaattcacaaactcttggaagatatgactcagattttaaactgactttgagcagtatctgtggctctgtttaaggtgttcttggtggcaataaacatggtgataatgaagatgatgatggctgataattaatctacataattaaggtcctccagttaattatttggaaataaattaactagattgtctgacagcactgcctcaaattgctggtaattcagtttcttcttgttctgcaaacctggcctctgtgtgtgcctgctttctccagctgtgttcccacagcaatcccagaagccaggccatacaaaatcctcagctgctctccacacctcctcttcctgagaacagggccaaatgtgtcagtatatcggattccctgggattcctcaaatcgtagaataccaggaaaccagcttaagggcaggcagagaaacttcagtggaaggaaaagttcactgaaaattctgaaaccaaatgtttttttgctcagaagaaatggaagtcagttttacttttttttccttattttaattccaagccagatctttttctgatcatcttctatatacaaaacataaggtcctatcttcatctcccattctgcaacccagcaatgtggagaaatatttttttcttctctaaacaaacttctttgttagttgaacttactttaatccctaaattccttttcattttttttgagatggagtctcgctctgtcgcccaggctggagtgcagtggtgcgatcttggctcactgcaacctccgcctcccgggttcacaccattctcctgcctcagcctcccaagtagctgggactacaggcgcccgccaccacacctggctaactttttttttttttttttttttttgtatttttaatagagacggggcttcaccatgttagccaggatggtctcaatctcctgacctcgtgatccgcccacctcagcctcccaaagtgctgggattacaggcgtgggccaccacacccggcccgatccctaaatttcaagcagcaaacaaacagaataattaatttagaaattaaagaagagagaggtttttaagctaagggcattacagactgtttatcaaatattctttaaattgtttttttaaatattgaagtgatacaaatgaatatttattacatatgttaatatacaaagtgatattataaacatccaggtacccatcattcagtttaaaaaacaaaacaatcagaatttttgaagcccttgaggatgctttcccaatactattctactccccatcaatcaatatcaatcaatatcctgaattttgggcatatcattccccgattttttttcatgagtttatcacatttggatctttaaacaatatattgtttccatccaaatgtttggagacttcatgtaaatggaatcatgccatatttattctgcaacttgtttttttcaccaaacattatgttgttatgatttaccaatgctggcgtgagtcgctgcagttcattttatctgctatgtagtctcccactacatgaacatactaccatttattcatccagtctactgctgagcaacatttgcattatttccagttcttttgtcattgccaacaatgatgctattcttctacatgtctctttgtgcacatgtatgaacatttcttaagatttatacctaacatgggaatggttggttcaaaagtacacgcagctttaattttaccaagtaatgccatggttttccaaaggagccatacatgagattcccattgctcaacagccttgtttagagttttcggatttctaattttcagtaatcaagagggtattattattttaattttcatttctcagattattaatgagattgagtatatttccttagtcgttttttctgagttgactgtttaaatatttgccccaattaggtcaaatacttgactgtttaaataatttgcaattatttcattagatttatatttaagtaacattttgcagcaattataatcatacctcttaccatttttctactggattgtttgtcttttacttgacttgcaggaattctttataaaagtccatattaattatttatctgctatatgtatgtaaatagcttctcccagtttgtggtttggcttttcactttctttttcatgtcttttgataaatatattaatatgttcttaatttttttattattatacttttaagttttagggtacatgtgcacaacgtgcaggtttgttacatatgtatacaggtgccatgatggtgtgctgcacccattaactcgtcatttagcattaggtatatctcctaatgctatccctcccccctccccccaccccacaacagtccctggtgtgtgatgttccccttcctgtgtccatgtgttctcattgttcaattcccacctatgagtgagaacatgcggtgtttggtaattttaatatattctaaattaacaatttttggaacactttgaaatcccgtcctactccagtttcaaatagacatcctcctgcacagttttctaaatttcatgtagcattatctttcacaattacgtatttaatcatctggaactgatacccaatatccagtttttatatggataaccaattgccccagcatcatttattggagagtttctcctttccccattgatctaaaaatcacttgtcatatattacatttccatatatacatggatatgtttttgaatctctattctgttctagcggccagttttgtccacctcagacaaacacctcacaacagtttacaaattttagcattatgcctgtaatacatcttgatatttgataggaccagtcacccatcttgttattttgtagtcagaagtgtatttactattcttagccacttgcacttccaagtaagttttaaaatcaggttggcaagtcacacctatcgcacttcccaaaaaaaactctagggatttttattagaattttataaaatttattaattaatttgtgataaatttacatctttatgtcaccaagtctttctctgaatgaatacgattaacctctacattggtttgtcttccctagtatctcctaataaagttttgcatttaaaaaaagtgtacatcatttattagatttattcctaagtactacctttgtattgaaatggcattgaatttattgactaactgaattgttttaaatattgagtctccacatcccggaatataattccttatttattcatgaattatatcatgaattatcatgattgcagtatcaatcatgatatcattttgcaattatttcattagatttatatttaagcaacattttgtggcaattataatcatacctcttatgttatatatgtgtttttactgctgatgtgtagaaatgctactgcttttgtagttactgatttttttctatcaatcaaccttgtagaactcagtatgcttttaaatagttgctgatagatttgttttgatttccctatttgtattttctacaaataacaatgtttctttgtttccaatccttacggttttttctcatgtgttacactcttactctattggcaggaactttcaggataatattgtagagcaaatcaattatgattactaatatatttgggctgccttttccaaactcaagttactttttaactcatcatttgtttgtgtaattttggtctgtttaattcagccaaactaattaagtctttaaaattgtattctattttctcccatttggaaatttggatatttcatttatgtttttagataattacattttcatatgtgtgcatgaattgaccaatatgaagataattaatgctttcattatcctgccaaaaaagaaacttgaacgacccctactctcataacttcactacgttgttgttgttgttgttgttgttgttgttgttgttgctgctgctgctgttgtttttctaatcgtagactcaggaggtacatgtgcaagatttgttatatgggcatattgagtaatactgaagtttgggcctctattgaacccatcaaccaaatagtgaaactagtacccaataggtagtttttcaactcttttttcctccctccctgcccccttttggagtccccagtgtctattgtttccagttttatgtccacatgtacccattgtttaactcccatgtgttaagtgagaacatgcagtatttggttttcggtttctgtgttaattcacttagggtaacagcctcccgctgcaaatgacatgatttcattcttttttatggctgtgcaatatttgatggtgtatatgtaccacatttgatgaacacttaggttgattctatgactttactattatgaatagtgctttgataaacatatgagtgcagatattctttgatagaatgatttcttttcctttgggtagatacccactccagtaatggtatcaattatggttgctgggtcaaatggtagttccattttcagtaatttgagaaatctccacactgcttttcatagaggttgaactaagttacatttccaccaatagtgcctaagtgttcccttttcctctcagcctcaccaagatttgttatttttggctttttaataatagccatcctgcatggtctcattgtggtcttaatttgcatttctctaatgattagtaatgttgagtactttttcatgtttattggcttgcatatatgtgtcttttttttgagaagtgtctgttcacgtcctttgtccacttttcaatgggttatttgttttctccttgttgatttgtttaacttcctgatagattctggatattagtcctttgtcaggtgcagagcttgcaaatattttctcccattctgtaggtagtctgtttactctgttaattatttattttgctgtgcagaagctctttagtttaattaagtcccatttgtcaatttttggttttgttccatttacttttgagcactgtctttttttttgtaatgtttaaattacaccatttttgctaatatataaaaaggcaattgactattgcatatcactttggtttcagcaactatactagtttttgtttgttttttgttttgttttgttttttgcaaaagggtctcgctctgtcacactggctggagtacagtagcacaatcgtgattcactgcagccttgaaatcctgggctcaagcaatcctcccacctcggccccccatgcagctgaaactacgggcatgcaccactacgcctggctaattttctttttagagatggtgccttgctgtggtcttgaactcctgagttcaagtgatcctcctcccacctcagcctcccaaagtgtagagattacagatgcaagccacctcacccagcctaaattttcttattaataatttatctatagattcttttgtattttcttcataattacatcattggtgaatacgcttttatttcttctttacagtaaatatactattcattcatatgttatactgctagtaaatcagtaaatcatgaataaaacaggtaataatggacatctttacttttgtttctgctcataaaatggattctgtcaacatttcaccattaagtatcaagtttactataggtatttcttctataccatttatcatattaaggatgttcctatcttttcaatttgataggagtttttatcatgaatgaatgttaaattttgtcaaatatgtttatctacatttattacattattatatgattataaccctttaatatattatttatgtaatagattacattactactcaaataataacccacattataagttcctgggataaccacagcttgatcatgatatattttcatttttatatattgctagtttatcttgtttttaaaatttcacgtttatgtttgtgaaagatattgacctataatttttttgtgtattgttctgatttggttttagtatcaaagtttactaacttcattaataggttgggtagcatttcatctttttctatattctggaatgatttgtatactataagtacagtttagctataaatcatcagagactactgtttccattatggtgatatttttaattgatgattcaaatttttaatgatttataagtatttgagttttctatttatttctgaatcagtttcagtaagttatatttttggaaaagtttgctgtatatttcaggaagttataaacttcagagttttcaaatgtctcattatatagttattttcaatattttctttccaatccataccttatctgtagttatagtttttaattcctgatacttatttggcccttttctattttttccttgatcaattttttcagtttttcattagtcttttcaaaagaaattaacctttgaacccattagtcctttaatatagttcatctatttcatttatttctgctcaagtttattatttccttccttatactttgttttagtatattctgttaatcttttcctaacttactaatttggatgcctagtgcattaatcttcaggctttcttcttatctaagtatttgaaactatatatttctatccttagaaatatacagttttgctttagctgcatcccactaattgttctagagtgtttttcatatcatttaattctgatttttaatttttgctggactttattctatgacccatgagttctttgtactatggttttactttcttctgtagatgtcattctagttattttttgttatttatttctagcattattgcattagagccaaataatgtggtcaataaaaaggccagtacttctcaaagtctccctaggttataacaccctcacttatctggacgattcacataattttctgtttctttctatatcttggattaaagcttttcataaaatttaatatgctaattggtccaacaaaaataaatatgaattaaaatattaagatatcattgggagagtgtgttatctaataagctaaaggcaggactaaaaagaataattccaacctttgtttccataattttgttctcacttttagtgtcttacccataagacctgggtcacagtgttacaagacttcctgggaagtcccatgaattaatacgttggcaataataacattaagctcatggacaaaatccttcatgttaatgacatatatatataaatgaagtgtgactgtcatttctccccaaactcaaaaacacattgctcctgatgaaatgtacacattaaaagaccaaaacagataataataattaaactaatcaaattgtaccataaaatatatacctaccagctcaaggaaaaatctataaaatctgaaactaatttaagatgaggatatatgtaaaagaagcacatctcaaaaatggaagaggctgtggtggacagaaggcagaagaatggctgtgttcatcaaagccatgccttctctgccatatgaaataacaggtgtgttctcgtggggcagagatgtatagcagctgtgctcactgaagctctgaaggcactcagcaatccattgcctcataggtacaccttcataagatctaacagaagggcatgtttccctaagtctgggaactagagggttcagtgcctggagagtttgattttcttctggaaagagtactaaatttgttggtggtagagtccaatggacactgatgggaagatagaaactggaggtctgttctagccatcattccctgatttatttagttttaatagaccattcagcctccctataactggctatctcacaacctatgcttgttgtagccagtctagtccaaataaaaggaacatattttgtgagcctaataaatgcaagagactgaacttacaaagatgtggtctgtctttaactcttgaacagctcagtattcactgggccagagaggcacaaacataaatattcagcacatgtaagttctggaagagctctcagccaagtaatttcagatacatttaattcttcatttctaattcatgctttccctacttctcttccctgcatccaccaggtgccccatcatgtatctgatagcttcaggattctgcagaattctcttctgccctttccatgttttagtggccacgctgtcttttgtttctctgactacttaaagagtctcattaaaacccatagtgttgctagttctagacacaaatgatgcccagatctaaatctatttgtttgtttgtttgtttgttcttaagttctggggtacatgtgcaggatgtgcaggtttgttacacaggtaaacatgtgccataggtggtttgctgcacctatcaacccaacacctaggtattaagcccagcatgcactagctgttttccctaacactcttccactcccactctcccccaacacgccccagtaaatgttgttcccctccctgtgtccacgtgttctcattgctcagctcccacttataagtgagaacatgcggtgtttggttttctgtttctgcgttagtttgctgaggataatggcttccagcttcatctaagtaaatctaaatcttaatctcctccatcatttctctttttttaaacccctctttatctaacacctgaaacactgggagagtttaagaatcagtccctttgtctccatatgtaaacatttctaaacaaccaaccacactaacacgagtgatctttctaaagcacatatctaatcattgtacttgcttaattcttttaatgccccctctaacttcaaaagacatacaagatcctttttctctggtgcctgcctatctaaccagctcactgtctgccattccctgcccacaatatcctggaatccaaccacactctactacctctattctcttatattctgcctggatactcttcctttctcaatcatttgctcgtccaagacttagtttggtccgtcaaaggactcttaatcatcaccatttaaatcaagttatggtccctaactggcaggcttcctaaaccacctttgagcttgtaaatcatagccctgggccaatttaatccataacatgtctgtagttacggtttttaattcctgacatttatttggcccttttctgtttttttcttctaccatcgatccactgactgttcattttaaggaatgcctgaaaaagtaatggccaatgtgcctgaagccaatttgccaaagaatccatttgtcatcagtcattttgatgaatttatcgaatttagctatataccacaaattttgtatgatcactgtaaccctacacagttctataataaaccacactaaatggaatgaaaacatttacaggggggccagatttagggccttcagactcactccactccgtctcactctctgcagccattgtctctcaatctctccgcccctctgtctttccatctcttgtcccagacaccctcggcctccagtctcccttcctctctgtcccctgttccccccacccccatcccagccatgccctcctgcttcctctgcccgctagtcttccctcctctacccctgtgtgtccccctctctaggtcagtgggccagacttcgtgtttcactgattcttcttttcagcttagcagagggtcctactattcttaccataacctttatcaatgagtcaagaaacaaattttggttaattgataaagttgataaatccatcaaagtggtcataatgtgaaatttgccacaagaatttcaataattctaaaatattagcaaaacagccagtgactctaaaaagaatctgaaaactagtaaaaattgaaaggttcccacatgaaatgctaaatttttgtcatatttgttagaaggatatattcacaaacgtattcaagaaaggcatatttataaatatattcataagaatatatttacaaagagactaagcctccttagaaaacttagcttttaaaaatatcaaactgatcctaaaataccactaagatgaatgtatccgtaagaaaaatacactttatgattgaacagatttttaaaatatagtcttaaaatattcatacaaaaatttatttatattcatttactatatttaaaacaatactccttaaaataagtctttgttaaatctgtaagtgtcgtaaagttggcaaaatatttatgtagtgagctgatccttcagtaaactggctttttgggaattagccattgagaaactgatcctttagcaagttggcccttggcgtatcagtttgcttctcctgtacacacctatctaatcagtctcattgccatacactgcaatgactgacatctcactcagctcccttgggactctaagtcttatttatttggtatcgccagaacttagcacattgtgtttcatctgatgaagacttagaaatgttgactaatgaataagcaaattaattcataagtggcctttatgctgccttaacctgaatacttttctccttctctttataggatagctaccaagggaatctgaatttaaatgggtgtgacagccaaggaggaaaaactttctttcacattttgctctttatatccatatttgtatgtgcatggcctcaaaaataatttgtttatgaattatgggctgacccccaatatcaaacttcaagaaactacataaaaggagctcaaaataaaattttactaggttgactaatgcttggcgtaaaattgattgaagccttactaaacaattgaaaatattttgtttacaagatatttatcacaaacacttttgttatacttggatttgccctgtagatttattaataacttctattctccaaaggctttgaacagaatgttccctatatatagtaaagactgcacatatctactatttgttattgtcaacatgtggttcaccctgaagccaagactatctcaacagaccttaaatatggtgctttgccaggacacaccaaggctagatcagcttcaaacttataaagtcaaattcctgctctacacccactgttgggcagcacacttagtcaaaactgaatttgtagtcataccccagactcattcttcctcctgagctctccacatcagtgaattgtccctcattccattattcttagcactaccacccccaccctcaattcctctcaggtagattcataaagaatagacagaaagaaccaaagggtgataagctatcagccttgttaatacttacatggtaactcacacattacaaggcttcctagtatggaagaggatacatagggctgtggcccaaaatatggcatcatgctccttccaactagcactgaagacaacatggtgtagaaggggccaactaatgcaccctgtctcaggctgtgaacaccctctttcccaactgagacttactacctttactacttggacatgcaaaaaaccaaagcctgaacaaaagcaagtccaaatgataatttttgttttacaaaaattatgccacacataagcaatgacccaaaaaacagaggtggccctctgactggcctatctcaccattgagattagtcactcctctgcctgtgcttaggacactaaacttgtgtgtactataaatgtacaatcactttcttcctctttagcaaggtcagcagaagtcacctctttggatcctggaagagtagggaaatacggaaacaagaatctcacctttccactctccatgatttctccagtcatccacatcaagtactagagcataaatctaaactatatcctttttcttacttcctcatcatcccctgtattctatcagccaccaaatcctgaagttctgtctcatagatatttctccatgtatcgtttcttctttatacatcctaccttgatcctagatccagccctcactgtcctttgccaacactacagtaacaatccccccattcctctctctgatttaagccttatcctgtttcttaaactctgcacagaagccagagtgatcattttgaaactcaatcgtgtcaccctctgacagattcctattcactacagaataaaggccaagctctttagaatgacttacaaaacccttcatggcctacctacctttgcaaactcatctgcctctttttccctgtcccataggcatctcagtaatattaaaacagttgtagtttctgatattcaccatgcaattgcaagtctccatccctttgttcatgtgagtctttctgtctaaaatacctttgactctttgtctcatttggttaactctgattcaatcttgaagattttgtttaaggtgtttctccttcaggaacctttccctaaattcaaccctggctctctgtcctgctccctcaagctggggtatccttccctcttctctattcccataacactctgtgaattgctccatcattaagtttttcaccccacgctgatatttatatacatgtctgttttcctttggggcaggggccatatccccaataacaagagattaccagcattcaggagaagtgtgtgaacctaaactgaactctgctcttccaaatcatgtattcatttctttattttccattaattctataatcatttactaatgaattccatgggtatggcccactccactcacccactttcattttgctgggtagtatcctgatttctcagatatttttgggctgtatgaaaatcattcacttttcccctctctatacattccagagcatatcaaaaacatttgttaaccactttcaaattgtgatttgtttttgaattacacgtttgaatcatttttatatgcttcttgttctgatgacactgattacacttcttctcttttatgggtataggctgacataagtgatgctgtgtgacagtctaataccctggaattgtgagattatgctccctccttgctgtcttctatctgcaggaaattcagatctctatggcagccatcagagttaaatacatgttgataaataatataagtgaagtaacagcagattattattttacagcaggtctttgaagctactcagactcagcctgtctcttcctgattcagaaaagctttcagcccactggctttagctgctaacggacactgattttttaaaatttgagttcctaaagggtgaagttttaaaagctttgatgtaaatcctagaatttccaaacaaaatctcaaaaaagaatgaagaaacacagagggtgggtggttgccagtctgtggaagtcaaaaacagggcaggccagctaatccagaggcattgggattgggagctggggaacaatgaaagatatgggctctccaggcctctggcaatgaccatgagcagccaagagcaagtgagagtgggaagaagccaggaaagacaaggccgtgaaatgatgataaacaaaggcctgtatttagctctgactctcctactacaatgggctcacttctcaaggaaagagtaagatttatacaaaccacctcaaaaagagaactttaaaataataataagaagaagctaatcagttaattttgcacaaccaatacttagattaataaatactcggccctacaacctcatggaaatatattaagtacatacacactccatcacctctataaggaatcaaaatgtttagcaaccagcccagaagggatcagccaatcagaacagatactggccataaacaccagtcaggccatcctggagcacaaagctaaatataagccctgaataaacacacaactgcgcaaacaacaggcatatcttccctcccccgcaaagttccactttagagtcaactctggttcctctcccaagcaacaagagcgattagccataaaaatttgaatgaaaaatctgaagttattcttgtgcatattggctttttgcctgaagctaaaaaaaaatgacttcagtttctttttccattttcagcattttatttgtcctccttgctgtttctaggctctaaaggccagcgattttcccatttccactgccctgcaatccaaagctcccttctcaaaatagacattgaaaaatcatgagctgtttcttggtcacaggccttgcaggaattcctgagcattgccttcctactcaagcttctcatcatctccccaagcacccagcacttccgcatttcttttctaccttctcctccagacctggtttcaaatccaatcctccatccccaagctttatacactactcattttcttgccattttgtccattaaaaattctctgtagaatagtagcaattttaggatgttctgatgtccgtgtcattgagctgtagctccccaccccatttttgaatgggagcatttattactaatctcttgtcactcattgtcttttttttttcgagatggagactcgctctttcacccaggctggagtgcagtggcatgatcttggctcactgcaagctccgcctcccaggttcacgccattctcttgcctcagcctcccgagtagctgggactacaggcgcccgccaccacgcccggctaattttttgtattttttttttttagtagagacggggtttcaccatgttagccaggatgatctcaatcgtctgatcttgtgatccgcccgcctcggcatccgaaagtgctgggattacaggcatgagccaccacacccggccaaatctcatgtcagtcattctcttaaataatttgcgtgtatcatgtcacttagccattaaaatgcatttaaacattattttcactttgcaggcgactggggatcagaaagactaaggcacttgttattgatcacacagctaacaagcagtgaaatcagtctgaactcaggagacagttgatttcaatttcttgttctttcttaccctacattgctgctctaaaataaaaaacaaaaatactaataaaattgtccaaagttatagggcctgggctcgatttgaatgacacttttctaactcaatcgaaagttttcacatataagaatagctgggtcaccactctacatcttcacactgcttatcaatctcaagccaacaaagccctaagcagctctcagcttgagaaaaatgttaaccaaaataacttctacctatcactactgaagaaaaatgaaagattaatttgatatattcctagtatatgttgccatttatttgaatcaatgctccattaggtattccaaaattatctaaaaatcaataatgatcagatttgggttaaatggtaaagtcaacaaacccaaagcattattttgagggttgaggggattggtttctttctttagaattagatagaaggaaaattaatttgcagttaagacattggccccagagtaaagaaggagggcttatttctgctcaggactggtacacatacaagcgtgcatgtgcttgtgagtgtgtgtacatgcatgtgtgtgcttgtgtgggaggtagtggacacacactgaggtccagctgcactgaagcaggtttggagggccctaggaaggcatgggcagaaactgacctgctctctaggggcatgctgattaactaaacttaatgtaagaccatattgtttttaacctcagaaatatttaccagaaaatcagggaccatgacctcctggacaaaaggaaaacagtcacagcactgaaggcaggagaggaccgagctattctcctgggactggctatgatggtgtgctccatcatgatgtattttctgctgggaatcacactcctgcgctcatacatgcagaggtaataccactgggtgggtgggaccctgctgtttgtctcctgctccatcctcccccatcacttaggcaaccctaaggtcatcttcctcaccttctttcctgataagaactttgagaagttcctggtaaataatacttttcaataatgttatctaataataatgatacatatagctctatgtataatctggataccaggtgtcaaagacttctacttctttaattatcacaattactctataaggtaagtataaatatactcattataaaaacggcaaaactgaggctcaagagagatatgatttccccagtgtcatacagctcttgcttgtggcagagctaagattcaagcccacatctcgcttattccaaagtcactgttcctgccacttcacacttctgtccgttccccaccctcctcccttttccaccccaaccaacccctccctcaccttccacgtgagtggttctcaactgtatattccaatttccccagaaactcttaaaaatgctaatacccagcccccatcatcatcaacccagaaggtcagatttaattggtccggagtgggacccagtcaccagtatctattaaagctccccaggttgttctaatgggccttctaggctgagaaacactgctatgcatcaacttttaaaaataacagattttgaatcttttcatttcaatatttgctgtaggtgtattgaatggatagggaggcaaataaattgtgggatagcaagtgtactcctgtcctcagtaagccatgtagtaaatcccaccagcatctctagctaactgttgtccataaattggacactctaaacacaggcaagcccagccctgatgtatcgaatgaagtctcacagcagttcagcttaaagaaacaagaccttttcaaatgaaaaattgaggtttcaatccaaaagaaaatgaaaccattttgtggcatttgtttctccatctaaattaatactttcattttagaagcaaaatctagctgaaatacagtaatttgctgaaattaaggcatcgtctttcacatttgtggctgctctgctctgtttctctgatggccttcagctgtgctcattttctatgaaagtgctgatgcctcaggccccaagtggtcgttgattccaaaatgctttcagctcttcacatctggttagaaccatcagagactttttcctcagtatataagcaaaatgtgaccacccatgttccaggaaaatacagtttgccacaccaagggaggggatcaggtctagtatcctgcttctggaataaaacttcacacatgcaaaggggtaggaagctgtggatgcctgtccaacaaaaggaaagcgtattaatctgcaaagaaaacatgttttcccattgctatggtgatcagcttatacccaaaaccaaaccatcaattgctggtgtgttaattcctaattacaaatgttaatcttgatcataaaattaaaggtatttttaaatgaccagttgaccaatgggcagctggaatccttccaggtgagagataacagggcacccttattcatccattagtctgcataaaagggtttcttttccattgtgtttgtggggagacagcaaaacacaatagaatgagcctgggccttagagaattacaagattggatcacaatttccaacacttactgcccatatgtccttgcatatgtcatgggatttctcagttcactcacttttaaaaagaaattactacccaacttgcacagctgttgagagaacaaaagaaggtaatgtatgtaaattaccaattagggtgaaaggaatgtgcagtaagtgattgctcatgacataatgaaagggttgagttatcttttttcccttattagaaagaccttaaggcattctgtcactgtccttccatctctgtcaagctggaccacatgaccctccactcctttgccatctctcccctccttctccctcacaccttctgtgcctacaaactgggctggggagggagctgggatgcagaaagtacaaagtaaaacatacagaggtaggggctggagcatgtcaagaagctgcctacaatgtagaaatacagggtgaggacaggtgatgattttaaagtatgcctcatgttaccagtgagttccataagggaaaaaagaacttaagtcaagcactggagaataccatatccaatggaagtcattgaaaacgttctcacgtgtccacgtttgtctatgttatacggtagtttgcttaaagctgttctattcgaaggcctaaactttacacagatagatcatattagagatttagaaaagatttttcagcttcaggagatgagaaataattccctcggactatacctttctcactattagctcttgggcctgtgtttactctcacccctttctctgcagcgtgtggaccgaagagtctcaatgcaccttgctgaatgcgtccatcacggaaacatttaattgctccttcagctgtggtccagactgctggaaactttctcagtacccctgcctccaggtgtacgttaacctgacttcttccggggaaaagctcctcctctaccacacagaagagacaataaaaatcaatcagaaggtaggaacttggcgtactgcatttcagttaccccacagagcttcacaccaggctctctgcctctgaagttcccctttgccagcatttcaaaggaaaatacttccaggaagcagagcctgcctcttccattcagagaacttgctatgtgactcttgcctagaaaatatttattttctgtgcaagttgtggacaaatcattcctacatttgtggtagtgcagatttagctttcacttccatttgaaagggtaaatattaatatatctttacacaaatagactgagtctttcaaagcaagtatgcaacttagagatgtacaagacaaaaccatgtgtttgtcctgtacctgggaaccatcaggtaaaggtgtattctgtttgtccatggtcaatgtcatttagttctgtgacctcagggatataacaacctttctgatcctcagcttccttttctctaaaaagtaacaaatggccaccttgcaaggtccttatgaagatgagtcctgagcatgtacaatgttaagcagagcatgctactttcaacccatggtcactgtgtgtgtgtgtgtgtgtgtgtgtgtgtgtgtgtgtgtgtgtgtgtgttcttcacatatgttatattcatagaggctgaattttccagtccactaagatattcaagtccacatggtagatattcaacgaatgtgtattttattaaagctttacataaaatttacatttataaggtctgggatgaccaggaaggtgtcagcagaaccaacttgccattacaattttaagttaaatatattgagttttggatttgtggtaacaattcgatatgcagaataatctcatatgccaagacaactcgatgccactcttggctcttattaccaggataaacccttctgacctctaatctttcttgtaaaagcttttcttttcattaaattgtcagcacttaaatgatataacttatagttattgaaaaaaatgcagtagattcaaggttcaatactagcacatagagagtgaatgggatttgtttctgataaacccaccttgaacttttgttacaataacttaaaggaattcttgcaaatatctctgaggactcaacataataaatatttcagagaatgttgtttgaaaatgctggctctgattttctttcatttgtagtagccacaaataataccagtcccagcgctgtgctgcagtatgtaaagcctagctctctcacaaagtgcttgtctttcaagatcttcccttaagtcagatcttaaaatcaaagctgaccagtaatgacaaatgcctataaaactcttaaacctgaataggcatcaaaaagtgggacatattttcatttcctcattttgacaatttatcactacagccctgtgaatgcattatttaggctataaacggagagggaagctaccaataaatgtcccagatatgtattcaggactggtaccttatttgctctcagcataatactaggtcatcatttgttttattggccccactatcttgttttttaaagtaaattataacatacagaactgtgcatgaaatgaaaaagtacagctcaagtatgacaaacagattcgtaaccaccgtgtaaccaccttaagggtaaagaaatacaacattttctgtaccccaaaaacaccctacatgccccctctcaataactacaggctctgcctccaccaaagacaactatcctgactgtttatggcaattactttcttactttcctttgtacttttatcacctaaggatatatccttaaacatatatattttgttaatagttttgcctcatttttaagcattatataaatggaatcacatagaatactttcctttctgtctggttttcttcacatagcgttatgtttgttagatttattccatttggttacagttcattcattttcattactgtatcatattccattgtatgagtatgtctgtttatttattcattctactgctgatggacattttgaattgtctatagtttgggactactacaagtaattctaccatgaatattctcatatatgtctctggtgcacaagcacacacacttccatcgggtataaacctgggaatggaatatttaaatcatagagtatccatatcttaaagttaagtagataatgccaagtagttttccaaaatgtatatgcaaatatacattctcaccaaccctatgggtatgagagttcttactgctccaaatctttgccaacatttggtaatatctgtaattttaatttagctaatgtagtgatatttcctcatgattctgatgactaatgttatcaagtgccttttcatttatttattggccatttgggtatccattttgggcagtgtccgtgcaagttgtttgcccatttttctgtggaattgtttcttctttacattcaatataggaatcatttaaatatgaacctctgttggttatatgtgttgtaaatatcttctcgcattatgtggccttttcactctctgaatgtctttcagtggaagaaacttctaatttcagtgtaaccagattttgtcaatctttttctttctgttcagtgcttttgctgttctgtttaagtcttatgtccaccctaatatcataaagtcattctcctaaatgtcattctaggtgtactattgttttccctttcatgtatacagtaaaatctgactggaattaatttttatatatggatcaagtttcttttttgtttgttttttcatatggacacccacgtgctccagtccatttttgaagagatcacacttttcctcattgaattatttttagaatctcatttcttcctctgttttatcagaagttatctattctgttactattctttttaaagtcaaaaaataacagataatggtgaggttgcaaagaaaaaggaacgcctatccacttttggtgggaaagtaaactggttcagccattgtgttcagagaacacaaagcagaactatcattcatcccagcaatcccagtattgggtatataccctgaacaatacaaattgttctgccacaaagacacatgtacatgtatgttcatggcagcagttctcacaatagcaaagatatggaatcaacctaaatgcccatcaacagtggacaggataaagaaaatgtggtacatatacaccatggaataatactacgcagtcatgaaaaagaatgagatcatgtcctttgcagcaaccatggatggagctggaggtcatcatgctaagtaaactaacacaggaacagaaaaccaaataccacatattctcacttaaaagtggtagctaaacattgagtacacatggacataatgaatgaaaaagcacacaccaaagcctgcttgagtgtggagggaggaaggagggtgagaatttaaaactacatagggtactatgcttattacctgggtggtgaaataaactgtacaccacgcccctgtgacatgcaatttacctatgtaacaaacctgcacctaaacctaaaataaaacttcacaacttgcaatcttgactaatcaaagacactgaaacattttaactccacttttttattcttttcccaacttatatattatcatttttatgttatgtatacttgaagctcatgtagacattactattgttgttgtatatagtcaatgttaatttacatggatccacatttttccatttttattattcgtattcctttatctctgttcttctatctaggatcatctttactagtatttattttagtgcaatgacatccctaaaaaatgttctcatttttcatttgtctgaaagcatttttcattttatttttcttctggaaggacacattcactgagtataaaattctaagttggctattttttttccattgtcttctggtgagcattgttactattcagaaatcagccctcagtctaattgctgcttctttgaaagtaatcttggcctattttaaagattattttattggtttttctacagtttaactattatgtgccaatacatgcaattatttttatttagcctacttagcattagcatttccagggcttctttccctgctccttaatattctttgtcaattttagaaaattctgtcattatctcatcaacattgtctgtagtcattctctgcctcttcacctctgggactccagttggccacatacgaggttttctcattgtatcccctacatgtcttatgctcccttttgtttttctccctccttttgtctctctttacttctttctggatacattcctatcttctaattcagcaattctttcctctgctctgcagatcaactgttaaacccatccattgagtccttaatttctcttactgtattttcaattctagaatatccaactgagtcttgttttatcatttctagttctctgcaatattttaattattgtcttttaaatctttcaacataaaaagtaaaattatagtcattataaagtctattttgatatcttcactatttgaagcccatatatacctgttctgtttttgttttctcttgtttgctttcatgttgtcttataatatctggctatgttttattaggtttctgatattatatttgcaaaatttttataaaaaataacttcaatactaggataatgttacaatgtcatcttttccaaaaattatttccacttacttctgccaggtacaagccattcaggatcacctcattctgacttcataaactgtgatattcaaatctgaactgaagtccctatgaggacctatctatttcaggctgactattctcccaggatgcagcccttcagaatcccaacccaaagtgaataggggaattatcaagaccccagcttgataggcccacaatcataattcctgctcatagctctgcaaggctgtcaaaaatgccagttagcctcctgggctctcacccctcttccacaatcagcaaatgctcccagggaaaaaaggcaccaaacatttggctcactttcctggcccagtgattctttactttctagaaagctagcctctgcttttaatctgaaatatacacactgaaaatacacaattatctccatgtcaaaaggtcattaaaccatcttcatgcaaaatgaggaatattcaagataattctggcaaaaacataaacaattttcaacgtcaactccccttcctgttatccttcccaagctcaccaaaaataatggtctccctcacagttaccaagaaatgggcatggttgtattgagatacatcaggcgctactgataataactgtcctaagacaataggaggcgaaaggatattagtcaatctgtctgcaacttggtagaaagcattttatttttacatttttaccctctctcacatagtttttctttagcctttaaacccagtgcccaacctcttgtcaacattatgaccgaagctgtttaagctgataaactgtcatgctctcctggagccactggctgactaatgggctctgggagctacaagagggctcaagggtccctgcctcccttggctacaaggctgtcactagcatcataaaaaacagcagctgagtattaattcactgtggttgttgcttgtgaatacctcaatgcccatctccttcaggagtttaaaacctcttttactcaccaggaattcccaaaacatgcccctatgatttgaggttagattaaaaatgtagtttggtgcaaaaaaaggaagctatacccattttttggtatatggcataatactatatatctgttctgatgatgtagaaaaatccaaattcagtttctcctactatactctcacaacacactgctaactctgggtgtgtgtggggcttttccccacacataatgaaggtgagctcagaataataaaataattttcccagagttacacattcactaactaattatgtctgaattaaaatctaagtatttttacttcatcatgcttgctcttaaaagagtaaaacattagagcatccccttgagagaataaagacaagagttctgaaaaatccaaattctatgaattatttatccttctgatagatattttggtgaacaggtgagaatctacaccattccatcctattccaagaggcacttaggatcaagtaagaaacaatgagcaaggaatagaattatctgtgatccataggtaagattaggactgtatattcagcaccagtttatgtagagtggatattaaacagatagaagcttaccctgaaaggggctaaaaaaaaagtgggggcgtggaggaggggaatatgccctgaaatttggcatttgacatcccataattagcatcttaaatttgagatatttcttagacatttgctgaaactgcctgtagaccatagattcagaaacactttgtgactgacaaagtttagtcactccttaccaaagttgaatctgggacagctgaagagggcacctttgtgtataagtaaaagaaagaatgtgccagaaagaagctgatactgagcatcaagaagaaaagcgggggaaggaacctagtgcttttcaattgccaagacagagggccatggtgaagattcaaggtcagattagatatcagcctcactttaggactaattggatacatcagaatcctagggattccatggtttaagctctctggatattgtctaatcccaaagcgccgagaagattctatctccttagtcaatttcctaggtctttcaagtttcttctctactccaaatcaagcagaagtgccataatagatatgagatctgtgggcaaatacaggaaaggaaaatctctctgtagtgggacctttgtctcaatactgaaagaaacagtcatgcatagcagtgtgaattctgttttccttttcactactaaatacttggaacggtccacttgccaaaatcaagcagatactagaagttcaaactaaacaagtctaaggtaaatgttgtaggatccactttttaaaaaagtgacagtaaagagcatgaagtctcaaaaggagtgggaagaaatgaagtctcaatttactttctcgactcacctgtttatcactaatgttcaaaaaattcaaaagttcaaaatatatttgtgaatccaaggctaccagctggggaactatacattctttgaacatttgagctatgtcccattctcaagcatagaatgcaaagtctggtacattatatatgcttaataaatatgtgcacaatattcattgtttgggaacactagaaaaagttccattgactttggaactaataatatttatgtttcacatgagcaatgtttttttttccatttttggtttttgtttgtttgtttgtttacttcatggacattgtagactaggacctggttactaaggagtttttacagtacatgtgtggcccacctctatgatggtacagtctttactgaaaggctttttagccacattctcaattcatttcatcacccatctgtgtttttttctgtttcgctatacattctatattgtttatgtttttgtcacctatatataacatgctacatggtatattggagccaacaaatatcgcacggattttatcaaatttctaaccccatttcaagaataagacaattccctctttataaaaaggcaaatgaagaacacacctttcccttgaagtgatctgagaaatggatagctcccttcctaccatcacaaggaaaaggaggctgacagtgaggttattcagccaaaaacactttcttactgcctcctcccttccccacatcttttatttttaagatgaaggcatgtcactcttcgcttcacacaagcctagtgaggcatgtctgaaaaaaagcccaacaggtaattctcaaaacttctgtccatcatgacaataaaaataactgttctgaaagattctggaagagaggctaaggaaaaaaaaatttagtcagttccccaaaaattggagagaagatgaaattgctggaccttcattgcccatgtaagggaaaggatgatcagaagacattgacaggacccaaggtttttcagctgggaaaggaaagagcatgatcatgggtccatccctgtggttttcagtactaaagagaagtttctgtctgtcaagaatctaaggattgggaaaagcagtaagattttattaacaaaactcagtattaagagagatgtaagtctaaatcttccactgaatggctgcttcagaggtttgatagatttatatagtcacatgttaaagcacaaaagaaagaatgacctatagccatggtaaaatattaacatattttttatcagtactaaaatatattgtatatataaaattattactcatatattctttctgttaaatatcatacagagtctaaaagctaaatcttcccgttcccacacctcccaccaaaaaagagagatctaaaaatgatggatgtttattttttctatctaaattacattttccaactaagtgtatatctcacttagtaaagttttgtttattgaaatgcattctatgtattcaaaaccaaagacataaaaataccctctgaacacatgataaaatcataagataactaaatcttcactctaaattcacacctgcctaagaaacatactcatggctatcatttgagccacagaaacaaaaacctaggctcctagtgtagaattcagcacaatgcaaatctcctaagacaaaaaggcaagggacatgagatgacagccattaaacaggactgcttctgtgaaaaccatgcagctagtaattttctcgtcttagagatttcatagtttattatgtgatgcttgattgacgacttttagatgatcatgtggacaaatgtgaaattccaatagaaaaacatgttaatgaaaatttattgaggctttatgcatattcatcacttaatcctcacaaaaaaaaccctgccatgaaggctctattaaccccattatatagtttcaaaaaaattgattctgagaggccacataacttgcctacagtcacacagtaaccagatctcctgagcacaagttaggagcttgttatactactcatatattcatgatcaccaaaggacttatcaataataaaagtacatgactgattgacaaatagtagaattttcattttcagggacagttaatggtctagtgacagctggtttatatgtatgttgaaaaatgacaagatgagaaagagctaaaaacaccagggcagaggaccttttctccactggtatctgtctgttgctcatatgtgtaccattggccctgaggtcccacaatcaatcaagtatggaccatgcctcatccatccagcccacatgcatgcaatgaaagcccaatggctttcaactttaattaccagctcctgtattacagttctgccagatgttctcagtggtagtttatatgaagaatcttacctagtgacagaattattgccatttgtctgacaaatgtttctttaaaaatctatatttttaagctgaatcaattcacaaaagcataagaaaaggaaaaacttcactttcaatggaatgccatttttactgagatcatttcaataacttagcactgttcaccactgaaattgctactataaactatcttggcacaaaaatatacagatacctgaagcattcataatctaaattggcttggtttaaattcaaccagaaatggtttgtctgttattttttaaatgctttggttcaaaaaacatttctaaaaatgttaaagaaatgatcagggcatctttgaagatgtccatttttgaaggacaaaaataaaggtattcccacactgccttacacccttttgatccagaggcatctaactggtaggaaatttgcttcatggcagtcaaagtccagttttcatactaaattataactgattgaaaaattctgctttcttggtgataactttcacccccttaatgccttgctagtaccaggggattctctgctctactcacctatacaaatgtattcacatttattcttagctggttaaattttaaggtgtcaaccagaccttgctacaagaacagcacattaaacgtggtttacgataaatgccagcatgctcatcctccattcttaactaatcaaagaaacttcctgctgtttatagtcaaataattcaatgactacagctcagcaaaaaaaaaaaaaaagcaaggtgcctgtgtgcccactgataaagtcatgggaaagagtaattcaaatatatttcattagccaaaactctttgttttttaaatactttgttcctgggaaatctactggtctaaatttttctgaaatttcaggcttctaccccaaaacctatatcaatgtacctcaaagttcacccgcttccttatctgtgtctctgcatatagtcatggaggttgtgcattgcacagaggtaccaatcacattgtaaaagtcatatatgtgaatatttatagttacaatgcaaaaattggtaaatgacagtaagacgtgagttttataaaaaaaataagtttattaggataattttccaactgaaaattataatgttttgaagaaggagcacagtgtttcaactcacactaaaacactgtatagataagcagtgattctgtcagaaaccaatttaattctgataaatcagataagttaatcatttgattacataaggggcaggacagtaaaaagtctattgagaggttcttaccaatagagaagagagttaaccaaaaacccaaacatctcccagaaaagtgatttaaatcacttttttccaaacttaaaaaaaaaaaccctcattattatatcagttttgtcatggcacatttataaaccaaggaaaataagtcacagagatttcctcagagatagcttttttaattaaaaatgtgtccaactatatctaacataaaataaaaagaaaaactacaaaaaagtgatttaattccatctgtatctagataagaaagaggagaaagggaagtgtgaacaggaagaggaacagagagaaagatttaaagccaggtgggggttgagggaagggcaaggaaggaggagatacaaaagaaaacaaaatccaaagatacaagtgtgtattaatctgttttcacactgctagaaagaacaactgagactgggtaatttataaaagaaaaaggtttagttgactcatggttctgcatggctggggaggcatcaggaagcttacaatcatgatggaaggcaaaggggaagcaaggcatgtcttttcatactggcaggagagacagcatgagggccagggggctgccagacacttttaaaccatcacatctcatgagaactcactcattatcatgagaacagcatggggaagccacctccatgatccagtcacctcccaccaggtccttccctgacacgtggaaattacgatttgagatgagacttgggtggagacacagagccaaaccatatcattctgccccggctcttcccaaatctcatgtcctttatacatttcaaaaccaatcatgccttcccaacagtcccccaaagtcttaaatcattccagcattaactcaaaattccaagtccaaagtctcatctgagataaggtaaatcccttccgcctataagcctgtaaaatcaaaagcaagttagttacttccaagatacaatgggggtacaggcaatgggtaaatagacccattccaaatgggagaaattggctaaaacaaagggaccacaggccccatacaagtccaaaacctggacaggcagtcattaaatcttaaagttccaaaataatctcctttgactccatgtctcacattcggggcacactgatgcaagagatgggttcccaaggccttgggcagcttcaccctgtggtgtggttctgcaggatacagcccctgcagttgctttcccgggctggctctgagtgcctgcagcttttctaggcacacagtgcaagctgtcggtggatctatccttctggggtctgaaggacagcggccctcttctcacagctccactaggcagtgccccagtggggattctgtgtgggaactccaaccccatatttcccttctgcattgccctagcagaggttctccatgaggtctccacccctacatcagaattctgcctggacacccaggcatttctatctatcctctgaaatctaggtggaagttccaaaaccttaactcttttgcacacctgcagtcccaacaacacctggaagctgccaaggcttggggcttgcaccctctgaagcaatggcctgagctgtacattgaccccttatagccacagctggagcagctggaaaacagggcaccaagtctcaaggctgcacagagcagcagggccctaggccatttttccctccaatgcctccaggcctgtgatgggaagagctgctacaaaaatccctgacatacctagagacattttccccattgtgttggctattaacattcagctcctccttacttatgccaatttctgcaggaagcttgaatttctccccagaaaatgggtttttcttttctaccaacatggtcaggctgcacattttccaaatttttatgcttttaaacataagctccaatttcaaatcatctctttgtgaatgcatgtaactgcacatttcaagaaaagccaggtcacctcttgaatgctttgctggttagaaatttcttctgtcagatatcctaattcatttctctcaagttcaaagttccacatatttctatggcagggacaaaatgctgctaatctctttgctaaagcatggtaagtgcaacctttgctccagttcccagtaagttactcatctccatctgaaactacctcattccagacttctttctccatatcactatcatcattttgctcaaaaccattcaacaaatctctaggaagttccaaattatccttcatcttcctgtcctcttctgagtgctccaaactgttccaacttctgcctgttacccagttccaaagtggcttccacattttcaagttatctttatagcaattccccactggcctggtaccaattctctgtattagcctattttcacactgttataaagatactacctgagactgggtaatttataaatgaaaaaggtttaattaactcacagttccacatggatgggaaggcctcagggaacttacagtcatggcagaaaatgaaggagaagcaaggcacatcttctcatggtggcaagcaagagagagaacatgagagaagaactgtcaaacagttttaaaccatcaaatctcatgagaacttactcactgtcataagaaaagcatgggggaaactgcccccatgatccaatcacctcccaccaggtccctctcctgatacatggtattacaattcaagtgagatttgggtggagacacagagccaaaccatatcaaagtgtgtagaaatacagagcggagagacatgtaaaagaggtagccaaagaaaagagaggtgaaaagatcaaaagaaaggtagcataagttctcaggtgagtggtgattaaagaactgttttattcttccttggcttataggaaaagctgttttatttttccttggcttataggaaaagctactttggcacactaaatgggtctgacccactcatctcagctctttattcaatattcctacatattacagatttctttttcagtaattcaacagaagtgtagctgtttttttatgacagttgcaaagtaaccaaataaaatgaagccaagataaaaagataagagtatactactttccctgagagaactggtaagtttttatgttatgtggacagatgtggacagacaaaatgatggcagagttgacattctgattccataaagaagtatgttcaatagaaaataattaaaacctaccatacctagctatggcaaaaagaatcctgggaatcatttaatttattttacgcatgcaacatggaatgattaaatcaagctaattaacatatctatcattttatttcaatcaataaataatatatgggtgagcaatcaagggacatcttggtcagataccttaaaacattgttttaatcaatgtgttatttattagggtttccaaaggcaccagtttgaatatgaaaagaataaccaccatggttatttcacagatcactaatttggacacaatactccaccccctcctagagtctcaaacacacatagtatcttctagtaacagtttatcttattctccacagtgctcctatatacctaaatgtggaaaaaattttgaagaatccatgtccctggtgaatgttgtcatggaaaacttcaggaagtatcaacacttctcctgctattctgacccagaaggaaaccagaagagtgttatcctaacaaaactctacagttccaacgtgctgttccattcactcttctggccaacctgtatgatggctgggggtgtggcaattgttgccatggtgaaacttacacagtacctctccctactatgtgagaggatccaacggatcaatagataaatgcaaaaatggataaaataatttttgttaaagctcaaatactgttttctttcattcttcaccaaagaaccttaagtttgtaacgtgcagtctgttatgagttccctaatatattcttatatgtagagcaataatgcaaaagctgttctatatgcaaacatgatgtctttattattcaggagaataaataactgttttgtgttggttggtggttttcataatcttatttctgtactggaactagtactttcttctctcattccgccaaaacagggctcagttattcatttgccaagcttcgtggaggaatgtaggtgacatcaatgtgataaagtctgtgttctgagttgtcagatctcttgaagacaatatttttcatcacttattgtttactaaagctacagccaaaaatatttttttttcttattctaaactgagccctatagcaagtgaagggaccagatttcctaattaaaggaagttaggtacttttcttgtattttttaccatatcactgtaaagaagaggggaaacccagccagctactttttttcatcactttttattcataacttcagatttgtaaaactaatttccaaaatataagctgttttcattagccagttctataatatcttcctgtgatttatgtagaaaatgaacacaccccttttccatttaagaccctgctactgtgtgaagagatgatacttacaaggagtgtcattacctgtgagctgactgaatgttggtaggtgctccattacaatccaggaaagtctgtgttactgatatttgtgtggaaatctttatttcacttcaatttaaccattagatggtaaaattaagatgctacttgttggtaaaaattggtggactggtttcaatgggtaaatgtgttgtggcaaattaatgtgttggaatattgctctttgtgaatttgtgcttaagtcaatgaatgtgtagtatctccttctgacaagcattccctattgggattttaaagctatgtgcacagaatattagtctcttctacatgttttatttttctatttataattcccttttttgttgttatattttatacacagaatagatcttttttctaacacatatttgaactgaataacagacttaaagaaagcctttgttcacattgctatttacttttgtgtttgggggaaaatacgagggattgattttaaataaaaaacattccatctttcatttaatatcaatatcaaaagaagaagacaaacatctatctttctcatctatatttaagtacctttttgtaatgtagtatcaaagttttttaggtaatgcaaaattttacaaatcatttgtggaatgaatggtaaaactaatctgatgaaatggaaaattattctgcaatattgtaattcatagtttgacttttcataagcaaataaatccctaggatgtaatcaggacttcaaatgtgtaattaaatttttttaaaaaaaatctattaaattgcaagatttgaatacttcttgcattctgagctgacaagcccatggtagtccaaaaatttgtatttcaatacctttaaaaatattttgagtgattacaaagaaagtttctttttttaacacccaaacacatacacataatgctgtgaccatttgaaaaataggatgaaaaactcttttatttctactctactttaaaacatataattctgaagatactaaagaaatatttgagactatagagctgaaaatgtgctgtctttaatgttccttaggcttcccttcgagtgatccaagggtgaaatatatgtgagtgaaattatcagatgggttactttatttttacttaattctgaattttcattaaaaattcccaaataatgtttaagataacaatgtagaaatttttaaataatgacaccaaaaagagattaactgctgccttctagaatcccaacatagcaacagccccttcaagaaatttagatatatatacaattaatgctcattattaaaagagaaagatctgggactaataatgttttaaatgctttgcacatgttaactaatttcattatttaacaactctgttgggcgaggtattattattatctcatcctacagatgagaatgttgaagctcagagatgttaaataatttccccaaggctatgcacatactaagatggtgaagagctaagaaaacagtctgtagttttcctgctatggtgaccatttccatgactttggcatcttttagataacacagggggattctgaggcttggaaaagattacaggagtgaagaaaaagcattgaactggaagtcaaagacttcattggagatacggtgactagatgactttaaagttctcaattagtcttttgacttctttgactgtaaaattaggaggtgaagtcagctgatcatcaaggtcccttttaacacgaacattccatcctaggtatgtggaaagaggaatgaataccatttgctaaccttcagagcacaggtctgattctcaaacagaatctgtatatattaatctatggattgaaaaacagcttttctattgatattcctagtaagtctttcatttttaagccctaaagctatatttccatctgctagaagcagagctctgatctccatatgattcatcaagaatgacttccctaaatggtataaacgtctacacttccaaatcactttcattatccaattggcacaccccatctaaaacttaattgatttcagattctctgagttgcaattgtattaaaacccaggaatggtaaatgcaccaatgattgcttgcaaatagctataataaatatatgattctgtagaaagctactggcaaaacactagctgacactggtaataacagtgtaggcaatcataaaatacctcttatgtagaccacgtgacatgtagagttccagcaggctaccgtttcccattgctgtgaatgaccatgttggccatgctgtgaatgcatggcatttataaagcaaatattattttcagaatgtcaagccataaatttcttaccacatttctgtgggtgaaacatcttaacactgtaatcattccactggcattaaaaatgagaccagcaggctagcaaaacaatatgagtaattgactcaagtgagttaaaacaataattttaaagcaatggtttgttctaatacaagcatagttaaatttcctccctcccccaccaaaacactgaaatgaacaatggttaagtaagtaaggtagttctcattgtccgtataaggaagaagggatgattaaagggtagacactgttccttctcttcttaacttctgctcttttctctctcccttgtaaaataatttagtaagaacagtcacagttctacaataaccacttcgatgtatggatcatgtaggaaagtagactcaagaaatagtttcaggactcccctgaaaagtttgtcagcatgatatgcacagcaggactgaagaaataacttctacgttgaatctgttccacctttccatatttgaagtaactgtaagaaataatacaaagtatataaccctgccttatattttaagaatgcctttgtaatctactagatgggtcaacaaacacacatgaaattaaaaatagagaacaacaattaggtatccacatgggtggggataatatttacaaagtattggtatggggcttaaatggcttatgtatgtaaatatcaagcattgtatacagcatataacagacataatagtaaataacagtagctattataattaataataaatgtacaagtcgtattagtatacccactagtagtatataatctcttggagctagaatagctctaaaatgtcattttgcccaaaacgcacatcaacaaattccttctatagattttaagcaggaatcatctagcaataggaatggttactacctgaatcctgccagtgataggacaggtcaccacttaatgctaacatgttttcctcataacaagttgaagtctgtctccctgtaatatctacccaccaaatctatacaataaaatcaatactcctgcactgacttattttattagtgttattttattgaaatgaaggaggggatggggaagagcaatttccatttgtctcaaacataagaccatgaaaaataacccattcagacagaattatgacataaagggaaatttatgaaggtggcacaaaggacatcagttttaaaagattaagaatatatccattagaacccaaatattcatgtatgagttaaactgatgaactagctaactccttctgatgtctatgttggttttaatcctgtaccacctcttaagtatgattcggccttctgaaaagtaacattgctgaaactctgcattatgttctaactcaatctgatgacaaccagactcagattacttaagagcatagctgtgctcctaacaaaatattactacagctgccatgggtttgtcttggctaaggcactatgaattctgcagtgcaataccaaagaattggaagaaaatgtcagtctgtgaattcccgttgtgactttgtgataagtgtttcattgaggtggaaaaagaagtcattctctcaaacaatataatcacttaactagggtttccagaactgcttttttaaccttaaaacaaatttaatctccaagcccttgcaagttgtagtatgacttgttaccagcatagtatatgaagagaccacagagaaagcttcaaagtcctctataccctccacacaacttcaccaactagcatattagcaatactaaaaatttctttaggtagcagacacaacttatcttcataaaatcctctctctctctctctctctctctcactcagattttttccttcttttgattgcacttttaatcacataccagcaaagataatctccagcaactacatgttcacaaaatccctatttctatagttacagaaggagaaaaccccagtattaatatcagtcctcacaaaagccagatctctttgtatctgctgtccactactgggcccaccagtatggctcagaggatagtaaactctttggggccagacctatagcatggcattacatgcccgcttctgtaatgatggaggcagggcatgtgattatctgccacactaagtggaagtcagataattcctcaaaggtcaactggtgtatgtaaagaacagaagaagggatgctgggcaagtaagaacagcagatgtccactactggaaatgtgaaaaaaaaaactcacgccagagtcttgtcccaaaatcttctcccagattttggttgaaggtcccacatatatgggaaggaaagcaagtattactgaaagcgtaaaagagcgaaagaaccagtgctcaaaatttactttgcaatttttacatgcatgagtcactcagtaatctcatacaatttaaaaggagggaaaagcatttccgattttcactaagtgaaagatgcaggaatatttttattttagcagaagacaagaagttcccttagaaaaagatagtagggggcaactgatataataagagtttataggaaacaaaaactagtttaagagaaaggaagggagtgataatatgtgaggaatcattcagaattttaaaactctaatttaagcaaccattactattcatgagatactaaggaatttctctgcatttttcttaaggctgttgtcccttgcgttgagtagtacctatttggtctagcacagattcaattgccctgttacctgcttattttggagtaaatcaactttaaggagcatgaagaagatgaaggaatgaattctccttctccctacctcttagtttttttctgacatcataacatttaagaaagtgagtcctccttggaccatccagtgatatttcttatcacagataaatcaacagaaagcattacttaccccacctaccatctgcaacactgtggttatttcaacacctcatcatccatgtgataacctcatgtaaggtctgcccaaacccatcagcctcctctagttggacaatcatcaaatctcaacccttttacttgctgcattaaaattctagcagtttctaccaggcagctgcaaaccctgacacttagttccttctcatggtgagcaaataaaataggccctccccgtgccttctggagcacggcagaagtatcattttggaacaattgacagtgtctgtctctaaccaaaagcattcagctgctgtagctaacatctagcaatactgagaagaaaacagggagttcagactggggactgatgtaaaataggtcccttcctttctatcagttgtgacagatgcagaatttggtgccaattctacatttaggtccatctccagaaagtcataatcagctgtgaagtttcagcattcctagaaaaagtgaatgctgtaaatatagctcaggtatctgccaacagaaattccaggagccagatctaggctggtcagtcggggccacttgttacggattggttttctgctaacactaacagaggctttcccttttccaattctcaatttctttgaaaatgtcacactatctggctgagtaaataaccctttgaatactaacaatcctcaagttcacctggcaaacatccaagactgtttagaagatttcacttggtatgtttgagaagccacatgtccaaattatccaacgatgaaaatacacaactgtctcctctcttaagaaggaagtcttttaatagttgagtagcctcaaaaactcctggcattaaccaccaaaattgatttgcaaaaatcccatggggaaccggaacaaagggacactttgcaagaccagggaaagccagcaagttactctacctctgatatcactgtagtccaagatccctgaaaagcagccactggaaaattaaaagctatcttcatgtggtcattcttgccattttcatttttgttttatgggaagcagtaagtcaaacccagcccaaacccttgcatttgcaggcatcaaagcaagctaaaaggaggagatttctcattcagcaagggactgcagagcagcctttattaaggaagacttacactcctaagaaaaactagtaacgttttgctgctgctgatgacttggattgtggaggcaactggcccttcaagtctatttcccactgtcactttatacctcagccattccagtcaaaggccatccccaatgttccaaattttctcacacctctgggcttttgcacttactgtttcctctgtttcaaccttctctgatctcccttctctccacttggctaactcatactcatcctttaaagtttagctcaaacctcacctgcaccaagaggtgattcctaacctcctgtgtcccaggctagctgcctatcttctatgtttcacaaacaccctgttgcagtgcctccaaactcttagtttacactcttaaaaataataataattatatatcctactgtattcgtctgttttcatgctgctaataagggcatactcgaggctgagtaatttataaaggaaagagatttaattgactcagttccaaatggctagggaggcctcacaatcatggcagaaaatgaagcaagagcaaagggacatcttacgcagtgacaggcaagcgagcttgtgcaggggaactcccatttacaaaaacatcagccctcgtgacacttattcactacctcgagaacagtatgagggaaaccacccccacgattcaattatctccacttggccccacccttgatacgtggggattattacaattcaaggtgagatttgggtggggatatataattattattttttaagaatgtacactaagagtctggagataaagtagaaagatgttcatagcatgtttcacaataaaagattcttaaggcaagtttcatctctcctaatagtttttcctaggaccggccccagccttagctctgccaaatggaatctcataactaagatcagttctgggaagatttaaaagcatccaaatcagaggaatgtggatgaggtgtcaagagactaatgtgggtttttatcacttgctcccagttcctttcagggagcaacctctgaggaggattcccatccactcccccaaatggtgaaagaagggatttggtcccagtgttgaatctcacctagcatgtctgaaatcccagaaactgcctgttaacatagaggcatgaggctgagcaaggaagtgtctgagtttagaaaattcagagtcacccaaaaagaaaacaagaggtacggagagagatgcagataagcagtagagaatgaatatatacattagaaccagggttgttagcaacagggctacatgcaaaagtgccagaaacggaacccaagttcctctgtttctttccccagaaaagagtcaagaaacggggctctgattaaacacacactctacgtatattcacacttttatgcgaggattttccagcatttattttaacttcagattaaggacctaaacatgagctatcaattcagaaagtgaaaatattatttatcctttactttctccaattgctagcaaatcggaaaaagtacgactattacctgatatatggcttaatgttattataccggaaacatttttattctcctaaaaagaaaagatgactgtagatgaccaacattttcttcatatggtgaaacactttctgctctcacaaaaataatctgaatactcagaaagtctgatgtggtgggaaaagggccatagtgtttcagaagtctgcacatacacacacacacacacacacacacacacatacacacaccttctggaagaaatggcttattcaagtttttcaccaggcaggccacatccacagcctaaatgagttgcagctgctctgttctagacacattgaagagggtgaaagtaggggacagaagtttcagaaactgtcccttcttataagtaagtcatgattgattactatcataattaaaatatagaataagaaaactctgatgttcaaagaaaaggatcaggatagtgatgtttttctgcctaaaaggaaatcactaatgatccagacatcagtataattgactggaaattaaataaaacagcaacaagctgaaaaacacatcagggagtgtcataccataatcggggatcatttttcccaccaccacttaacataagcttcaagaggtgggaaagcgaattgccaggcccctttctgcattctgtgggttccagcagctcctttaatctgttcagctgagttctggcattgactgccacagggttggaacgaggacctgactcacttatatgtatttgacattgtcaggattttttccccaaataaataaaatatgccacaaatcatgtatttttttaatgtcacagtttgtcacataataaggcctcttctgtaacattttttcaaatgtcagtgtcatttcctgggcaaataacagagggaagtaggttttctaacatcttggccaaaactggttgagttccaaggtggctctgtgtcagggtcctttcctgacgtgacttatggtactatttggagagtgctttcctcagatcataaaaggtggacaagaaaaacctcggaaagatttgctgtaggcattcaggatgtccactgaataaatgtgaattattacagcctaaaacttaattctatagagtaaggttggatgcttagcacatggtcaaaaataatgaaaagggagacaaccatggtgacaggtgatgtagaaataaatggaccgagaaaaatgcaccagtattagctgagcctctgagaattcacctgcaaggaaagcactcccttgaaaaatgggattatcatctatgcctaggtccaatcattgagttaaatatatgtccagttatcagtaaataagcataaattacagaaaagaacattacacatcatgttatggcatatgccaggtttctacaatacaatacagattatatatataaaacataaagaaaaatacaataccttctcttacaaagaaactttcctagagaatacctaaatcactcaacacaggcatgcaaacatattttgagatgtcaccagtgtggtgggatgggaaggacactggacttggagccagtagatctagcctttatctcagctctttcccatctccagctaaggaagtaagttttctaacctctctcaagtctcagctttctcctttacaagatgatgatgaaaataatatctttcatcctcatcttagatgattattatgaaaattaaatgagataatatgcttgaaaatatatactgtccacagcagcttttttgccttttggagttttcaaggaactccattcatgcccagggctttaataccttcaaatatcaactgacatccccaaatttgtacattcagttgttgcctccttagtaaatctcagagctctattttcatctgcctctggatatctctacctggatagccttcaggcacttaaaacttagtatgtccacttgaaatagtcctttttctaaacacagactctctcacataccacaatccctgcccccaacatattcccactacagttaaagtcactaccctccacccaaatcctcagattcaccctacatatctcaatttccttcaggtatgcacctaaccacacccagtcaccatgtgcaaagtagcttcactgtaaattggttatcaaattgtctgaatccagtgatacagaacactcacatataagaagttacttacaacgaggcagcaagggacaaaagaaggctaagattcattgtaagctggccctccaaggctcagggcaaatggagtcatgaccgcatgtccccacttgtgccaaagctgagggaccccagaaagcagcccaccctagattttataccttggggttatgtgatttgctaggctgaagcattggaagacctccagtttctaggggagactagaacagagactgagctgttccagccagtccctccttatcccaggatgttgcgttctcagcacattctatagttattcttgagaactacaagtgagaaagatggagaactgagtcagtcgaaggccatccacaaaactgccctgcaccatgtagcattgatcctatgtcctaagtgcctgtcaggtcagccccttcttttctatatacactgttgttctcctagttgctgtagcctcaaaccagtcatcctacctgcaatctctccactgccctttactccaattcatcctctacattgtcaccagaatgaacttttgtaaatatatatctgatcatatcaaaccctgagcaaaaccatgcagtgacttcccattgcctttgcgataaggctcaaatgccttagtttgatctacatgaacttcatgcattcatcccacgttgcctgtttgatctcatctccccaccccttccccacacccccactccccagaccgctctgttctagtcacactgaactattttcttcaaacccagaggactttctcagtctctttgtctatcctgcccccagtgtaggtaaagggattggggagagcatacactcaggagtccaaaggctgggttcaaatctaccctgggtgtgtcacttgttttggtttgggttcactcacaactttggattcacccagaagcagactgagacaaggattcaagggccagcagtttatttgagaggttcggaaaataccagcaggagagtagggaaaggagaaagagaaaaaacttcgccttagttaacggaacattatcaagcccgctgcctctatgacagctgacattttatcccacagggaaactgtgcaataacgaagaacttttgcctcagagctatcccacctaagaattagccacctgagaggtaagattcctcagttactaatacaccagttcctatcagccattggttgagggtgaaactggggggtggaggtgggggattggaatatggggctctgccatattagcaaacctctctgtgtctcagttttcccactccaaaagctaggataacactagtacctatcttttagggttgttgtgaggagtatatgagctaatacatgtaaagtactaacaatagtgccaagaacttagtaatcactacatatattctaattgttgttgttagtattaatctcttactatgacctcttctgtcacactaaacatctgctggcaggaaaatactctcctagctccaaaagcatgttcctatcctggcattccccaaccttacttttgattatattcttgggtgtctttcttttctactagctagtgtcctgagagaaaactttgtcaaattctatgcctagcataaagtagacactcactaagtgtttgtagaattgagttgaactaagttgtctttcaataagacttgttttccttttgtgccaaataaagaaagaaagaaggaaagagttatagccagaaaaagaaataaagaaaacagaaagggagtattcagtcaacatgcattaatagcaggggctcagttaatatttgttgaatgaatttaaatgtgaatataaattgagcacctactatgtatcaggcattatgctaggcacttagactacaacaatgattatgtcaaggtccctgctatgagaagatgagagaggatacacagattaacaaatgaaaggaataggcatcattgagttaaagacaagttgggaaaagacaaggacagccaaggatagtcattggtttgggtcaatgctcatgagctactatgaaagtgttatacagtcatgaccaaaactcgactggactctgaagcttcaggaactttcctggcatcctgtggcacaggcttccttctcaggtactgagtatttctaattccgtggtcagctcagcacatcagaaaatgtcaccagttcaagtccagacatgagctcgcccctttgttgactttcacttaaatcgcatggccataaattcagtctgttcacattatacaaaggaaaaaaaatatcttggaaagatgtgttttctcaaaactcttcatgcactgatatggaatatttgcaagagatttattaagtaaaagaagcaagggagaagccagtatgtaacaccagcttcaagtacatgggatgactgtggatgccactcagcctctttccctagccattccccatcacccaatgggctcataaaatgtggtcactgaggcagagattaaagatatgcataggttcagtaatataaattccaaggctgatccagctacagccaccaatgaatgtccaatcttccagcatcagagaacaacactgagtctctgacatgacactattctgtagggtgatcaatttggttgcaggttgattagtctggaccactaccatcatcaacaggggcagaaatttgttcttactggaataaaaacttactctggataggaatttgcctttgctg

SEQ ID NO: 58 - DNA, 331994 bp, Homo sapiens
cagcaaaggcaaattcctatccagagtaagtttttattccagtaagaacaaatttctgcccctgttgatgatggtagtggtccagactaatcaacctgcaaccaaattgatcaccctacagaatagtgtcatgtcagagactcagtgttgttctctgatgctggaagattggacattcattggtggctgtagctggatcagccttggaatttatattactgaacctatgcatatctttaatctctgcctcagtgaccacattttatgagcccattgggtgatggggaatggctagggaaagaggctgagtggcatccacagtcatcccatgtacttgaagctggtgttacatactggcttctcccttgcttcttttacttaataaatctcttgcaaatattccatatcagtgcatgaagagttttgagaaaacacatctttccaagatattttttttcctttgtataatgtgaacagactgaatttatggccatgcgatttaagtgaaagtcaacaaaggggcgagctcatgtctggacttgaactggtgacattttctgatgtgctgagctgaccacggaattagaaatactcagtacctgagaaggaagcctgtgccacaggatgccaggaaagttcctgaagcttcagagtccagtcgagttttggtcatgactgtataacactttcatagtagctcatgagcattgacccaaaccaatgactatccttggctgtccttgtcttttcccaacttgtctttaactcaatgatgcctattcctttcatttgttaatctgtgtatcctctctcatcttctcatagcagggaccttgacataatcattgttgtagtctaagtgcctagcataatgcctgatacatagtaggtgctcaatttatattcacatttaaattcattcaacaaatattaactgagcccctgctattaatgcatgttgactgaatactccctttctgttttctttatttctttttctggctataactctttccttctttctttctttatttggcacaaaaggaaaacaagtcttattgaaagacaacttagttcaactcaattctacaaacacttagtgagtgtctactttatgctaggcatagaatttgacaaagttttctctcaggacactagctagtagaaaagaaagacacccaagaatataatcaaaagtaaggttggggaatgccaggataggaacatgcttttggagctaggagagtattttcctgccagcagatgtttagtgtgacagaagaggtcatagtaagagattaatactaacaacaacaattagaatatatgtagtgattactaagttcttggcactattgttagtactttacatgtattagctcatatactcctcacaacaaccctaaaagataggtactagtgttatcctagcttttggagtgggaaaactgagacacagagaggtttgctaatatggcagagccccatattccaatcccccacctccaccccccagtttcaccctcaaccaatggctgataggaactggtgtattagtaactgaggaatcttacctctcaggtggctaattcttaggtgggatagctctgaggcaaaagttcttcgttattgcacagtttccctgtgggataaaatgtcagctgtcatagaggcagcgggcttgataatgttccgttaactaaggcgaagttttttctctttctcctttccctactctcctgctggtattttccgaacctctcaaataaactgctggcccttgaatccttgtctcagtctgcttctgggtgaatccaaagttgtgagtgaacccaaaccaaaacaagtgacacacccagggtagatttgaacccagcctttggactcctgagtgtatgctctccccaatccctttacctacactgggggcaggatagacaaagagactgagaaagtcctctgggtttgaagaaaatagttcagtgtgactagaacagagcggtctggggagtgggggtgtggggaaggggtggggagatgagatcaaacaggcaacgtgggatgaatgcatgaagttcatgtagatcaaactaaggcatttgagccttatcgcaaaggcaatgggaagtcactgcatggttttgctcagggtttgatatgatcagatatatatttacaaaagttcattctggtgacaatgtagaggatgaattggagtaaagggcagtggagagattgcaggtaggatgactggtttgaggctacagcaactaggagaacaacagtgtatatagaaaagaaggggctgacctgacaggcacttaggacataggatcaatgctacatggtgcagggcagttttgtggatggccttcgactgactcagttctccatctttctcacttgtagttctcaagaataactatagaatgtgctgagaacgcaacatcctgggataaggagggactggctggaacagctcagtctctgttctagtctcccctagaaactggaggtcttccaatgcttcagcctagcaaatcacataaccccaaggtataaaatctagggtgggctgctttctggggtccctcagctttggcacaagtggggacatgcggtcatgactccatttgccctgagccttggagggccagcttacaatgaatcttagccttcttttgtcccttgctgcctcgttgtaagtaacttcttatatgtgagtgttctgtatcactggattcagacaatttgataaccaatttacagtgaagctactttgcacatggtgactgggtgtggttaggtgcatacctgaaggaaattgagatatgtagggtgaatctgaggatttgggtggagggtagtgactttaactgtagtgggaatatgttgggggcagggattgtggtatgtgagagagtctgtgtttagaaaaaggactatttcaagtggacatactaagttttaagtgcctgaaggctatccaggtagagatatccagaggcagatgaaaatagagctctgagatttactaaggaggcaacaactgaatgtacaaatttggggatgtcagttgatatttgaaggtattaaagccctgggcatgaatggagttccttgaaaactccaaaaggcaaaaaagctgctgtggacagtatatattttcaagcatattatctcatttaattttcataataatcatctaagatgaggatgaaagatattattttcatcatcatcttgtaaaggagaaagctgagacttgagagaggttagaaaacttacttccttagctggagatgggaaagagctgagataaaggctagatctactggctccaagtccagtgtccttcccatcccaccacactggtgacatctcaaaatatgtttgcatgcctgtgttgagtgatttaggtattctctaggaaagtttctttgtaagagaaggtattgtatttttctttatgttttatatatataatctgtattgtattgtagaaacctggcatatgccataacatgatgtgtaatgttcttttctgtaatttatgcttatttactgataactggacatatatttaactcaatgattggacctaggcatagatgataatcccatttttcaagggagtgctttccttgcaggtgaattctcagaggctcagctaatactggtgcatttttctcggtccatttatttctacatcacctgtcaccatggttgtctcccttttcattatttttgaccatgtgctaagcatccaaccttactctatagaattaagttttaggctgtaataattcacatttattcagtggacatcctgaatgcctacagcaaatctttccgaggtttttcttgtccaccttttatgatctgaggaaagcactctccaaatagtaccataagtcacgtcaggaaaggaccctgacacagagccaccttggaactcaaccagttttggccaagatgttagaaaacctacttccctctgttatttgcccaggaaatgacactgacatttgaaaaaatgttacagaagaggccttattatgtgacaaactgtgacattaaaaaaatacatgatttgtggcatattttatttatttggggaaaaaatcctgacaatgtcaaatacatataagtgagtcaggtcctcgttccaaccctgtggcagtcaatgccagaactcagctgaacagattaaaggagctgctggaacccacagaatgcagaaaggggcctggcaattcgctttcccacctcttgaagcttatgttaagtggtggtgggaaaaatgatccccgattatggtatgacactccctgatgtgtttttcagcttgttgctgttttatttaatttccagtcaattatactgatgtctggatcattagtgatttccttttaggcagaaaaacatcactatcctgatccttttctttgaacatcagagttttcttattctatattttaattatgatagtaatcaatcatgacttacttataagaagggacagtttctgaaacttctgtcccctactttcaccctcttcaatgtgtctagaacagagcagctgcaactcatttaggctgtggatgtggcctgcctggtgaaaaacttgaataagccatttcttccagaaggtgtgtgtatgtgtgtgtgtgtgtgtgtgtgtgtgtgtatgtgcagacttctgaaacactatggcccttttcccaccacatcagactttctgagtattcagattatttttgtgagagcagaaagtgtttcaccatatgaagaaaatgttggtcatctacagtcatcttttctttttaggagaataaaaatgtttccggtataataacattaagccatatatcaggtaatagtcgtactttttccgatttgctagcaattggagaaagtaaaggataaataatattttcactttctgaattgatagctcatgtttaggtccttaatctgaagttaaaataaatgctggaaaatcctcgcataaaagtgtgaatatacgtagagtgtgtgtttaatcagagccccgtttcttgactcttttctggggaaagaaacagaggaacttgggttccgtttctggcacttttgcatgtagccctgttgctaacaaccctggttctaatgtatatattcattctctactgcttatctgcatctctctccgtacctcttgttttctttttgggtgactctgaattttctaaactcagacacttccttgctcagcctcatgcctctatgttaacaggcagtttctgggatttcagacatgctaggtgagattcaacactgggaccaaatcccttctttcaccatttgggggagtggatgggaatcctcctcagaggttgctccctgaaaggaactgggagcaagtgataaaaacccacattagtctcttgacacctcatccacattcctctgatttggatgcttttaaatcttcccagaactgatcttagttatgagattccatttggcagagctaaggctggggccggtcctaggaaaaactattaggagagatgaaacttgccttaagaatcttttattgtgaaacatgctatgaacatctttctactttatctccagactcttagtgtacattcttaaaaaataataattatatatccccacccaaatctcaccttgaattgtaataatccccacgtatcaagggtggggccaagtggagataattgaatcgtgggggtggtttccctcatactgttctcgaggtagtgaataagtgtcacgagggctgatgtttttgtaaatgggagttcccctgcacaagctcgcttgcctgtcactgcgtaagatgtccctttgctcttgcttcattttctgccatgattgtgaggcctccctagccatttggaactgagtcaattaaatctctttcctttataaattactcagcctcgagtatgcccttattagcagcatgaaaacagacgaatacagtaggatatataattattattatttttaagagtgtaaactaagagtttggaggcactgcaacagggtgtttgtgaaacatagaagataggcagctagcctgggacacaggaggttaggaatcacctcttggtgcaggtgaggtttgagctaaactttaaaggatgagtatgagttagccaagtggagagaagggagatcagagaaggttgaaacagaggaaacagtaagtgcaaaagcccagaggtgtgagaaaatttggaacattggggatggcctttgactggaatggctgaggtataaagtgacagtgggaaatagacttgaagggccagttgcctccacaatccaagtcatcagcagcagcaaaacgttactagtttttcttaggagtgtaagtcttccttaataaaggctgctctgcagtcccttgctgaatgagaaatctcctccttttagcttgctttgatgcctgcaaatgcaagggtttgggctgggtttgacttactgcttcccataaaacaaaaatgaaaatggcaagaatgaccacatgaagatagcttttaattttccagtggctgcttttcagggatcttggactacagtgatatcagaggtagagtaacttgctggctttccctggtcttgcaaagtgtccctttgttccggttccccatgggatttttgcaaatcaattttggtggttaatgccaggagtttttgaggctactcaactattaaaagacttccttcttaagagaggagacagttgtgtattttcatcgttggataatttggacatgtggcttctcaaacataccaagtgaaatcttctaaacagtcttggatgtttgccaggtgaacttgaggattgttagtattcaaagggttatttactcagccagatagtgtgacattttcaaagaaattgagaattggaaaagggaaagcctctgttagtgttagcagaaaaccaatccgtaacaagtggccccgactgaccagcctagatctggctcctggaatttctgttggcagatacctgagctatatttacagcattcactttttctaggaatgctgaaacttcacagctgattatgactttctggagatggacctaaatgtagaattggcaccaaattctgcatctgtcacaactgatagaaaggaagggacctattttacatcagtccccagtctgaactccctgttttcttctcagtattgctagatgttagctacagcagctgaatgcttttggttagagacagacactgtcaattgttccaaaatgatacttctgccgtgctccagaaggcacggggagggcctattttatttgctcaccatgagaaggaactaagtgtcagggtttgcagctgcctggtagaaactgctagaattttaatgcagcaagtaaaagggttgagatttgatgattgtccaactagaggaggctgatgggtttgggcagaccttacatgaggttatcacatggatgatgaggtgttgaaataaccacagtgttgcagatggtaggtggggtaagtaatgctttctgttgatttatctgtgataagaaatatcactggatggtccaaggaggactcactttcttaaatgttatgatgtcagaaaaaaactaagaggtagggagaaggagaattcattccttcatcttcttcatgctccttaaagttgatttactccaaaataagcaggtaacagggcaattgaatctgtgctagaccaaataggtactactcaacgcaagggacaacagccttaagaaaaatgcagagaaattccttagtatctcatgaatagtaatggttgcttaaattagagttttaaaattctgaatgattcctcacatattatcactcccttcctttctcttaaactagtttttgtttcctataaactcttattatatcagttgccccctactatctttttctaagggaacttcttgtcttctgctaaaataaaaatattcctgcatctttcacttagtgaaaatcggaaatgcttttccctccttttaaattgtatgagattactgagtgactcatgcatgtaaaaattgcaaagtaaattttgagcactggttctttcgctcttttacgctttcagtaatacttgctttccttcccatatatgtgggaccttcaaccaaaatctgggagaagattttgggacaagactctggcgtgagttttttttttcacatttccagtagtggacatctgctgttcttacttgcccagcatcccttcttctgttctttacatacaccagttgacctttgaggaattatctgacttccacttagtgtggcagataatcacatgccctgcctccatcattacagaagcgggcatgtaatgccatgctataggtctggccccaaagagtttactatcctctgagccatactggtgggcccagtagtggacagcagatacaaagagatctggcttttgtgaggactgatattaatactggggttttctccttctgtaactatagaaatagggattttgtgaacatgtagttgctggagattatctttgctggtatgtgattaaaagtgcaatcaaaagaaggaaaaaatctgagtgagagagagagagagagagagagaggattttatgaagataagttgtgtctgctacctaaagaaatttttagtattgctaatatgctagttggtgaagttgtgtggagggtatagaggactttgaagctttctctgtggtctcttcatatactatgctggtaacaagtcatactacaacttgcaagggcttggagattaaatttgttttaaggttaaaaaagcagttctggaaaccctagttaagtgattatattgtttgagagaatgacttctttttccacctcaatgaaacacttatcacaaagtcacaacgggaattcacagactgacattttcttccaattctttggtattgcactgcagaattcatagtgccttagccaagacaaacccatggcagctgtagtaatattttgttaggagcacagctatgctcttaagtaatctgagtctggttgtcatcagattgagttagaacataatgcagagtttcagcaatgttacttttcagaaggccgaatcatacttaagaggtggtacaggattaaaaccaacatagacatcagaaggagttagctagttcatcagtttaactcatacatgaatatttgggttctaatggatatattcttaatcttttaaaactgatgtcctttgtgccaccttcataaatttccctttatgtcataattctgtctgaatgggttatttttcatggtcttatgtttgagacaaatggaaattgctcttccccatcccctccttcatttcaataaaataacactaataaaataagtcagtgcaggagtattgattttattgtatagatttggtgggtagatattacagggagacagacttcaacttgttatgaggaaaacatgttagcattaagtggtgacctgtcctatcactggcaggattcaggtagtaaccattcctattgctagatgattcctgcttaaaatctatagaaggaatttgttgatgtgcgttttgggcaaaatgacattttagagctattctagctccaagagattatatactactagtgggtatactaatacgacttgtacatttattattaattataatagctactgttatttactattatgtctgttatatgctgtatacaatgcttgatatttacatacataagccatttaagccccataccaatactttgtaaatattatccccacccatgtggatacctaattgttgttctctatttttaatttcatgtgtgtttgttgacccatctagtagattacaaaggcattcttaaaatataaggcagggttatatactttgtattatttcttacagttacttcaaatatggaaaggtggaacagattcaacgtagaagttatttcttcagtcctgctgtgcatatcatgctgacaaacttttcaggggagtcctgaaactatttcttgagtctactttcctacatgatccatacatcgaagtggttattgtagaactgtgactgttcttactaaattattttacaagggagagagaaaagagcagaagttaagaagagaaggaacagtgtctaccctttaatcatcccttcttccttatacggacaatgagaactaccttacttacttaaccattgttcatttcagtgttttggtgggggagggaggaaatttaactatgcttgtattagaacaaaccattgctttaaaattattgttttaactcacttgagtcaattactcatattgttttgctagcctgctggtctcatttttaatgccagtggaatgattacagtgttaagatgtttcacccacagaaatgtggtaagaaatttatggcttgacattctgaaaataatatttgctttataaatgccatgcattcacagcatggccaacatggtcattcacagcaatgggaaacggtagcctgctggaactctacatgtcacgtggtctacataagaggtattttatgattgcctacactgttattaccagtgtcagctagtgttttgccagtagctttctacagaatcatatatttattatagctatttgcaagcaatcattggtgcatttaccattcctgggttttaatacaattgcaactcagagaatctgaaatcaattaagttttagatggggtgtgccaattggataatgaaagtgatttggaagtgtagacgtttataccatttagggaagtcattcttgatgaatcatatggagatcagagctctgcttctagcagatggaaatatagctttagggcttaaaaatgaaagacttactaggaatatcaatagaaaagctgtttttcaatccatagattaatatatacagattctgtttgagaatcagacctgtgctctgaaggttagcaaatggtattcattcctctttccacatacctaggatggaatgttcgtgttaaaagggaccttgatgatcagctgacttcacctcctaattttacagtcaaagaagtcaaaagactaattgagaactttaaagtcatctagtcaccgtatctccaatgaagtctttgacttccagttcaatgctttttcttcactcctgtaatcttttccaagcctcagaatccccctgtgttatctaaaagatgccaaagtcatggaaatggtcaccatagcaggaaaactacagactgttttcttagctcttcaccatcttagtatgtgcatagccttggggaaattatttaacatctctgagcttcaacattctcatctgtaggatgagataataataatacctcgcccaacagagttgttaaataatgaaattagttaacatgtgcaaagcatttaaaacattattagtcccagatctttctcttttaataatgagcattaattgtatatatatctaaatttcttgaaggggctgttgctatgttgggattctagaaggcagcagttaatctctttttggtgtcattatttaaaaatttctacattgttatcttaaacattatttgggaatttttaatgaaaattcagaattaagtaaaaataaagtaacccatctgataatttcactcacatatatttcacccttggatcactcgaagggaagcctaaggaacattaaagacagcacattttcagctctatagtctcaaatatttctttagtatcttcagaattatatgttttaaagtagagtagaaataaaagagtttttcatcctatttttcaaatggtcacagcattatgtgtatgtgtttgggtgttaaaaaaagaaactttctttgtaatcactcaaaatatttttaaaggtattgaaatacaaatttttggactaccatgggcttgtcagctcagaatgcaagaagtattcaaatcttgcaatttaatagattttttttaaaaaaatttaattacacatttgaagtcctgattacatcctagggatttatttgcttatgaaaagtcaaactatgaattacaatattgcagaataattttccatttcatcagattagttttaccattcattccacaaatgatttgtaaaattttgcattacctaaaaaactttgatactacattacaaaaaggtacttaaatatagatgagaaagatagatgtttgtcttcttcttttgatattgatattaaatgaaagatggaatgttttttatttaaaatcaatccctcgtattttcccccaaacacaaaagtaaatagcaatgtgaacaaaggctttctttaagtctgttattcagttcaaatatgtgttagaaaaaagatctattctgtgtataaaatataacaacaaaaaagggaattataaatagaaaaataaaacatgtagaagagactaatattctgtgcacatagctttaaaatcccaatagggaatgcttgtcagaaggagatactacacattcattgacttaagcacaaattcacaaagagcaatattccaacacattaatttgccacaacacatttacccattgaaaccagtccaccaatttttaccaacaagtagcatcttaattttaccatctaatggttaaattgaagtgaaataaagatttccacacaaatatcagtaacacagactttcctggattgtaatggagcacctaccaacattcagtcagctcacaggtaatgacactccttgtaagtatcatctcttcacacagtagcagggtcttaaatggaaaaggggtgtgttcattttctacataaatcacaggaagatattatagaactggctaatgaaaacagcttatattttggaaattagttttacaaatctgaagttatgaataaaaagtgatgaaaaaaagtagctggctgggtttcccctcttctttacagtgatatggtaaaaaatacaagaaaagtacctaacttcctttaattaggaaatctggtcccttcacttgctatagggctcagtttagaataagaaaaaaaaatatttttggctgtagctttagtaaacaataagtgatgaaaaatattgtcttcaagagatctgacaactcagaacacagactttatcacattgatgtcacctacattcctccacgaagcttggcaaatgaataactgagccctgttttggcggaatgagagaagaaagtactagttccagtacagaaataagattatgaaaaccaccaaccaacacaaaacagttatttattctcctgaataataaagacatcatgtttgcatatagaacagcttttgcattattgctctacatataagaatatattagggaactcataacagactgcacgttacaaacttaaggttctttggtgaagaatgaaagaaaacagtatttgagctttaacaaaaattattttatccatttttgcatttatctattgatccgttggatcctctcacatagtagggagaggtactgtgtaagtttcaccatggcaacaattgccacacccccagccatcatacaggttggccagaagagtgaatggaacagcacgttggaactgtagagttttgttaggataacactcttctggtttccttctgggtcagaatagcaggagaagtgttgatacttcctgaagttttccatgacaacattcaccagggacatggattcttcaaaattttttccacatttaggtatataggagcactgtggagaataagataaactgttactagaagatactatgtgtgtttgagactctaggagggggtggagtattgtgtccaaattagtgatctgtgaaataaccatggtggttattcttttcatattcaaactggtgcctttggaaaccctaataaataacacattgattaaaacaatgttttaaggtatctgaccaagatgtcccttgattgctcacccatatattatttattgattgaaataaaatgatagatatgttaattagcttgatttaatcattccatgttgcatgcgtaaaataaattaaatgattcccaggattctttttgccatagctaggtatggtaggttttaattattttctattgaacatacttctttatggaatcagaatgtcaactctgccatcattttgtctgtccacatctgtccacataacataaaaacttaccagttctctcagggaaagtagtatactcttatctttttatcttggcttcattttatttggttactttgcaactgtcataaaaaaacagctacacttctgttgaattactgaaaaagaaatctgtaatatgtaggaatattgaataaagagctgagatgagtgggtcagacccatttagtgtgccaaagtagcttttcctataagccaaggaaaaataaaacagcttttcctataagccaaggaagaataaaacagttctttaatcaccactcacctgagaacttatgctacctttcttttgatcttttcacctctcttttctttggctacctcttttacatgtctctccgctctgtatttctacacactttgatatggtttggctctgtgtctccacccaaatctcacttgaattgtaataccatgtatcaggagagggacctggtgggaggtgattggatcatgggggcagtttcccccatgcttttcttatgacagtgagtaagttctcatgagatttgatggtttaaaactgtttgacagttcttctctcatgttctctctcttgcttgccaccatgagaagatgtgccttgcttctccttcattttctgccatgactgtaagttccctgaggccttcccatccatgtggaactgtgagttaattaaacctttttcatttataaattacccagtctcaggtagtatctttataacagtgtgaaaataggctaatacagagaattggtaccaggccagtggggaattgctataaagataacttgaaaatgtggaagccactttggaactgggtaacaggcagaagttggaacagtttggagcactcagaagaggacaggaagatgaaggataatttggaacttcctagagatttgttgaatggttttgagcaaaatgatgatagtgatatggagaaagaagtctggaatgaggtagtttcagatggagatgagtaacttactgggaactggagcaaaggttgcacttaccatgctttagcaaagagattagcagcattttgtccctgccatagaaatatgtggaactttgaacttgagagaaatgaattaggatatctgacagaagaaatttctaaccagcaaagcattcaagaggtgacctggcttttcttgaaatgtgcagttacatgcattcacaaagagatgatttgaaattggagcttatgtttaaaagcataaaaatttggaaaatgtgcagcctgaccatgttggtagaaaagaaaaacccattttctggggagaaattcaagcttcctgcagaaattggcataagtaaggaggagctgaatgttaatagccaacacaatggggaaaatgtctctaggtatgtcagggatttttgtagcagctcttcccatcacaggcctggaggcattggagggaaaaatggcctagggccctgctgctctgtgcagccttgagacttggtgccctgttttccagctgctccagctgtggctataaggggtcaatgtacagctcaggccattgcttcagagggtgcaagccccaagccttggcagcttccaggtgttgttgggactgcaggtgtgcaaaagagttaaggttttggaacttccacctagatttcagaggatagatagaaatgcctgggtgtccaggcagaattctgatgtaggggtggagacctcatggagaacctctgctagggcaatgcagaagggaaatatggggttggagttcccacacagaatccccactggggcactgcctagtggagctgtgagaagagggccgctgtccttcagaccccagaaggatagatccaccgacagcttgcactgtgtgcctagaaaagctgcaggcactcagagccagcccgggaaagcaactgcaggggctgtatcctgcagaaccacaccacagggtgaagctgcccaaggccttgggaacccatctcttgcatcagtgtgccccgaatgtgagacatggagtcaaaggagattattttggaactttaagatttaatgactgcctgtccaggttttggacttgtatggggcctgtggtccctttgttttagccaatttctcccatttggaatgggtctatttacccattgcctgtacccccattgtatcttggaagtaactaacttgcttttgattttacaggcttataggcggaagggatttaccttatctcagatgagactttggacttggaattttgagttaatgctggaatgatttaagactttgggggactgttgggaaggcatgattggttttgaaatgtataaaggacatgagatttgggaagagccggggcagaatgatatggtttggctctgtgtctccacccaagtctcatctcaaatcgtaatttccacgtgtcagggaaggacctggtgggaggtgactggatcatggaggtggcttccccatgctgttctcatgataatgagtgagttctcatgagatgtgatggtttaaaagtgtctggcagccccctggccctcatgctgtctctcctgccagtatgaaaagacatgccttgcttcccctttgccttccatcatgattgtaagcttcctgatgcctccccagccatgcagaaccatgagtcaactaaacctttttcttttataaattacccagtctcagttgttctttctagcagtgtgaaaacagattaatacacacttgtatctttggattttgttttcttttgtatctcctccttccttgcccttccctcaacccccacctggctttaaatctttctctctgttcctcttcctgttcacacttccctttctcctctttcttatctagatacagatggaattaaatcacttttttgtagtttttctttttattttatgttagatatagttggacacatttttaattaaaaaagctatctctgaggaaatctctgtgacttattttccttggtttataaatgtgccatgacaaaactgatataataatgagggtttttttttttaagtttggaaaaaagtgatttaaatcacttttctgggagatgtttgggtttttggttaactctcttctctattggtaagaacctctcaatagactttttactgtcctgccccttatgtaatcaaatgattaacttatctgatttatcagaattaaattggtttctgacagaatcactgcttatctatacagtgttttagtgtgagttgaaacactgtgctccttcttcaaaacattataattttcagttggaaaattatcctaataaacttattttttttataaaactcacgtcttactgtcatttaccaatttttgcattgtaactataaatattcacatatatgacttttacaatgtgattggtacctctgtgcaatgcacaacctccatgactatatgcagagacacagataaggaagcgggtgaactttgaggtacattgatataggttttggggtagaagcctgaaatttcagaaaaatttagaccagtagatttcccaggaacaaagtatttaaaaaacaaagagttttggctaatgaaatatatttgaattactctttcccatgactttatcagtgggcacacaggcaccttgctttttttttttttttgctgagctgtagtcattgaattatttgactataaacagcaggaagtttctttgattagttaagaatggaggatgagcatgctggcatttatcgtaaaccacgtttaatgtgctgttcttgtagcaaggtctggttgacaccttaaaatttaaccagctaagaataaatgtgaatacatttgtataggtgagtagagcagagaatcccctggtactagcaaggcattaagggggtgaaagttatcaccaagaaagcagaatttttcaatcagttataatttagtatgaaaactggactttgactgccatgaagcaaatttcctaccagttagatgcctctggatcaaaagggtgtaaggcagtgtgggaatacctttatttttgtccttcaaaaatggacatcttcaaagatgccctgatcatttctttaacatttttagaaatgttttttgaaccaaagcatttaaaaaataacagacaaaccatttctggttgaatttaaaccaagccaatttagattatgaatgcttcaggtatctgtatatttttgtgccaagatagtttatagtagcaatttcagtggtgaacagtgctaagttattgaaatgatctcagtaaaaatggcattccattgaaagtgaagtttttccttttcttatgcttttgtgaattgattcagcttaaaaatatagatttttaaagaaacatttgtcagacaaatggcaataattctgtcactaggtaagattcttcatataaactaccactgagaacatctggcagaactgtaatacaggagctggtaattaaagttgaaagccattgggctttcattgcatgcatgtgggctggatggatgaggcatggtccatacttgattgattgtgggacctcagggccaatggtacacatatgagcaacagacagataccagtggagaaaaggtcctctgccctggtgtttttagctctttctcatcttgtcatttttcaacatacatataaaccagctgtcactagaccattaactgtccctgaaaatgaaaattctactatttgtcaatcagtcatgtacttttattattgataagtcctttggtgatcatgaatatatgagtagtataacaagctcctaacttgtgctcaggagatctggttactgtgtgactgtaggcaagttatgtggcctctcagaatcaatttttttgaaactatataatggggttaatagagccttcatggcagggttttttttgtgaggattaagtgatgaatatgcataaagcctcaataaattttcattaacatgtttttctattggaatttcacatttgtccacatgatcatctaaaagtcgtcaatcaagcatcacataataaactatgaaatctctaagacgagaaaattactagctgcatggttttcacagaagcagtcctgtttaatggctgtcatctcatgtcccttgcctttttgtcttaggagatttgcattgtgctgaattctacactaggagcctaggtttttgtttctgtggctcaaatgatagccatgagtatgtttcttaggcaggtgtgaatttagagtgaagatttagttatcttatgattttatcatgtgttcagagggtatttttatgtctttggttttgaatacatagaatgcatttcaataaacaaaactttactaagtgagatatacacttagttggaaaatgtaatttagatagaaaaaataaacatccatcatttttagatctctcttttttggtgggaggtgtgggaacgggaagatttagcttttagactctgtatgatatttaacagaaagaatatatgagtaataattttatatatacaatatattttagtactgataaaaaatatgttaatattttaccatggctataggtcattctttcttttgtgctttaacatgtgactatataaatctatcaaacctctgaagcagccattcagtggaagatttagacttacatctctcttaatactgagttttgttaataaaatcttactgcttttcccaatccttagattcttgacagacagaaacttctctttagtactgaaaaccacagggatggacccatgatcatgctctttcctttcccagctgaaaaaccttgggtcctgtcaatgtcttctgatcatcctttcccttacatgggcaatgaaggtccagcaatttcatcttctctccaatttttggggaactgactaaatttttttttccttagcctctcttccagaatctttcagaacagttatttttattgtcatgatggacagaagttttgagaattacctgttgggctttttttcagacatgcctcactaggcttgtgtgaagcgaagagtgacatgccttcatcttaaaaataaaagatgtggggaagggaggaggcagtaagaaagtgtttttggctgaataacctcactgtcagcctccttttccttgtgatggtaggaagggagctatccatttctcagatcacttcaagggaaaggtgtgttcttcatttgcctttttataaagagggaattgtcttattcttgaaatggggttagaaatttgataaaatccgtgcgatatttgttggctccaatataccatgtagcatgttatatataggtgacaaaaacataaacaatatagaatgtatagcgaaacagaaaaaaacacagatgggtgatgaaatgaattgagaatgtggctaaaaagcctttcagtaaagactgtaccatcatagaggtgggccacacatgtactgtaaaaactccttagtaaccaggtcctagtctacaatgtccatgaagtaaacaaacaaacaaacaaaaaccaaaaatggaaaaaaaaacattgctcatgtgaaacataaatattattagttccaaagtcaatggaactttttctagtgttcccaaacaatgaatattgtgcacatatttattaagcatatataatgtaccagactttgcattctatgcttgagaatgggacatagctcaaatgttcaaagaatgtatagttccccagctggtagccttggattcacaaatatattttgaacttttgaattttttgaacattagtgataaacaggtgagtcgagaaagtaaattgagacttcatttcttcccactccttttgagacttcatgctctttactgtcacttttttaaaaagtggatcctacaacatttaccttagacttgtttagtttgaacttctagtatctgcttgattttggcaagtggaccgttccaagtatttagtagtgaaaaggaaaacagaattcacactgctatgcatgactgtttctttcagtattgagacaaaggtcccactacagagagattttcctttcctgtatttgcccacagatctcatatctattatggcacttctgcttgatttggagtagagaagaaacttgaaagacctaggaaattgactaaggagatagaatcttctcggcgctttgggattagacaatatccagagagcttaaaccatggaatccctaggattctgatgtatccaattagtcctaaagtgaggctgatatctaatctgaccttgaatcttcaccatggccctctgtcttggcaattgaaaagcactaggttccttcccccgcttttcttcttgatgctcagtatcagcttctttctggcacattctttcttttacttatacacaaaggtgccctcttcagctgtcccagattcaactttggtaaggagtgactaaactttgtcagtcacaaagtgtttctgaatctatggtctacaggcagtttcagcaaatgtctaagaaatatctcaaatttaagatgctaattatgggatgtcaaatgccaaatttcagggcatattcccctcctccacgcccccactttttttttagcccctttcagggtaagcttctatctgtttaatatccactctacataaactggtgctgaatatacagtcctaatcttacctatggatcacagataattctattccttgctcattgtttcttacttgatcctaagtgcctcttggaataggatggaatggtgtagattctcacctgttcaccaaaatatctatcagaaggataaataattcatagaatttggatttttcagaactcttgtctttattctctcaaggggatgctctaatgttttactcttttaagagcaagcatgatgaagtaaaaatacttagattttaattcagacataattagttagtgaatgtgtaactctgggaaaattattttattattctgagctcaccttcattatgtgtggggaaaagccccacacacacccagagttagcagtgtgttgtgagagtatagtaggagaaactgaatttggatttttctacatcatcagaacagatatatagtattatgccatataccaaaaaatgggtatagcttcctttttttgcaccaaactacatttttaatctaacctcaaatcataggggcatgttttgggaattcctggtgagtaaaagaggttttaaactcctgaaggagatgggcattgaggtattcacaagcaacaaccacagtgaattaatactcagctgctgttttttatgatgctagtgacagccttgtagccaagggaggcagggacccttgagccctcttgtagctcccagagcccattagtcagccagtggctccaggagagcatgacagtttatcagcttaaacagcttcggtcataatgttgacaagaggttgggcactgggtttaaaggctaaagaaaaactatgtgagagagggtaaaaatgtaaaaataaaatgctttctaccaagttgcagacagattgactaatatcctttcgcctcctattgtcttaggacagttattatcagtagcgcctgatgtatctcaatacaaccatgcccatttcttggtaactgtgagggagaccattatttttggtgagcttgggaaggataacaggaaggggagttgacgttgaaaattgtttatgtttttgccagaattatcttgaatattcctcattttgcatgaagatggtttaatgaccttttgacatggagataattgtgtattttcagtgtgtatatttcagattaaaagcagaggctagctttctagaaagtaaagaatcactgggccaggaaagtgagccaaatgtttggtgccttttttccctgggagcatttgctgattgtggaagaggggtgagagcccaggaggctaactggcatttttgacagccttgcagagctatgagcaggaattatgattgtgggcctatcaagctggggtcttgataattcccctattcactttgggttgggattctgaagggctgcatcctgggagaatagtcagcctgaaatagataggtcctcatagggacttcagttcagatttgaatatcacagtttatgaagtcagaatgaggtgatcctgaatggcttgtacctggcagaagtaagtggaaataatttttggaaaagatgacattgtaacattatcctagtattgaagttattttttataaaaattttgcaaatataatatcagaaacctaataaaacatagccagatattataagacaacatgaaagcaaacaagagaaaacaaaaacagaacaggtatatatgggcttcaaatagtgaagatatcaaaatagactttataatgactataattttactttttatgttgaaagatttaaaagacaataattaaaatattgcagagaactagaaatgataaaacaagactcagttggatattctagaattgaaaatacagtaagagaaattaaggactcaatggatgggtttaacagttgatctgcagagcagaggaaagaattgctgaattagaagataggaatgtatccagaaagaagtaaagagagacaaaaggagggagaaaaacaaaagggagcataagacatgtaggggatacaatgagaaaacctcgtatgtggccaactggagtcccagaggtgaagaggcagagaatgactacagacaatgttgatgagataatgacagaattttctaaaattgacaaagaatattaaggagcagggaaagaagccctggaaatgctaatgctaagtaggctaaataaaaataattgcatgtattggcacataatagttaaactgtagaaaaaccaataaaataatctttaaaataggccaagattactttcaaagaagcagcaattagactgagggctgatttctgaatagtaacaatgctcaccagaagacaatggaaaaaaaatagccaacttagaattttatactcagtgaatgtgtccttccagaagaaaaataaaatgaaaaatgctttcagacaaatgaaaaatgagaacattttttagggatgtcattgcactaaaataaatactagtaaagatgatcctagatagaagaacagagataaaggaatacgaataataaaaatggaaaaatgtggatccatgtaaattaacattgactatatacaacaacaatagtaatgtctacatgagcttcaagtatacataacataaaaatgataatatataagttgggaaaagaataaaaaagtggagttaaaatgtttcagtgtctttgattagtcaagattgcaagttgtgaagttttattttaggtttaggtgcaggtttgttacataggtaaattgcatgtcacaggggcgtggtgtacagtttatttcaccacccaggtaataagcatagtaccctatgtagttttaaattctcaccctccttcctccctccacactcaagcaggctttggtgtgtgctttttcattcattatgtccatgtgtactcaatgtttagctaccacttttaagtgagaatatgtggtatttggttttctgttcctgtgttagtttacttagcatgatgacctccagctccatccatggttgctgcaaaggacatgatctcattctttttcatgactgcgtagtattattccatggtgtatatgtaccacattttctttatcctgtccactgttgatgggcatttaggttgattccatatctttgctattgtgagaactgctgccatgaacatacatgtacatgtgtctttgtggcagaacaatttgtattgttcagggtatatacccaatactgggattgctgggatgaatgatagttctgctttgtgttctctgaacacaatggctgaaccagtttactttcccaccaaaagtggataggcgttcctttttctttgcaacctcaccattatctgttattttttgactttaaaaagaatagtaacagaatagataacttctgataaaacagaggaagaaatgagattctaaaaataattcaatgaggaaaagtgtgatctcttcaaaaatggactggagcacgtgggtgtccatatgaaaaaacaaacaaaaaagaaacttgatccatatataaaaattaattccagtcagattttactgtatacatgaaagggaaaacaatagtacacctagaatgacatttaggagaatgactttatgatattagggtggacataagacttaaacagaacagcaaaagcactgaacagaaagaaaaagattgacaaaatctggttacactgaaattagaagtttcttccactgaaagacattcagagagtgaaaaggccacataatgcgagaagatatttacaacacatataaccaacagaggttcatatttaaatgattcctatattgaatgtaaagaagaaacaattccacagaaaaatgggcaaacaacttgcacggacactgcccaaaatggatacccaaatggccaataaataaatgaaaaggcacttgataacattagtcatcagaatcatgaggaaatatcactacattagctaaattaaaattacagatattaccaaatgttggcaaagatttggagcagtaagaactctcatacccatagggttggtgagaatgtatatttgcatatacattttggaaaactacttggcattatctacttaactttaagatatggatactctatgatttaaatattccattcccaggtttatacccgatggaagtgtgtgtgcttgtgcaccagagacatatatgagaatattcatggtagaattacttgtagtagtcccaaactatagacaattcaaaatgtccatcagcagtagaatgaataaataaacagacatactcatacaatggaatatgatacagtaatgaaaatgaatgaactgtaaccaaatggaataaatctaacaaacataacgctatgtgaagaaaaccagacagaaaggaaagtattctatgtgattccatttatataatgcttaaaaatgaggcaaaactattaacaaaatatatatgtttaaggatatatccttaggtgataaaagtacaaaggaaagtaagaaagtaattgccataaacagtcaggatagttgtctttggtggaggcagagcctgtagttattgagagggggcatgtagggtgtttttggggtacagaaaatgttgtatttctttacccttaaggtggttacacggtggttacgaatctgtttgtcatacttgagctgtactttttcatttcatgcacagttctgtatgttataatttactttaaaaaacaagatagtggggccaataaaacaaatgatgacctagtattatgctgagagcaaataaggtaccagtcctgaatacatatctgggacatttattggtagcttccctctccgtttatagcctaaataatgcattcacagggctgtagtgataaattgtcaaaatgaggaaatgaaaatatgtcccactttttgatgcctattcaggtttaagagttttataggcatttgtcattactggtcagctttgattttaagatctgacttaagggaagatcttgaaagacaagcactttgtgagagagctaggctttacatactgcagcacagcgctgggactggtattatttgtggctactacaaatgaaagaaaatcagagccagcattttcaaacaacattctctgaaatatttattatgttgagtcctcagagatatttgcaagaattcctttaagttattgtaacaaaagttcaaggtgggtttatcagaaacaaatcccattcactctctatgtgctagtattgaaccttgaatctactgcatttttttcaataactataagttatatcatttaagtgctgacaatttaatgaaaagaaaagcttttacaagaaagattagaggtcagaagggtttatcctggtaataagagccaagagtggcatcgagttgtcttggcatatgagattattctgcatatcgaattgttaccacaaatccaaaactcaatatatttaacttaaaattgtaatggcaagttggttctgctgacaccttcctggtcatcccagaccttataaatgtaaattttatgtaaagctttaataaaatacacattcgttgaatatctaccatgtggacttgaatatcttagtggactggaaaattcagcctctatgaatataacatatgtgaagaacacacacacacacacacacacacacacacacacacacacacacacacagtgaccatgggttgaaagtagcatgctctgcttaacattgtacatgctcaggactcatcttcataaggaccttgcaaggtggccatttgttactttttagagaaaaggaagctgaggatcagaaaggttgttatatccctgaggtcacagaactaaatgacattgaccatggacaaacagaatacacctttacctgatggttcccaggtacaggacaaacacatggttttgtcttgtacatctctaagttgcatacttgctttgaaagactcagtctatttgtgtaaagatatattaatatttaccctttcaaatggaagtgaaagctaaatctgcactaccacaaatgtaggaatgatttgtccacaacttgcacagaaaataaatattttctaggcaagagtcacatagcaagttctctgaatggaagaggcaggctctgcttcctggaagtattttcctttgaaatgctggcaaaggggaacttcagaggcagagagcctggtgtgaagctctgtggggtaactgaaatgcagtacgccaagttcctaccttctgattgatttttattgtctcttctgtgtggtagaggaggagcttttccccggaagaagtcaggttaacgtacacctggaggcaggggtactgagaaagtttccagcagtctggaccacagctgaaggagcaattaaatgtttccgtgatggacgcattcagcaaggtgcattgagactcttcggtccacacgctgcagagaaaggggtgagagtaaacacaggcccaagagctaatagtgagaaaggtatagtccgagggaattatttctcatctcctgaagctgaaaaatcttttctaaatctctaatatgatctatctgtgtaaagtttaggccttcgaatagaacagctttaagcaaactaccgtataacatagacaaacgtggacacgtgagaacgttttcaatgacttccattggatatggtattctccagtgcttgacttaagttcttttttcccttatggaactcactggtaacatgaggcatactttaaaatcatcacctgtcctcaccctgtatttctacattgtaggcagcttcttgacatgctccagcccctacctctgtatgttttactttgtactttctgcatcccagctccctccccagcccagtttgtaggcacagaaggtgtgagggagaaggaggggagagatggcaaaggagtggagggtcatgtggtccagcttgacagagatggaaggacagtgacagaatgccttaaggtctttctaataagggaaaaaagataactcaaccctttcattatgtcatgagcaatcacttactgcacattcctttcaccctaattggtaatttacatacattaccttcttttgttctctcaacagctgtgcaagttgggtagtaatttctttttaaaagtgagtgaactgagaaatcccatgacatatgcaaggacatatgggcagtaagtgttggaaattgtgatccaatcttgtaattctctaaggcccaggctcattctattgtgttttgctgtctccccacaaacacaatggaaaagaaacccttttatgcagactaatggatgaataagggtgccctgttatctctcacctggaaggattccagctgcccattggtcaactggtcatttaaaaatacctttaattttatgatcaagattaacatttgtaattaggaattaacacaccagcaattgatggtttggttttgggtataagctgatcaccatagcaatgggaaaacatgttttctttgcagattaatacgctttccttttgttggacaggcatccacagcttcctacccctttgcatgtgtgaagttttattccagaagcaggatactagacctgatcccctcccttggtgtggcaaactgtattttcctggaacatgggtggtcacattttgcttatatactgaggaaaaagtctctgatggttctaaccagatgtgaagagctgaaagcattttggaatcaacgaccacttggggcctgaggcatcagcactttcatagaaaatgagcacagctgaaggccatcagagaaacagagcagagcagccacaaatgtgaaagacgatgccttaatttcagcaaattactgtatttcagctagattttgcttctaaaatgaaagtattaatttagatggagaaacaaatgccacaaaatggtttcattttcttttggattgaaacctcaatttttcatttgaaaaggtcttgtttctttaagctgaactgctgtgagacttcattcgatacatcagggctgggcttgcctgtgtttagagtgtccaatttatggacaacagttagctagagatgctggtgggatttactacatggcttactgaggacaggagtacacttgctatcccacaatttatttgcctccctatccattcaatacacctacagcaaatattgaaatgaaaagattcaaaatctgttatttttaaaagttgatgcatagcagtgtttctcagcctagaaggcccattagaacaacctggggagctttaatagatactggtgactgggtcccactccggaccaattaaatctgaccttctgggttgatgatgatgggggctgggtattagcatttttaagagtttctggggaaattggaatatacagttgagaaccactcacgtggaaggtgagggaggggttggttggggtggaaaagggaggagggtggggaacggacagaagtgtgaagtggcaggaacagtgactttggaataagcgagatgtgggcttgaatcttagctctgccacaagcaagagctgtatgacactggggaaatcatatctctcttgagcctcagttttgccgtttttataatgagtatatttatacttaccttatagagtaattgtgataattaaagaagtagaagtctttgacacctggtatccagattatacatagagctatatgtatcattattattagataacattattgaaaagtattatttaccaggaacttctcaaagttcttatcaggaaagaaggtgaggaagatgaccttagggttgcctaagtgatgggggaggatggagcaggagacaaacagcagggtcccacccacccagtggtattacctctgcatgtatgagcgcaggagtgtgattcccagcagaaaatacatcatgatggagcacaccatcatagccagtcccaggagaatagctcggtcctctcctgccttcagtgctgtgactgttttccttttgtccaggaggtcatggtccctgattttctggtaaatatttctgaggttaaaaacaatatggtcttacattaagtttagttaatcagcatgcccctagagagcaggtcagtttctgcccatgccttcctagggccctccaaacctgcttcagtgcagctggacctcagtgtgtgtccactacctcccacacaagcacacacatgcatgtacacacactcacaagcacatgcacgcttgtatgtgtaccagtcctgagcagaaataagccctccttctttactctggggccaatgtcttaactgcaaattaattttccttctatctaattctaaagaaagaaaccaatcccctcaaccctcaaaataatgctttgggtttgttgactttaccatttaacccaaatctgatcattattgatttttagataattttggaatacctaatggagcattgattcaaataaatggcaacatatactaggaatatatcaaattaatctttcatttttcttcagtagtgataggtagaagttattttggttaacatttttctcaagctgagagctgcttagggctttgttggcttgagattgataagcagtgtgaagatgtagagtggtgacccagctattcttatatgtgaaaactttcgattgagttagaaaagtgtcattcaaatcgagcccaggccctataactttggacaattttattagtatttttgttttttattttagagcagcaatgtagggtaagaaagaacaagaaattgaaatcaactgtctcctgagttcagactgatttcactgcttgttagctgtgtgatcaataacaagtgccttagtctttctgatccccagtcgcctgcaaagtgaaaataatgtttaaatgcattttaatggctaagtgacatgatacacgcaaattatttaagagaatgactgacatgagatttggccgggtgtggtggctcatgcctgtaatcccagcactttcggatgccgaggcgggcggatcacaagatcagacgattgagatcatcctggctaacatggtgaaaccccgtctctactaaaaaaaaaaaatacaaaaaattagccgggcgtggtggcgggcgcctgtagtcccagctactcgggaggctgaggcaagagaatggcgtgaacctgggaggcggagcttgcagtgagccaagatcatgccactgcactccagcctgggtgaaagagcgagtctccatctcgaaaaaaaaaagacaatgagtgacaagagattagtaataaatgctcccattcaaaaatggggtggggagctacagctcaatgacacggacatcagaacatcctaaaattgctactattctacagagaatttttaatggacaaaatggcaagaaaatgagtagtgtataaagcttggggatggaggattggatttgaaaccaggtctggaggagaaggtagaaaagaaatgcggaagtgctgggtgcttggggagatgatgagaagcttgagtaggaaggcaatgctcaggaattcctgcaaggcctgtgaccaagaaacagctcatgatttttcaatgtctattttgagaagggagctttggattgcagggcagtggaaatgggaaaatcgctggcctttagagcctagaaacagcaaggaggacaaataaaatgctgaaaatggaaaaagaaactgaagtcatttttttttagcttcaggcaaaaagccaatatgcacaagaataacttcagatttttcattcaaatttttatggctaatcgctcttgttgcttgggagaggaaccagagttgactctaaagtggaactttgcgggggagggaagatatgcctgttgtttgcgcagttgtgtgtttattcagggcttatatttagctttgtgctccaggatggcctgactggtgtttatggccagtatctgttctgattggctgatcccttctgggctggttgctaaacattttgattccttatagaggtgatggagtgtgtatgtacttaatatatttccatgaggttgtagggccgagtatttattaatctaagtattggttgtgcaaaattaactgattagcttcttcttattattattttaaagttctctttttgaggtggtttgtataaatcttactctttccttgagaagtgagcccattgtagtaggagagtcagagctaaatacaggcctttgtttatcatcatttcacggccttgtctttcctggcttcttcccactctcacttgctcttggctgctcatggtcattgccagaggcctggagagcccatatctttcattgttccccagctcccaatcccaatgcctctggattagctggcctgccctgtttttgacttccacagactggcaaccacccaccctctgtgtttcttcattcttttttgagattttgtttggaaattctaggatttacatcaaagcttttaaaacttcaccctttaggaactcaaattttaaaaaatcagtgtccgttagcagctaaagccagtgggctgaaagcttttctgaatcaggaagagacaggctgagtctgagtagcttcaaagacctgctgtaaaataataatctgctgttacttcacttatattatttatcaacatgtatttaactctgatggctgccatagagatctgaatttcctgcagatagaagacagcaaggagggagcataatctcacaattccagggtattagactgtcacacagcatcacttatgtcagcctatacccataaaagagaagaagtgtaatcagtgtcatcagaacaagaagcatataaaaatgattcaaacgtgtaattcaaaaacaaatcacaatttgaaagtggttaacaaatgtttttgatatgctctggaatgtatagagaggggaaaagtgaatgattttcatacagcccaaaaatatctgagaaatcaggatactacccagcaaaatgaaagtgggtgagtggagtgggccatacccatggaattcattagtaaatgattatagaattaatggaaaataaagaaatgaatacatgatttggaagagcagagttcagtttaggttcacacacttctcctgaatgctggtaatctcttgttattggggatatggcccctgccccaaaggaaaacagacatgtatataaatatcagcgtggggtgaaaaacttaatgatggagcaattcacagagtgttatgggaatagagaagagggaaggataccccagcttgagggagcaggacagagagccagggttgaatttagggaaaggttcctgaaggagaaacaccttaaacaaaatcttcaagattgaatcagagttaaccaaatgagacaaagagtcaaaggtattttagacagaaagactcacatgaacaaagggatggagacttgcaattgcatggtgaatatcagaaactacaactgttttaatattactgagatgcctatgggacagggaaaaagaggcagatgagtttgcaaaggtaggtaggccatgaagggttttgtaagtcattctaaagagcttggcctttattctgtagtgaataggaatctgtcagagggtgacacgattgagtttcaaaatgatcactctggcttctgtgcagagtttaagaaacaggataaggcttaaatcagagagaggaatggggggattgttactgtagtgttggcaaaggacagtgagggctggatctaggatcaaggtaggatgtataaagaagaaacgatacatggagaaatatctatgagacagaacttcaggatttggtggctgatagaatacaggggatgatgaggaagtaagaaaaaggatatagtttagatttatgctctagtacttgatgtggatgactggagaaatcatggagagtggaaaggtgagattcttgtttccgtatttccctactcttccaggatccaaagaggtgacttctgctgaccttgctaaagaggaagaaagtgattgtacatttatagtacacacaagtttagtgtcctaagcacaggcagaggagtgactaatctcaatggtgagataggccagtcagagggccacctctgttttttgggtcattgcttatgtgtggcataatttttgtaaaacaaaaattatcatttggacttgcttttgttcaggctttggttttttgcatgtccaagtagtaaaggtagtaagtctcagttgggaaagagggtgttcacagcctgagacagggtgcattagttggccccttctacaccatgttgtcttcagtgctagttggaaggagcatgatgccatattttgggccacagccctatgtatcctcttccatactaggaagccttgtaatgtgtgagttaccatgtaagtattaacaaggctgatagcttatcaccctttggttctttctgtctattctttatgaatctacctgagaggaattgagggtgggggtggtagtgctaagaataatggaatgagggacaattcactgatgtggagagctcaggaggaagaatgagtctggggtatgactacaaattcagttttgactaagtgtgctgcccaacagtgggtgtagagcaggaatttgactttataagtttgaagctgatctagccttggtgtgtcctggcaaagcaccatatttaaggtctgttgagatagtcttggcttcagggtgaaccacatgttgacaataacaaatagtagatatgtgcagtctttactatatatagggaacattctgttcaaagcctttggagaatagaagttattaataaatctacagggcaaatccaagtataacaaaagtgtttgtgataaatatcttgtaaacaaaatattttcaattgtttagtaaggcttcaatcaattttacgccaagcattagtcaacctagtaaaattttattttgagctccttttatgtagtttcttgaagtttgatattgggggtcagcccataattcataaacaaattatttttgaggccatgcacatacaaatatggatataaagagcaaaatgtgaaagaaagtttttcctccttggctgtcacacccatttaaattcagattcccttggtagctatcctataaagagaaggagaaaagtattcaggttaaggcagcataaaggccacttatgaattaatttgcttattcattagtcaacatttctaagtcttcatcagatgaaacacaatgtgctaagttctggcgataccaaataaataagacttagagtcccaagggagctgagtgagatgtcagtcattgcagtgtatggcaatgagactgattagataggtgtgtacaggagaagcaaactgatacgccaagggccaacttgctaaaggatcagtttctcaatggctaattcccaaaaagccagtttactgaaggatcagctcactacataaatattttgccaactttacgacacttacagatttaacaaagacttattttaaggagtattgttttaaatatagtaaatgaatataaataaatttttgtatgaatattttaagactatattttaaaaatctgttcaatcataaagtgtatttttcttacggatacattcatcttagtggtattttaggatcagtttgatatttttaaaagctaagttttctaaggaggcttagtctctttgtaaatatattcttatgaatatatttataaatatgcctttcttgaatacgtttgtgaatatatccttctaacaaatatgacaaaaatttagcatttcatgtgggaacctttcaatttttactagttttcagattctttttagagtcactggctgttttgctaatattttagaattattgaaattcttgtggcaaatttcacattatgaccactttgatggatttatcaactttatcaattaaccaaaatttgtttcttgactcattgataaaggttatggtaagaatagtaggaccctctgctaagctgaaaagaagaatcagtgaaacacgaagtctggcccactgacctagagagggggacacacaggggtagaggagggaagactagcgggcagaggaagcaggagggcatggctgggatgggggtggggggaacaggggacagagaggaagggagactggaggccgagggtgtctgggacaagagatggaaagacagaggggcggagagattgagagacaatggctgcagagagtgagacggagtggagtgagtctgaaggccctaaatctggcccccctgtaaatgttttcattccatttagtgtggtttattatagaactgtgtagggttacagtgatcatacaaaatttgtggtatatagctaaattcgataaattcatcaaaatgactgatgacaaatggattctttggcaaattggcttcaggcacattggccattactttttcaggcattccttaaaatgaacagtcagtggatcgatggtagaagaaaaaaacagaaaagggccaaataaatgtcaggaattaaaaaccgtaactacagacatgttatggattaaattggcccagggctatgatttacaagctcaaaggtggtttaggaagcctgccagttagggaccataacttgatttaaatggtgatgattaagagtcctttgacggaccaaactaagtcttggacgagcaaatgattgagaaaggaagagtatccaggcagaatataagagaatagaggtagtagagtgtggttggattccaggatattgtgggcagggaatggcagacagtgagctggttagataggcaggcaccagagaaaaaggatcttgtatgtcttttgaagttagagggggcattaaaagaattaagcaagtacaatgattagatatgtgctttagaaagatcactcgtgttagtgtggttggttgtttagaaatgtttacatatggagacaaagggactgattcttaaactctcccagtgtttcaggtgttagataaagaggggtttaaaaaaagagaaatgatggaggagattaagatttagatttacttagatgaagctggaagccattatcctcagcaaactaacgcagaaacagaaaaccaaacaccgcatgttctcacttataagtgggagctgagcaatgagaacacgtggacacagggaggggaacaacatttactggggcgtgttgggggagagtgggagtggaagagtgttagggaaaacagctagtgcatgctgggcttaatacctaggtgttgggttgataggtgcagcaaaccacctatggcacatgtttacctgtgtaacaaacctgcacatcctgcacatgtaccccagaacttaagaacaaacaaacaaacaaacaaatagatttagatctgggcatcatttgtgtctagaactagcaacactatgggttttaatgagactctttaagtagtcagagaaacaaaagacagcgtggccactaaaacatggaaagggcagaagagaattctgcagaatcctgaagctatcagatacatgatggggcacctggtggatgcagggaagagaagtagggaaagcatgaattagaaatgaagaattaaatgtatctgaaattacttggctgagagctcttccagaacttacatgtgctgaatatttatgtttgtgcctctctggcccagtgaatactgagctgttcaagagttaaagacagaccacatctttgtaagttcagtctcttgcatttattaggctcacaaaatatgttccttttatttggactagactggctacaacaagcataggttgtgagatagccagttatagggaggctgaatggtctattaaaactaaataaatcagggaatgatggctagaacagacctccagtttctatcttcccatcagtgtccattggactctaccaccaacaaatttagtactctttccagaagaaaatcaaactctccaggcactgaaccctctagttcccagacttagggaaacatgcccttctgttagatcttatgaaggtgtacctatgaggcaatggattgctgagtgccttcagagcttcagtgagcacagctgctatacatctctgccccacgagaacacacctgttatttcatatggcagagaaggcatggctttgatgaacacagccattcttctgccttctgtccaccacagcctcttccatttttgagatgtgcttcttttacatatatcctcatcttaaattagtttcagattttatagatttttccttgagctggtaggtatatattttatggtacaatttgattagtttaattattattatctgttttggtcttttaatgtgtacatttcatcaggagcaatgtgtttttgagtttggggagaaatgacagtcacacttcatttatatatatatgtcattaacatgaaggattttgtccatgagcttaatgttattattgccaacgtattaattcatgggacttcccaggaagtcttgtaacactgtgacccaggtcttatgggtaagacactaaaagtgagaacaaaattatggaaacaaaggttggaattattctttttagtcctgcctttagcttattagataacacactctcccaatgatatcttaatattttaattcatatttatttttgttggaccaattagcatattaaattttatgaaaagctttaatccaagatatagaaagaaacagaaaattatgtgaatcgtccagataagtgagggtgttataacctagggagactttgagaagtactggcctttttattgaccacattatttggctctaatgcaataatgctagaaataaataacaaaaaataactagaatgacatctacagaagaaagtaaaaccatagtacaaagaactcatgggtcatagaataaagtccagcaaaaattaaaaatcagaattaaatgatatgaaaaacactctagaacaattagtgggatgcagctaaagcaaaactgtatatttctaaggatagaaatatatagtttcaaatacttagataagaagaaagcctgaagattaatgcactaggcatccaaattagtaagttaggaaaagattaacagaatatactaaaacaaagtataaggaaggaaataataaacttgagcagaaataaatgaaatagatgaactatattaaaggactaatgggttcaaaggttaatttcttttgaaaagactaatgaaaaactgaaaaaattgatcaaggaaaaaatagaaaagggccaaataagtatcaggaattaaaaactataactacagataaggtatggattggaaagaaaatattgaaaataactatataatgagacatttgaaaactctgaagtttataacttcctgaaatatacagcaaacttttccaaaaatataacttactgaaactgattcagaaataaatagaaaactcaaatacttataaatcattaaaaatttgaatcatcaattaaaaatatcaccataatggaaacagtagtctctgatgatttatagctaaactgtacttatagtatacaaatcattccagaatatagaaaaagatgaaatgctacccaacctattaatgaagttagtaaactttgatactaaaaccaaatcagaacaatacacaaaaaaattataggtcaatatctttcacaaacataaacgtgaaattttaaaaacaagataaactagcaatatataaaaatgaaaatatatcatgatcaagctgtggttatcccaggaacttataatgtgggttattatttgagtagtaatgtaatctattacataaataatatattaaagggttataatcatataataatgtaataaatgtagataaacatatttgacaaaatttaacattcattcatgataaaaactcctatcaaattgaaaagataggaacatccttaatatgataaatggtatagaagaaatacctatagtaaacttgatacttaatggtgaaatgttgacagaatccattttatgagcagaaacaaaagtaaagatgtccattattacctgttttattcatgatttactgatttactagcagtataacatatgaatgaatagtatatttactgtaaagaagaaataaaagcgtattcaccaatgatgtaattatgaagaaaatacaaaagaatctatagataaattattaataagaaaatttaggctgggtgaggtggcttgcatctgtaatctctacactttgggaggctgaggtgggaggaggatcacttgaactcaggagttcaagaccacagcaaggcaccatctctaaaaagaaaattagccaggcgtagtggtgcatgcccgtagtttcagctgcatggggggccgaggtgggaggattgcttgagcccaggatttcaaggctgcagtgaatcacgattgtgctactgtactccagccagtgtgacagagcgagacccttttgcaaaaaacaaaacaaaacaaaaaacaaacaaaaactagtatagttgctgaaaccaaagtgatatgcaatagtcaattgcctttttatatattagcaaaaatggtgtaatttaaacattacaaaaaaaaagacagtgctcaaaagtaaatggaacaaaaccaaaaattgacaaatgggacttaattaaactaaagagcttctgcacagcaaaataaataattaacagagtaaacagactacctacagaatgggagaaaatatttgcaagctctgcacctgacaaaggactaatatccagaatctatcaggaagttaaacaaatcaacaaggagaaaacaaataacccattgaaaagtggacaaaggacgtgaacagacacttctcaaaaaaaagacacatatatgcaagccaataaacatgaaaaagtactcaacattactaatcattagagaaatgcaaattaagaccacaatgagaccatgcaggatggctattattaaaaagccaaaaataacaaatcttggtgaggctgagaggaaaagggaacacttaggcactattggtggaaatgtaacttagttcaacctctatgaaaagcagtgtggagatttctcaaattactgaaaatggaactaccatttgacccagcaaccataattgataccattactggagtgggtatctacccaaaggaaaagaaatcattctatcaaagaatatctgcactcatatgtttatcaaagcactattcataatagtaaagtcatagaatcaacctaagtgttcatcaaatgtggtacatatacaccatcaaatattgcacagccataaaaaagaatgaaatcatgtcatttgcagcgggaggctgttaccctaagtgaattaacacagaaaccgaaaaccaaatactgcatgttctcacttaacacatgggagttaaacaatgggtacatgtggacataaaactggaaacaatagacactggggactccaaaagggggcagggagggaggaaaaaagagttgaaaaactacctattgggtactagtttcactatttggttgatgggttcaatagaggcccaaacttcagtattactcaatatgcccatataacaaatcttgcacatgtacctcctgagtctacgattagaaaaacaacagcagcagcagcaacaacaacaacaacaacaacaacaacaacaacaacgtagtgaagttatgagagtaggggtcgttcaagtttcttttttggcaggataatgaaagcattaattatcttcatattggtcaattcatgcacacatatgaaaatgtaattatctaaaaacataaatgaaatatccaaatttccaaatgggagaaaatagaatacaattttaaagacttaattagtttggctgaattaaacagaccaaaattacacaaacaaatgatgagttaaaaagtaacttgagtttggaaaaggcagcccaaatatattagtaatcataattgatttgctctacaatattatcctgaaagttcctgccaatagagtaagagtgtaacacatgagaaaaaaccgtaaggattggaaacaaagaaacattgttatttgtagaaaatacaaatagggaaatcaaaacaaatctatcagcaactatttaaaagcatactgagttctacaaggttgattgatagaaaaaaatcagtaactacaaaagcagtagcatttctacacatcagcagtaaaaacacatatataacataagaggtatgattataattgccacaaaatgttgcttaaatataaatctaatgaaataattgcaaaatgatatcatgattgatactgcaatcatgataattcatgatataattcatgaataaataaggaattatattccgggatgtggagactcaatatttaaaacaattcagttagtcaataaattcaatgccatttcaatacaaaggtagtacttaggaataaatctaataaatgatgtacactttttttaaatgcaaaactttattaggagatactagggaagacaaaccaatgtagaggttaatcgtattcattcagagaaagacttggtgacataaagatgtaaatttatcacaaattaattaataaattttataaaattctaataaaaatccctagagttttttttgggaagtgcgataggtgtgacttgccaacctgattttaaaacttacttggaagtgcaagtggctaagaatagtaaatacacttctgactacaaaataacaagatgggtgactggtcctatcaaatatcaagatgtattacaggcataatgctaaaatttgtaaactgttgtgaggtgtttgtctgaggtggacaaaactggccgctagaacagaatagagattcaaaaacatatccatgtatatatggaaatgtaatatatgacaagtgatttttagatcaatggggaaaggagaaactctccaataaatgatgctggggcaattggttatccatataaaaactggatattgggtatcagttccagatgattaaatacgtaattgtgaaagataatgctacatgaaatttagaaaactgtgcaggaggatgtctatttgaaactggagtaggacgggatttcaaagtgttccaaaaattgttaatttagaatatattaaaattaccaaacaccgcatgttctcactcataggtgggaattgaacaatgagaacacatggacacaggaaggggaacatcacacaccagggactgttgtggggtggggggaggggggagggatagcattaggagatatacctaatgctaaatgacgagttaatgggtgcagcacaccatcatggcacctgtatacatatgtaacaaacctgcacgttgtgcacatgtaccctaaaacttaaaagtataataataaaaaaattaagaacatattaatatatttatcaaaagacatgaaaaagaaagtgaaaagccaaaccacaaactgggagaagctatttacatacatatagcagataaataattaatatggacttttataaagaattcctgcaagtcaagtaaaagacaaacaatccagtagaaaaatggtaagaggtatgattataattgctgcaaaatgttacttaaatataaatctaatgaaataattgcaaattatttaaacagtcaagtatttgacctaattggggcaaatatttaaacagtcaactcagaaaaaacgactaaggaaatatactcaatctcattaataatctgagaaatgaaaattaaaataataataccctcttgattactgaaaattagaaatccgaaaactctaaacaaggctgttgagcaatgggaatctcatgtatggctcctttggaaaaccatggcattacttggtaaaattaaagctgcgtgtacttttgaaccaaccattcccatgttaggtataaatcttaagaaatgttcatacatgtgcacaaagagacatgtagaagaatagcatcattgttggcaatgacaaaagaactggaaataatgcaaatgttgctcagcagtagactggatgaataaatggtagtatgttcatgtagtgggagactacatagcagataaaatgaactgcagcgactcacgccagcattggtaaatcataacaacataatgtttggtgaaaaaaacaagttgcagaataaatatggcatgattccatttacatgaagtctccaaacatttggatggaaacaatatattgtttaaagatccaaatgtgataaactcatgaaaaaaaatcggggaatgatatgcccaaaattcaggatattgattgatattgattgatggggagtagaatagtattgggaaagcatcctcaagggcttcaaaaattctgattgttttgttttttaaactgaatgatgggtacctggatgtttataatatcactttgtatattaacatatgtaataaatattcatttgtatcacttcaatatttaaaaaaacaatttaaagaatatttgataaacagtctgtaatgcccttagcttaaaaacctctctcttctttaatttctaaattaattattctgtttgtttgctgcttgaaatttagggatcgggccgggtgtggtggcccacgcctgtaatcccagcactttgggaggctgaggtgggcggatcacgaggtcaggagattgagaccatcctggctaacatggtgaagccccgtctctattaaaaatacaaaaaaaaaaaaaaaaaaaaaaagttagccaggtgtggtggcgggcgcctgtagtcccagctacttgggaggctgaggcaggagaatggtgtgaacccgggaggcggaggttgcagtgagccaagatcgcaccactgcactccagcctgggcgacagagcgagactccatctcaaaaaaaatgaaaaggaatttagggattaaagtaagttcaactaacaaagaagtttgtttagagaagaaaaaaatatttctccacattgctgggttgcagaatgggagatgaagataggaccttatgttttgtatatagaagatgatcagaaaaagatctggcttggaattaaaataaggaaaaaaaagtaaaactgacttccatttcttctgagcaaaaaaacatttggtttcagaattttcagtgaacttttccttccactgaagtttctctgcctgcccttaagctggtttcctggtattctacgatttgaggaatcccagggaatccgatatactgacacatttggccctgttctcaggaagaggaggtgtggagagcagctgaggattttgtatggcctggcttctgggattgctgtgggaacacagctggagaaagcaggcacacacagaggccaggtttgcagaacaagaagaaactgaattaccagcaatttgaggcagtgctgtcagacaatctagttaatttatttccaaataattaactggaggaccttaattatgtagattaattatcagccatcatcatcttcattatcaccatgtttattgccaccaagaacaccttaaacagagccacagatactgctcaaagtcagtttaaaatctgagtcatatcttccaagagtttgtgaattaagcagcaaagacgaagatgtggtcaaaaaaaaagcacagacaaattaacttccaacattaaactaaggaatggcagattctattgcttaatggcagattctattgcttgtattttttggccatgcagacttatttaataagcttttgcatccccatcccataaataaagctgaaaaatgatttcttcgtagtcaatattttaattattataaatcccatagttctgaaatcatactttaaaaataaaaaattaaaacagtaatttcagtttcatagaatcttactgatgcagaatactaagctaattgttcacacctttcaaactccacaaatattaccaatacgtcagtcacatgtttattatcttctttgatatgcaatatccaactctattttaacatacttttccccttgtgggcttggctgttcactatcactccaaatatttcaagtttgacaagagcctgggcaggtactggggtacagggagagagcatcagctgggttcaaatcctgattccatcactggctagttgttgggcctttggaagttattgaaaatcactcagttatttaaaaagcctcagtttcctcatctgtgaagccagcataataatatctatcttaagagaacacaattaaaacctacagtacacagtaattgcttcttaaatgttaattcctttgttcataaaaagtagcaaaatatattaaattatttgctgagagtaaatagaaggtgaaagaaatatattacacttcgcttgctctaataaagccttcagaatttcaggacagctggctgttgacagttacaatattcctgtagggcaacaaaactcttggatttggtcctggcatgaaagttgcaggaccaaacctctgtctttctgcactttcaaatatagaatttgaaatgacatatgaaattttatagtgttacagaaaagatcttgctgaaagatgattcaacttgaaagcaaatgaaaaataatttgattaagccttgagaaaaagcagtgaaaacctagagatgatcaagtaaagtaaattttcagttaatctgcttggtgtcatgatgagcactgggacttgttttttaaatgctgacaaggcaacattatttgccttctgggctataattttacttaaatatcatataattattttttccataattaaggtaacaatatgttacaaagcatttggaaagcagagcagtaaaaaccatgctatttcttccagacttttgcctatatatattttttgtggctgcaatcgtagtttgcatgcaaattttcaacttgcttttttcagttaatattgtgtcaaagcattttaaagtgctaagtggtatattacattcagtgatttatttagcacattttctattgtgaattttcaagttgcttcccaatttttgctataatatataattattgtgaagaacaactttgcttttgaaatttttaaaagaatttttatctgtgaggcaattcaggttttagaaggaaaataaaagtatcagctctgaaaacagtattcaggcaaacctccttcaggttcttctccttgtgcccagcaccatttatcaattgtagtttttaatttttattttattattattttttcacaaatttccttcaaccaaatcaatcctgacttctatcagattctgcctgatgcgcaacttgcttacattgcaatatgctggtaaaggcaattatacttaaaatttagcttcacttaacccagataatagtgcaaggtcaatgagaaagaggaagactaaatatttaaaaatgactagagaattttatgaatacatttactccctaaacccaagtgagaggactggattgagttgcacaaaggtcatcttgtctttcattaatgctgcctttgccctttatctttcttcttattccctcatttttcccttcctcccaggctattcttccaaggattttaagggctcaatggatttgtatgtcctcttttcctcctctcatactttctgttttccttccctgccatatgtccagtgcccagaaatgcagttttcatcacttcagaagaagaaactgaattgccagtagttctcagtatttattattttattaattatattatatttttattattttttgttgttaataaaattaattcagttaataaattattattaatacatttggtgctcagtatttattgagcgccatgtgccaggtacagtgctaggtgctggaaattcaacaacatagtctgtttggttaaagaagatgatgggagtggtggttcttattgatatctgaaagcagagctggagttagctaagcaaagagcttgtgacatgggaatttctgacagggaacaacttttgcaaagctatgtgctgaaagcgaacatgtaaagtgcaaggagaaggaaggccaaagtgtctgaaaccctactcctgtactgtagagtctgtccccacattgcaaagcataaggctcagttgcctactactttcctgtcagtatcctctttggagagtcaggttaaatgcttctgaaaagtgcccagaatcccagtgcatttaccttttttcatcatgtctataagatgaagaggtccggccactggtccatataaacatcttagagaatgttggtccagggtctcctttccttatggtggatgtcctggaggaatggcaaaaagacctagaagaggtacacaatgaagttaacagcaacaaatagctctcagtggattgactcttacataacaacagggttttgattccataggggcagtggttttcaatcccggctgcatattaaaattgactgggaatttttaagaaaacactagagcctggtcctctctcagaaatttgcattcaatctttttaaatcttccttagctgattgtaacatactgccgggattgagaattactgccttaggagaacgtggttttctaattgatgttaaaatcacattttcccaaaagtatctccttcaaaatatcactttggtatggtttcatactctgtactatgctgtatttttccaaaattttagttcaaatttggatactaaaactcaacttcttctttcctcttcaatctgtttttttctttaaaatgctgacaagtgtgacatgttggtgatgaaacgtcatctttaactgtgccccacttttgccaatgttgtggcatctgcccatggcagttgagtctctgcctaagaaaattacagcatcagtggcagctgatactcactggcttctggagaagccaggtttataggctctagagtcaagatattttaagaatgttgtgggttattattattattattattattattattattatgacttggctttgggagaagttctttcctctctaagcacagcactaaaagtagttagctattattgttttccacataataataattttcttgagagttaggaacattaaataaaaaagccttaatcatatataaaagttaaaatgatatttaacacattagaacaaaggaaggaagactggtgattccttcatggatgcatagtcattagtggctttcagtttggttaagcacaatattaatgataagcatgagatgggaaataacattagctactatataccatattatctactatatgccacacactttgaatgtattatttatgcacatacgtatttcatgaaatgaacatgcatatatctgtgttatgcttatacaatgaaaactctgcaaggtgggtagtgatattatttccaggttctaaatgatgctttcagaaggttgagatttttgcttacatttagaagaggtagacccatgcttcaaaccagtatctacttgccttccattcttttagtttttaaatgaaaaatatattctttagagatgagaacttgctacatttcccaggcaggaatgcagtggctattcacatgcgcagtcatagctcactgcagcctcaaactcctgggttcaagaaatcctacctcctcagcttccccagtagttgggactaccggtgcgtgccaatgtgcctggcttagcttcagctctgtaatgtgcatatgaatgacctaaagatttgggccagttgtggtggcttatgcctataatcccagcaatttgagaggcttagtagggaggatcgcttgagtccaggaatttgagaccagacctggcaacatagcaagatcccgtctctacataaaattaaaaataaaaaaaattagccacgtgtggtagtgtgtgcctgtagttccagctactcgggaggctaaggtgggaggatagctttagcctgggagtaccaggctgcagtgagccgtggttgtgtcactgcaccactccagcctggatgacacagtgacaccccctgtttaaaaaaaaaaagaaaaagatttgttacaattcaaattctgctttagagggtcttgggtggagtctgagagcctgcctttgtaacaagctctcaagcgatgctgatattgctggtctgcaaacaacagcgagcagcaaaggatcagagcatgcactcataataagtgattggttataggccctgttttgtcactaactagctgtgtgaccttgagaaagtcacttaacatctttagggcttagtctgtaccacggagagtttgaaactgttggcttctaagattcctctcagcgccaatattttgtgattcaataaactgaagaatggatctaagcatatactatatcgttgtgtatttactttctgggattaggtttgggagttgatctccttctataacccttgggtcagcatcagagctatggggaacagagactgtgggaggtagaacagaggctgagagtttagtaaccagtacagatgcaagaattcatacatctactcttgttctaggataatggcaggaatcaaaggattcacctgaatggatgccctagacactagatttagaaagacgtagaaattaaatctgctatctctttaaatggcttaggcctggttgtttaaagttatttgtttctttttgaacatctctaaaatatcaaatagaatagggactacatccattattaaaaccagttaactttcaggaaataagaatacttttcatctaaattgaatgaattacttcataagaatgaggattggcttaaactttcaagaagttatttcaacttggactctggtggaatcctctgattgctttagtcattccttcacagggtttgggcacaatttgagtctagctaaaccaataaattcctgagtgctgtcctgttcctggctattaggcagcatttaatagacacatcatacaaattataaatgttttgaaactatacaaagtgaaaggagctgcagtgatttcaatacatttagaatatttttcagactgtgtgtcattattccagcattgtatctttgctctgtttcaagatgatatagaaagagggagattaaatatatatttattctaatgaactgtctaaatcttgttggaaaggacttagtgactcctcagtttattccaataagtggatttggagtgtttccaccctagttttctttcataaagacaaaccattatttaaaacctgctgaagtcattgttaattaaaataaaagggagtagctgctttaaaggcaacagtacaaaggttctgtgcaggttaaaaaaatttccaggcttcaaagaaacacctagaattccaaatatgttaatggaagctggcttggaggttctttcccagctcaaagacagcccccctgaactccttaagatattaattcaattttgctcattttataggacaagaaacttttcatttgaattgtgatcaggatagggatatagagaccaaaaaagaaagtactttacacaattttgtaatttggaatcctcacgtaaaacagagatctgcgttgtatagtggctgaacagagctgtgggcagtgaggagaggaaacctgaatctaattccaccattaaatgatctaggaactggagtgaacctggcagaaccattcctatgtaactgcagatgagtatgatgtgaaaattcaaagcttaaagatataatctcagccctgagtaaaaggagggagtcagtgagaatgtgataatttccccgtctcagaaatttataaagggccctttccatttctcaagcacacaccttgctagtttctgtttccatgattcagttcggccattccttctgccttcatggtgaatgagttaccctgtttcaaagccatctcagatgaccctcttctgtgaggtcttctctgacccatatgaacagtttcttcatctctgctcccagttctcggtacttacttctgctaaggcaaggcaaaatctatcctgtttgcgtgcaaatctgcctcccatgctaggttataagcatctgtagggcaggactgtgtctcatgcacccttacagcacaatccaggacacatagtaacacactggctgtatttgctgccttgaccatctaagtatgtattgggaaatgtggccattagtatgactttggcctcatgcactgtgactcatctgctgggtgcagttgatgtttcctttctgacccttcccttagcttgcactgtctttcattcttcttactctctacttcttctctttccttctttcaattgtccagctccatctatccctttcattggcttggacagaaaatttctgttgcttggtgaagtatcattcactaagattttctttagatagggcaacatggcctgatgaaaagataagtgagagcagcagatggggccatttgtttgtttgcctcctggcatcaccatatgccaactctgtgactttggacaagtcaatttaacgtctctgagtttttgtttcctcagctgtaaaaatgggaataataatatttgcctttctgggttgcttgggagactaagtaaaacaatacatgtaaaagtgtttaaagtagaccatgaaacataataacataataattggttagtggcacacactaaccaatagtttactcttttttcaccccgttattaaacttaaaaacaaatggattgaattttctctttttgtaaaaaaattcgattaagtcactttgtacttgtacatttagactattgatcttttttcttatgggtcagtggcactcaatagaggaaaagtggttttctgagacatagggtgataaaatctgaagtactttctcattagcattaagttctgatacccattctgagatataaagacataaagatagtgcctctgaatgctggtcacacattagaattatctggaagaattttaaaaaatactggtgcctggatctcactccaggccagtgagaatctctgggagtgggcctctggcattaatgtatttttggaagctgtccaggtaattatgatgggcagccgagaaacatgactataacctctcaggttctgatttcataagtttaattatttatggatactctttctgtttctagaagcttctactgggtgccacttctcagtgtcttctcacttcctaccagtgctgaggcctcaaggtgacagctgcaaggacaagtgagatacggggcagggaaagaacaaagtggttgcagttttctagtgtcagtggccctgagctacgcatttgggatactcttaatgaactcttctttattaaatgagcaagcaggagcccatggaactatttaacacatacttatatgcctaaccttgcagaaaactgtaacactaatgacatcactctggcaactcaaaaggtcactctaagcacagaaatttagggttgcttcttatgtttgagactttatctttgtaggtggcagattatatattctccttaggaactgagttgttttggcttcagggcctttggggaagaagccaaatatatggtgataattttagacttagggatttaattaaggaaatattggtgcatcttattacaagcagttttaaatgtcattgggatcttttccctccaaatcaactacatactttactttgttttagttcattcatttgccaaacatttattaagtgcctcttacattccaggcactgtcctaggtactgtggggaccaaaacattcagacctgcttctaaggagtgcagtccatggaagagtcagaataacaaatcaacatttgtactacaccagaccagctctcttctaaggttgctatgacttcccagcaggtatatataatagttgtctctccacatttacttaagctctcagcttgctgaatttgatactgttgctcatttccttctactataaagagaaatgttgtaaatgctttgcaaccttgacttagaggacaatgacctcttagctttccttcttcttatctagctgctccttccatttcttttgtggattcttatttctctaactaccccttaaatgtcagtataattttgggaactggcaagtactactgaatagtctcttgatgcttcataacaagaatgaaaaatacttttctctcccaatttgatgcctagaagattgaatgaatagccctgcttactgcccagttgtagaggaaaagaagagtgcattgcagaacactattgtcttttgagaagaatgaaataagagagaatacattctttggatttttattgcagacttcttttctttctttctttttaatttttatgggtgcatagtatagcatatagtatggggtacatgagttattttgatacaggcatacaatgggtaacaatcatgtcagagtaaatgcggtatccatcaccttgagcatttatcatttcatcgtgttacaaaccatccaattattactcttttagttattttaaaatgtgcaataaattattgtagactgcagtcaccctgttgtgctattaaatactagatcttattcattctatcaactatattttgtacccattaaccattctcattttctccctccattcctgactttccttcccagcctctggtaaccatccttctactttctatctccatgagttcaattgttttaacttttagcttccacaaatgagtgagaccatgtgaactttgtctttctgtgcctggcttatttcatgtaatataatgacctcaagttctatctatgttggaataaatgacaggatctatttttttatggctgaatagtacttcattgtgtatatgtaccacattttctttatctattcatctgttgatggacacttaagttgcttccaaatcttggctattgtgaatagtgctgcaacaaacgtggtagtacaggtatgtctttgacatactgaattgcattcttttgggtttatctagcagtgggattgctggattatatggtagttctatttatatttttttgaggaaactccaaactgttttccataacggttgtactaatttacattcccaccaacagtgtacaagagttcccttttctccacatcctcactagcatttgttattccctgtcttttggataaaagtcattttaacttggggtgagacgatatctcattgtagttttaatttgcatttctttgatgaccaatgatgttgagcaccttttcatatacttgtttgccatttgtatgtctattgagaaatgtctattcagaactgttgcccattctttaatcagattattagatttttttcctatagatttgtttgagctccttacatattctggttactaatcccttgtcagatggatagattgcagatattttctcccattttgtgggttgtctcttcactttgttgattcttttctttgctatgcagaagctttttaacttgatgtgatcccattggtggatttttgctctgttttcctgtgtttttggggtactgctcaagaaatctttgcctagaccaatgtcctggagagcttccttaatgttttcttacagtggtttcatggtttgagatcttagatttaagtttttaatccattttgatttgttttttgcacatggcaagagacagagtctggtttcattcttcagcatatagatatttagttttcccagcaccatttattgaaaagactatctttttccccaatatatgttcttgctacctttgttgaaaatgagtttaatgtagatgtgtagatttgtttctgggttctctattttgtttctttggtgtatttgtctctttttcttccagtgccatgctgttttggttattatagctgtgtggcataatttgatgtcagataatatgattcctccagttgtgctctttttgctcagtatggctttggctactctaggtcttttgtgtttccatataaattgtaggatcatttttctatttctgtggagaatgtcattggtattttgatagggattgcattgaatctgtagattgctttgggtagtatggacattttaacaatattgattctcccaatccgtgactatggaatatcttctcattttttgtgaactcttcaattttttgcatcattgttttatagttttcattgtagagttcttttgcctctttggttaagtttattcccagatttttttttatttgtagttattgtaagtggaattactttcttaatttctttttcagattgtttgctgttggcatatagaaatgctactatttttgtgtgttgatttttggatcctgcaactttactgaatttgcttatcaattctaataggtttttggagaagtctttaggtttttccaagtataagattatatagtcttcaaacaaggataatttgacttcttcctttccaatttggatgtcttctatttctctcccttgtctgattgctctaactagggcttccagtactatgttgaataacagtggtgaaagtaggcatccttggtgtgttccagatattagagaaaaggctttcattttttccccattcagtatgatatcagctatgggtatgtcatatatggcctttcttatgttgagatatgttccttctatgcctagtttgttgagagttttttttttttatcatcaagagatattgtattttagtaagtgctttatttttgagtcagtgaccaacatcacattgtttatttttatttctttttttttcttaattttaatttttaagttctggggtacatgtgcaggatgtgcaggtttgttacataagtaaacatgtgccatggtggtttgctgcacctatcaacccatcacctagtaattaagcccagcatgcattatctatttttcccaatgctctccctcccccaacctcactccctgacaggccctggtgtgtgtagttcccctccctgtgtctgtgtgttcccattgttcagctctcacttataagtgagaacatgcagtgcttggttttctgttcctgcattagtttgctcaggataatggcatccagctccatccatgtccctgcaaggaacatgatcttgttactttttatggctgcatagtattccatggtgtatatgtaccacattttctttatccagtctatcattgatgggcatttgggttgattccatgtctttgctgttgtgaatagtgctgcaatgagcctaccaaccaaaacaagcaaacaaacaaacaaacaaacaaataaacacaaaaacaaaccaaggaccagatggatttacagctgaattctcttaataactcttaataaactaggtattgaaggaacatacctcaaaataataaaagccacttatgacaaacccacagccaacatcatactaaatgggcaaaagctggaagccttccccttgaaaaccagcacaagacaaggatgccctctctcaccactcctattcaacatagtatggaagttctggccggggcaatcaggcaagagaaagaaataaaccgtattcaaacagaaagagaggaagtcaaattgtctttgtttgcacatgacatgatcctatatctagaaaaccccatcgtctcagcccaaaagcttcttaaactgataagcaacttcagcaagatctcaagatacaaaatcaatgtgcaaaagtcacaagcatttctgtacaccaacaacaggcaagcagagagccaaatcataaatgaactcccattcacacttgctacaaagtgaataaaatacctaggaatacagctaagaagggaagtgaaggacctcttcgaggagaactacaaaccactgctcaaggaaatcacagaggacacaaacaaatgcaaaaatattcatgctcatggataggaagaatcaatatcatgaaaatggccatactgcccaaagtaatttatagattcaatgctattcccattaaactaccattgacattcttcacagaattaaatgctttttcaacatcagtcgaaatgatcatatggtttttgtccttcattctgtttatacgatgtatcacattgattgatttgcgtatgttgaaccatccatgcatctctgggataaatctcacttggtcatgatgaattatctttttaatgtgttgttgagtttgatttgctgtttgttgaggatttttgcatcaatattcatcagggatattggcctgtagttttctttttttgatgtctttggtttttgtgtctgggtaataatggtctcatagacagagtttggaagtgttccctactgctctatttttttgaatagtttgagtagcattggtattagttgttctttaagtgtttggtagaattcagcagtgaagccattaggtcctgggcttttctttgcaggaagctttttattatggctttgatctcattacttattattggtctattcaggttttgagttcctttctggttcaattttagtggattgtatgcatctaggaatttatctgtttcttctaagttttccaatttattgccatatagttgctcgtagtagtctctaatgatcctttgaatttctgcagtatcaggtgtaatgcctccttttttttatctgattttatttatttgagtcttctcttgttttcttagtctggctaatggtttttcaactttatcttttcaaaaaaccaactttttgtttcattgatcttttgtattgttttccttcatttcaatttctttatttctgctctctgttatgtcttttcttttattaagaatgggtttggtttgcttctgcttttttagttctttgagatgcatcattaggttgtttatttgaagtttttctacttttttgatgtaggtgtttactgctataaactttcctcttactactgctttcactgtatcccataggttttgctatgttgtatttccatttttatttcaataaaattttaatttccttcttaatttattcattgacccattggtcattcaggagcatattgtttaatttccatacatttgtatagtttccgaaattcctcttgttattgatttctagttttattccattgtggtcagaaaagatatttgatattatttcaatttttttgaatatttaaagacttatttgtggcataacttatggtttatccttgagaatgatgcatgtgccgaggagaagaatgtgtattctgctgccattggatgaaatgttctgtaaatatctattaggtcaatttatgtgatagtgcagattaaatccaatgattcttcgctgatttctgtctggataatctgtccaatactgaaagtggggtgttgaagctattattgtcttgggatttatctcttgctttagctctaatatttgctttttatatctaggggctccagtgttgggtgcatatatttataattattatatcctcttgatgaattaacccctttatcattacataatgaccttctttgtctctttttatacattttcttctttttccaagtttctgtaagctggtttatttttcattttcatttacattataatataagatagtatcttccttgcttgacttcacaagcataaaggtggtaatattagtggcaggaacacccatggtgacatttccagagcgctgtccagctgttcatcatcagcaaactgtgtttcatacaccaggacagtgatacacataactcaagtacaaatattaaatttaatttcaactttatttcagtctgagattagtgcattaaaagaatctgtaataaagcttgatatagagtcttgtcacacacataatctatttttatttagtatattatattttatattgtttaatccacacagagtttttatgtgtatgagttttctattgcaacttacaacaaatcactgcaatcttaggctacagttctggaagtcagaggtccaaaatctgcctccctaactgggctaaggtcaaggtgctggcaggagcgggactgaggttcctgttcccagcccctaagaggccaccacattccttggccccctactccaaggccagcaaagccagataccagaagaagcctgaggagggccctcaggctctaatgttttctgcttcttttggtatctgtgtggctcagccaggaaaagctcttaaactgcaaggactcatgtggttaccctgggccagcccagataatcctggataatctcctatgtgtggtcatatacccatagcttctggagtcgtgatgtaagcacttggggaccattttcttgcttacctcaccatgtttccagggtctttgacattctcaataataaaaagtttaaaagtgataattacaaaaatataaaaactcaaaggatgccccctgccccagttgcgtcacctgtcagcccacagccagtgccattccactcatacctgtctgctttccaggtattgtttagcaaatcccagacattgcgtagactttttcagtacatttctctggaagggcccttaaaaaaaacaaacaaaacaaaccataatgccattatcttacctaaaaatttaataggatttttttaacatcaaatatgtaatcagttcaggtttccctgattgtcacagaaatctttaattcagagtcccctccatcccccacagtgacttgtcatttttgcaactgttttttacaccctaggcactgtggattccagcatctcccacaatagccaggcatgacttgccataaaggagtatgatggatgcaagcagatgtggcctcatttgtccccttggccttgtccttaccacactccaactatactgcctatggccagggggctcttcacagagctgtggtgattacttaagaccctccccacctgtgagttccagccctcctttccagcaagacagagggttttgggtacatcatgtcattctttgcttcagacctggaaacagccacttctccatgaaggctgagtcgtcttagtgctcactgcttctgagctggttataatcgtcattttttgattcttgattctatcatcctatgcactggctatacctgtggaatggtattacttcattccagacttggatggatctgccttgcaggtctaacagtcccacagtgacaacgacagggaccagcagcaactcctgcaggcctccttccacttggtgtaatccttcacctgataaaacacaaccagacctgcatgtctcatggatgtaagcctttttttttagatggtgcttgttgtgaatactgtgagaggctgttcaggtactgatccaaggtgagaaagctgggggcagatagaggggacagccggtctttgaggttagggaggcaaaaacttacttcctcatgcccagcaccatgagactagctaggataggggaacacgaagctacagaatgacccagacatcaggacagagcagacgtgtgaagggccaagggaagttgccaatcttgtcatgcctgttgttggtggtgttctgcaaaggcgtagtgttcaccaggcccttagtgttcacctctgtacctggggccagtggctgctttgcaaccgtgtaatatcccttgttacatgttacatgcggcactgtccagcctgtgaagaccttggtgttgatgtccatccactcactaatgaaccctttgaagtcctggatatcccttcagatggcagctcagtgcagaaaggtctctgcttgtttgtttgtcttgttccctttatctttgttttttgaggcagagttagctattcccttccaacacactgtagactgggaggggtgatttggtgttttgtcctctgggctgttttcagactccttggctgtcatctgcatgggaagagtcacctgctggtgttcagagatgaggtagctggcttggatccctgatagccccatgccaaatagcaggctggacttctggatgacaggctccttcttaatcgtcttctgctcagaacctgcttctctttcttcttggctgtaggaacctccatttcatgccgtggtgcttcagggagtgtatcaaccttgcagtaccacaacagagactgggctggctggaagcatctgtgtctgagtccttctgctgtccattgcccacccccccagggtgaagagcagcttccgcttggtggcttgctctctcaattccttccctccatcactgtagtccagctttgaggtcttggttagagaaactttatcttatcattttttcctagcttatttctctgccatgtcatcactgagagaaaattcttgtcacgttttagaacatccacccttgggcatcattctgcttccctgacttgatattcatttatgatatcattgcttcatcatcaactgtctgcaattccatagctgaaagtgttaatgaggaatgtctattaaatctggtagaggtgtgtcccagagtagggccatatatgtttgattccatagctgaaaattagtattgatgaaggctggctattaaatctaatggaagtatgtctgagagcagggctgtgtatatttaggctccaaggattgagtgactccatggtggctcagcagcagaacatgggcactgtcgatgtagcttgtggctgtgtttactgggctgtgtggcctgagagaaagggcagcagtgacagtacaggctccaagcagcagccaagatgggaaggctgggtgggagctgagcctgcccttgggtgtgcccagtgctcagacaggtgctgtgacacccaatgcaggcactattgagagggcgtcaggctgcaggcttggcagtgacacttccccagctggagctcttagtccatcactagtttttgtcttgaaatctctttcatacaatataagaatagctacttctgctcttttttggttttcatttgcaaggaatatctttttccactcctttgtctttagcctatgtgtatatataggtgaagtgtgttccttgtaggcaacagaccatttggtctttttttttaaatccattcagccactctatgtcttttgattgaagatgttcatttatttccatccaatgttattattgatatgtaaagatgtactcctgcaattttattgcttgctttctggttgttttgcagtcttctctttcttccttcttttcttcccgtgttcatttttgtgaaggtaattttttttctagtggtatgctttaatttctcacttttaattgtctgtgtatctgtggtaggttttttgatttgaggttaccatgaggcttgcaaataacatcttataacccattattttaagctgacaacaacttaacactgatttcaaaaacaaacaaaaacaacaagcagacaaataagaggaaaactaatacaaatttgacattttaactcaattcatcccacttttaaacttttagtcatttctatttattccttattatactatgtcttgaaaagatgttgtaattattatttttgataggtttatcttttagtctttctactcaagatatgagtactttatataccacaattacaatgttctaatattctgagtttgtctgtgtacttgctgttttcagtggattttgtaccttgagatgattttttattgcttaacatccttttctttcagactgaagaactcctttagcatttcttgtaggacaggtctcgtattgatgaaatccctcagcttttctttgtctgggaaaacattttctccttcatgtttaaaagatatttttgctgggtatactattttatgaggaaagtttttttttttttttttctttcagtactttaaatatgtcatgccaccctctcctggcctgaaaggtttccactgagatgtctgctgccagacatactggaacttctttatatgttatttactttttttctcttgctgcttttaatatcctttctttattcctaacctttggaagtttgattgttaaatgctttgaggtaatcttctttgagttaaatctgtttggtgttttataaccttcctgtacttgaatattgatatctttctctaggtttgggattttctctgttattatccctttgaatacactttctactctatctgtttttctgcctcctccttaaggccaataactcttagatttgcccttttggggctattttacagatcctgtcggtgtgattcattgttttttgttcttttttcttttgtctcctctgactgtgttttaaaacagcctgttttcaagctcactaattatttattctgcttcattagttcagctgttggaagactctgatacattcttcagtatgtcagttaaatttttcaactccagaatttttgcttaatttttaaaaactatttcaatctctttgttaaatttaactggtaggattttgaattccttctctgtgttgtcttgaattccattgagcttccttaaaacagctatgctgaattttctgtctgaaaggtcacatatgtctgtcattccggtattggccacttgtgccttatttacttcatttggtgaggtcatgttttcctggatggtatcggtgcttgtggatgttcagcaatgtctgggcattgaacagttaggtatttattatagtttttgcagtctggagtagtttgtatctgtccttcttgggaaggctttccaggtattcaagaggaatgaagtgttgtgatctaaaactttggtcactgcagctgtatctgcattatgggatacctcaagcccagtaacactgtggctcttgcagacttgtagagatactaccttaattgtcttggtaagatgcagtagaagtccctggattaccaggcagagactcttctcctcttccttaacttttccctgaagaaatgaagtgtctctctttgtgccgagttgcctggagctgttggaggggtgacacaagcacctctgtggccaccaccactgggactgcactggactggatccaaagccagcacagcactatttcttacccaaggtgcacagtgaccactgcctggctactgctgatattcactcaaggacaaaagtcccttcaggcagcagatagtgaacccagctaggcctgagtttctctttttaaggcagtgatcacccctccagcccaggatgagtccagaaatgccattcaggaaccaagatatggaattggggatcccagaagcctgcttggtgccctaccctactgtggccaagttggtacccaagctgcaagacaaagtgccctttagtcttccctctcctttcctcaacagaagaagtctctctctatgggcaccacagctgggaatgtgctgggtcacacttaaagccagcatgaccctgggtctcactgaagccccgtgataagtactgcctggcaaccactgatgtttatttaaggcccaaggaccctttagtcagcaggtgataaatcctacctggactagtttcttcccttcaaggcagtaggttcccttctggcccacagtgtatctagaaatgtcatccataagcaagggcctggaatagagtccttaggactctgcctggtgccatattccactgtggttgggctggtatccaagttccaagacaaagttctctttactttccccttacctctcctcaagcagaagaaaggagtctctcctggagctgcaagctgcactgcctgggtttgggggaggggtgacacaagtactcccttagttgccccggatggtgtctccctgggttgtgcacccaccaagtccacaggctataagcccagcacagcatcaggacttgctcaggaattgcagtccttgtggcctaggctgcctttcaagtttatttaggaccttagaggactttttcccacagtgatggagctagctggaactcaggttctgaccactgagaagggtgattcttctctggctagggcttgtctaaatattctgtctgatggtgccagctgggttctgcccccatgttgttttccactgtgacagggcagctgtgaatttcaatgcaaagtcccacaatcactgtgctcttctccaagcacacagattctttttctgtgccatgcagcttctgccaggggatggaagtggcagtgtgggcaattcaagactgtttttcctacccttttcaatgcgctttccttgttatgattttaaaaccgggtactgtgactgctcacctgatttttgcttcttatgaaggtgttttcttgtgtggattgtctttccatgtagtgttcctattgcttggaagtggtggtgattgctggagggttctattaggttgtcttgcagcctgcttttcagttgctggggcaaccatgtatggactcctctgactggcaatggtgtggtggtcacttgtgacctctgtcatgtgttatgtaaaacaactgctgctcatataatcatgacgcattgacatctgtttcaggaggacagcagctcaggttaaataatgtacctgtcctttagcctgctgttgacttggttcgttaaactcagcaatgggcttttattcacagctttgggttcctaatcttcattctgtcactgagcaatggtaaactgcagacaaaacactccctattcccccagtttcaccatctgtgaaaatatgactgtggagctaatctgtattctttttaatcaattcagcattcacttctttatccaacaaatactgaacttttagctaggtggcaggcaccgagttgggtgttgggaacatattgataaacatatcagacaatgcctctgctcttatagaactttggtctagaggactagacaagcaggtcagacaagtgtggatgggtgtctttaatataagattgttaggcatgttcataaataataaaataagttttgcattgcatcacttctatggtcatcacagctatcagaaatgaccatctcaggtttagttgaaagaacttttaaattagattcaggttgcaatcccagctccattatttagtaattatatgacacaaatacattgttaatttccctgagtttcattttcctcatcaagaaaattagagtaacagcagatatcatacaggatttccatgtgacaattatttgaaataatatatatggtattctgtaggtactcagtaaatgttagttttttccatttgggggaaatagcagaattttttttcaaaatttggccatactgatacataaagcccttctgtttgatttttttccaaagaacccgaaaagccctctgaagaaatggaaaacacatttttacatggtcttaattagttcactgtttgataatttacctttagtgagctgtacaagtgaataatcacaactgatgttcagttttgattccttctatgctacacatttaaaaccagcttaattgttaaaccttcactgtgttgggcatcacgcatacacagctggtgtgaggaaacctgctcataactcatgtgttcctcctagatcagtataaatgacagatttatgttgaaaccaccctttcctccatggtgaatgtggtttaactcttgtttctatagggattcaaactgtaataagagctctttatggagaagaacttgagatgacaacaatagacatgaaaatgtgagatacttctctagacctatgtacataatgcatttgtatgcatctgacagtaacctttatgagaactctttacccaaagaggaaactaattttcaggaaactaagtaattttctcagttcacataactgttcattggtgaagataaaatttcaatccaagcctgtccaacttcaaaaccaacgttctctcattggttttgaattttttcaaaatttaattttttttcagaatttaatttttgctaggcaaatgaagtaccaaaactccatcaaagaagtaatggttaagcgatggcaacattcagcttatttcttccattaattcttcatgacacaaaatttagagagagagggaaaatgagggatgatagaagagtgtggcaggatgagaaaaagacaagaaaataaaatataatggtaagaatatgaacagatggacccaaacctaggctttgctccttattatctaagtggccttgggcaatttctaatgcttttttacatttgtcttttcttccgtaaaattagcgtgataataacagtatatacctcataaagttcttgtgaaggttgagttaacttatgtgatatactttgtgatgttacagtgcaataattttataccatatatgtgcgtatgcaacagtacatactatatgtaacgtgaatatatgtgagttaatacatatatatgttaatacctgaatatatatatgatatacatgtgagttaatgtgtgaaaaatgtctgcaacatgggaagcattaagtatatgctattaccacttaaaaatgaattacatatatattagatttgaaagataaaatcggtgtaaaggttcacacagttaaatgtattcagtagacattcatagatgtgatatttaattttttatggagaaaggcacaaagaaaagagtgagccatggaaagagcactagctatgctattaactcatctgtaactggggtcgttttgcctcgtggtctcctattccttatatgtaacatgtgggattgaaaaagatgagtctaaggttcctttcacctgaaaagttttcttatgttctactttggaaagttgaaatcgaggtctgttcctgcaacttatttgacttataatctgtctttggttaaatgtaatttatattttacattttgtttatttatttctttttttttttgaaaaattgcaagtaggtttttttattttttggctttaggtgagtcatattacatgagacaccacccagttaatactttttttagtttttttactttattattatactttaagttttagggtacatgtgcacaacgtgcaggtttgttacatatgtatacatgtgccatgttggtgtgctgcacccattaactcgtaaatgaatattcggtaatgctcatggcaaatctagtaaagtcgagggtggaaagattaagcatcaaatgggaaggcgaaatgaaagtcctccactgatccttgttaatgatttctatgggctgcatttctagagttgggcatcttgggcacaaaacttcttatggtgttaggatccaaccacgtttttgtaccttatttcttcctcaccctattccatttccccatggagccctatctctaatgcaatggataaactactactccatcccaaaggggagctaatgattaattgtggaaattttaagtgtcatggcaaattggtaagggaggtattttgtggccaagaaaatatggttcactggacctattctatccaattgtggtggttattgggtgaactataattaaatttgtccacagcctctctgaactcataatatgtgtaaaattctattcctgaaggaaaccagcatactgaactcagtgttctcagcctgaaactgagtcattcagccctttctttttgccaataggacaaagcttcctttgatttattcatgtcttttattgcttagtgcaattgtggtaagaaactctggagatagagatgactgagtttgaattccatttctgttcttttgctatcagtattacactgggtgcaagctaattaacttttctgagtcttaatactcttgtctccaaaatgagactgttaatgcaacctttaaaatttctcatgaagattaattaaaataataggcttgacattattagtagctacttatttacacagagctgtttatttatatgtatacaaatgaatatgcttttttatatatcctaatatacctaacatgccaatgttttaactttatatgggtgtatactttaaaagagaaaattctataaaacttagtgtgcagttgaataagtttttacaaactgaacacatgtgtaaaaccagcatccaagtcaagaaacagaattgtagcagaatcacagaacccctttttattcaccttccattctctacttactttccagggataaccactattgtgcttttttaatattatagattcatttcataggtttttaaattttgcaaaatttgaatcggtcaatatgtaatttttgtatcttataatattatttgtcatgttatatttgaaatattatgtttgtaatactatatttttaatattcctcactgtcattctgtatggcaattatcaattattgttattactgtataatatttcatcatgtaaatttataggatatagaatatgtgtattttaaattgtattattagaaactgccaaaaagttctcctatgcaattgtcaaatttatattataacttattgagcacaatagttatcatttactctaaatctttcaaaaaattagcattgcctaaattttcattctagttattttagtgagtgtgtgatggtatcttattgaacattttcatttctttgattaataatgatgtttattatctctttagatgcttattagatttttaaaaatatttttcatctttaattctttttcatttaaggcttttggccatatttctgcctgattcctaacatgctaaattaagagcattagcctgactgaagggatttgagacataattcagagaaatcattgaatattagcatttgtcagagatattctgggccagatgccaacattaagagtggatactttttggttttcttggatagttttttttttttttttttttttaaggcttcaggtaaaaggccacttagaagcaaatggatccaacaacaaaagacttttacaatgcaaaagacactaagcagataaaggaaaatgtatttgaaattctaaatcctactctcactcattgaaggattatacttaaagatgtatttaaaaaaatcagttaacaggaataatgattctctttggatggctacaggtcaaagaaaaaccaggtcaggtcaaattgcttggattctatggtgaaagactcttgagaagtattaaattagatactcctttaaaaaaatctatgctttcagaattgcctggaaaatgtttaataggatgacttgggtgccaaggaagccctataaataacataaataacttagaatagtttaagagcttgcatctcctacattttgtagcatatagattcttgagttctaaattagggacacatatactcctaaaagacaacccagtttacaaagaggaagcatggatcaaaaaggcagatggacttgcttttacctctcacttctgatccttctttgctatatgacacggggtaagctagttaacctctgaatctcaatgtccttatctgtaaaaatgaaggttgtaatagctacctccaacaattgttttgctatgatgcaagaagacatattaaatgtctggaacatgataggtactaataaatgtaaattatttctcccaaaagaacagatttggttattttgtccaacatctgctgtcaagacccagaagaactgcctctttgcccataggctatagcagccaatagagacagttgttttcttgggaaaatagacatcagtctgttaagaagcattcattaaaagcggtttcaaattcaacaacccttcatgctaaaaaatctcaataaattagatattgatgggacgtatttcaaaataataagagctatctacgacaaacccacagccaatatcatactgaatggacaaaaactggaagcattccctttgaaaactggcacaagacagggatgccctctctcaccactcctattcgacatagtgttggaagttctggccagggcaattaggcaggagaaggaaataaagggtattcaattaggaaaagaggaagtcaaattatccctgtttgcagacgacatgattgtatatctagaaaaccccattgtctcagccccaaatctccttaagctgataagcaacttcagcaaagtctcaggatacaaaatcaatgtacaaaaatcacaagcgttcttatacaccaacaacagacaaacagagagccaaatcatgagtgaactcccattcacaattgcttcaaagagaataaaatacctaggaatccaccttacaagggatgtgaaggacctcttcaaggagaactacaaaccactgctcaaggaaataaaagaggatacaaacaaatggaagaacattccatgctcctgggtaggaagaatcaatatcgtgaaaatggccatactgcccaaggtaatttacagattcaatgccatccccatcaagctaccaatgactttcttcacagaattggaaaaaactactttaaagttcatatggaaccaaaaaagagcccgcattgccaagtcaatcctaagccaaaagaacaaagctggaggcatcatgctacctgacttcaaactataccacaaggctacagtaaccaaaacagcatggtactggtaccaaaacagagatatagatcagtggaacagaacagagccctcagaaataacgccgtatatctacaactatctgatctttgacaaacctgagaaaaacaagcaatggggaaaggattccctatttaataaatggtgctgggaaaactggctagccatatgtagaaaactgaaactggatcccttccttacaccttatacaaaaatcaattcaagatggattaaagacttaaatgttagacctaaaaccataaaaaccctagaagaaaacctaggcattaccattcaggacataggcatgggcaaggacttcctgtctaaaacaccaaaagcaatggcaacaaaagccaaaattgacaaatgggatctaattaaactaaagagcttctgcacagcaaaagaaactaccatcagagtgaacaggcaaactacaaaatgggagaaaattttcgcaacctactcatctgacaaagggctaatatccagaatctacaatgaactcaaacaaatttacaagaaaaaaacaaacaaccccatcaaaaagtgggcaaaggacatgaacagacacttctcaaaagaagacatttatgcagccaaaaaacacatgaaaaaatgctcatcatcactggccatcagagaaatgcaaatcaaaaccacaatgagataccatctcacgccagttagaatggcaatcattaaaaagtctggaaacaacaggtgctggagaggatgtggaaaaataggaacacttttacactgttggtgggactgtacactagttcaaccattgtggaagtcagtgtggcgattcctcagggatctagaactagaaataccatttgacccagccatcccattactgggtatatacccaaaggactataaatcatgctgctataaagacacatgcacacgtatgtttattgtggcattattcacaatagcaaagacttggaaccaacccaaatgtccaacaatgatagactggattaagaaaatgtggcacatatacaccatggaatactatgcagccataaaaaatgatgagttcacgtcctttgtagggacatggatgaaattggaaatcatcattctcagtaaactatcgcaagaacaaaaaaccaaacaccgcatattctcactcataggtgggaattgaacaatgagatcacatggacacaggaaggggaatatcacactctggggactgtggtggggtggggggaggggggagggatagcactgggagatatacctaatgctagatgacgagttagtgggtgcagcgcaccagcatggcacatgtatacatatgtaactaacctgcactatgtgcacatgtaccctaaaacttaaagtataataaaaaaagaaaaaaaaaagcggtttcatgttagaaagtgtcaggtgcataggctccatgaaagaaatgatttaggccagaaaactagaggtggtccatcactcccccctgttcctcacccctcatcccagatcccagcagtcaccaaacctttgcttactatatacatatatgtatatatatgtgtatatatatattattattattttttaaatttttagacagagtcttgctccaaggctggagtgcagtggcacaatcttggcttactgcaacctctgtctccttggctcaagcaattctcctgcctcagcctcccgagtagctgggattacaggcgtgtgccaccacgcttggctgatttttgtatttttagtagagacggggtttcaccatgttggccaggctggtctcaaacccctgacctcaggtaatccacccacctcagcctcccaaagtgctgggattacaggcgtgagccaccgtgcccgtcatatattcttaattcatttggtcccctttgctgtaaacaaaacaaaacaaaaatatcttcttaatatctctagagaagcactgtccagtagaagtagaatgtgtcacatatataattttaaattttctagtattacattaaaataataaaagaaataggaaaaattaattctaataatatattttatttaacctaatatgcccaaaatattacaatttcatcatgtaataaaaataaaaagaattaatggtataatttacattactttcacaaaggctttgaaattcagtgcatattttatacttatagcactttgcagtgcagaccaaccacatttggagtgctcagtagtcacctgtggctagtggctactgttttgcactgttttagaatctgctgtctgtcagtatataaattttagcaataataaaatgtcaaaaataatcactatttttatttattgagcacttggtatgtaataggtcttatgttttacatgtattacattgataaccctatcagatatgtgttattactatcctattttatgaatgaggatgctgaggcttagggaggttaagtaatttgcccaaggtcatgcaaattttcaagtagtagatacgggattcaaacccaagttagtttgactccaatacctatcatgctgcttttcctgaaataatcaaattgcctcctaactggttggcttgccttacagcagggtattttgatatggctgtgtcatagtagccacttgaaattgtaataccattattttattatttctaccaagtcatttatgtcatggacatccctgggcttcagccatctttgagcctaaacctatctgtcatcatattcatgaggaactttcaatccctccttgcatccctgagtctcaactgggaggcatggtgttggggtgaagtgcagaaatgcaatagacattcaggatggattaagatcgttggagaaaatgccagcattgttcctataaggaataaagattccttagggagaagactgattccagatgtgggacaggaaataaggaagatgaattacactagatagcagggcatctatcaaagactatcagactatcaggattgcttcaaaggagttcagggaccaacttgaagatggaacaaagaaagggcaatctaagtatcaatcaggacaacagctgaaatgaatagaaatacagcaaatgtgtttaacccataatttcatagtgctttttttttttttttttttaaaaaaaacaactaattggtcaccattagaagatgctagggaatcaacttattatattgaaacctggtaagtataggaaaagaatccatcatttatcctatatttcttttattaactaaagcactgggaaaccaaatagtaggtgaattaaagtttttctttgtagaagtatttaacttagttaatgaggatggtatagtagaattaaactatcatcattttgcaactcataatgggttaatgtactgagaccttgatcatgaatgatttttattatcaaaaagagaacaactacaatatcaattatgatttagtcttacaaaaaacctgaacctgaatataatcaatcccttagatcctatgaacaatttatagaaagtaaagaggacagaggaacatgttataaaatattgtgggaatcggtcagcaaaattgatactgagaaactctacactacaaagtggagccttagagaaataaattgcaaagataaaatggagaaagaatctataaattaaatgtaacttaaaggacatattgactatgacgtttgaactttttcaaattctaatttacaacctgtaaagaaaaacagtcatgttctcccttgttcttgttgatttttacctatgccagtacaattcttctagtttacgtgtatccatcaatggcttcccatcatctctaagtaaacccaaaaaagatttttgcagtgccttacttcaaggaggggatcataaatacaaactttagagatggtcttctggaagaggtggatattgaaagccaaagaaaatgaataacagtgggaagaatttctgggaaaggccatcaaatggactcactgatgtgagcattttgtgtgaaggctgggtgggaggctggggcctcctcaagtagaaggtccatgttgtgcagctggagaataacccactgtgaaaaatccagacttgggtctgggaggagttggtccttggtacagtgggattcatcactgcacattccttttgccccttaagtatcaatacgagatggtgctttcttcatcctttcccctcacatttcacacattttcttgtattccatgccatggaatttccatattctgaaaggtcaggctgcagtatggactccaagttatgcaaaactttatgctgtgccattcataaccaatcacagcataacatgtcttgacactccagctgaaatggatgattaaatgactaaattatcacatcgctcttgtgcaggtggtggtaaggaaacgcccagtggccaggtgccaggagtcgggttggagggtgttggtgctacagggagggagagcctaactggctagtcctgagccagtggacaaatccaggccaaacagtaacgtgcaggtacaaactgtaacatcaaatattatatgcaaattcaaagactggccttggtgtgttcctcagggtgaaagatggttcaggaccatagagaatggtacactggcttctcctaccttcaagatttgagacatgctttactgtatgatgcagggagtgagcctggaacaggtgtgtgtgtgtgtgtgtgtgtgtgtgtgtgtgtgtgtgtgtgtgtgtcttaaagggtagaaatcaggcataatatatttgacattagactcacatgactgactctcagctttcctccttattgaccatgtggctttgagttggctattaagcccgtcttagcctgtttttttatttttaaaatagaattattattggtacatagtaggaattcgactgagtagctctttttaatggatttatcttaaagcttcagttgtatcaaggtcaaaagatgactcaatttctttgtttctgaactttttcaccttcttgaaactgatacatagggtcaaaataaaactcctctcaaattccctttggcatattgctttcaaaacacgttaaatgaatgaaaagaaacactgcaagcaaattgtagaggtaaaaaaatagtcattgtgtttttcaagaaaaattccatgggaacaaaaggaaatgcagctgcagtagccagggacagctaccacttgagagcatttgtctagagctgtccacgatgaatcatggagctggggaaataatttcagatgatgtgacacatccctagatctgtattttactcatcactgggtaaacagggttattaagggaaactagatgacaaatcaacctaagctcatgccatgactatttatactttatggaatttactaaaaataattactataagcacctatttactgttaggtgacatatgaagccctttgtcatctgagacccctaagtcccttagaagtcatttttctcccctgcatttttttgatcaatttctttgaaatattgtaaatgaagagttatccagctattggttaaacacctttagtggaggggaacccactttctctgatgacaaaccctcttattgttagacatttcttttatgaaaagtgtttctagaatttgagctagaatttgtttcccaagagttccactaatgttcctggttcaacactctggattgctttccagatattttagtacatcttgccatgtaatgtcttgccaacatttctgacttttttgtttttgagacggagtcttgcactgtcacccgggctggagtgcagtggcgtgatctcagctcactgcaacctctgcctcccaggttcaaggaattctcctgcctcagcctctgagtagcttggattacaggcgcccgtcatcacacccagctaattttttgtatttttagtagagatgggatttcacaatgttggccaggctggtcttgaactcctgaccttgtgatctgcctgccttgacctgccaaagtgctgggattacaggcgtgagccaccgtgcctggccaacatttctttactgtaagttgcatataactacaattattcttcacatggcataatctcagtttgtcttcatattctggtcaccttgtcaggctatgctccattggttaatatctctcttaaagtattatgggcattacaatattaacatttattatttcatgttgctttgtatattttaattaatgtagttgccggaaacccccataagataggtatttttattattcctattttactgatgaaggttgcatagcttcataacttgctcaaaaccggcaagtagaggagccagggtttgaactccagcagcctacattaggagtctacacttttaaacactgtacgattctgtttttctgattatacaacttctggtgtcatctaattacttctgaggatggcaaaactatcacctccttttatttatgtattctgtgatcatgtcaacattcctggctgggagggtcgtctatgatacatacaggaaattgtgagtgaagagtcagattctgaaattccccacctgccttgtgaagaccatgcagaagtaccaggctctatcttgaaaggtgatggtgtcccattaaacatttaaattattttttaaaaatttgaacttcatcacatgcttttaagcaagggagtcagccactcgatcatatttacatatttgaaatgttactgtgaaggtaatgttgaggataaattagagcagatgaaactatgagcagggaattggatggtaatggccatactccaaccaagggtaggggtgaaaagaatgaacaaatacaggcagtatttagaagatatagggtcagggcttgatgactgattagactaaagagagtgaagatgatggagggaggaattaaaaatgatttttaaactctctttggggactgtgtggatggtggcattattaaccagtatgggaaatataataaaataataaaatgagaggtgctttggagcagggattgagtggatgagtggatggagttgttggggaaggcagggagtggttgggaaaggtaaagaaaatgacaaagaagacacttggggaaagtgttgtaggcagttgacacatgctaggactcagaataaaggtccaggttgtagatacagacttcggagtgttaagaatttttaagaaaattctgcagggtgagaagggaaggggtgcttaagatggaaccctggggagaagcatcagttactggatacctctgaaaattataaatgaaagcaggatccattgacttaaaccagtctggaggcaggtaatctccctcgagatacatagagagtgctgcagtttagcttttgttcttgggagccccagaggagaaagtccctgagttgtccttgatgacttcctgtgtcaaaactcaagcaaaatgattctaattttctttattgcttgtcatttgtaaatgaatttgcatttagatagagaataacatgtttgacaagagccatattcattatatcaaaatgtttcccaaatactctagaagggtagctatttggtatgaaatggacatgttttgcatagtatatctgaggataagtgattatcgcttaagaaaaagaactcctattttaagaatctaatatttttagcgtgaaaatccaggaagtttaggtttcagtaaaaagatagttaaaattcgattttatctagaatataagtgttaggtcattcctcctcaatattttctctaaaaaaagttaatctccttttctttgtctttaaaacaatttctctgggtgttttatttactgatgcatttatttacataacatttgttatataacacatagtaggtgtcagatatcacactagatgtgaaggattaattccctgttttcagacagtatcaggaatatggtaaaccttaaaagaaatcaagtgtttaaaaaaaatgtaatttatgatttggcagtgaatattaactggtagactgtagacagtttttaatagcattcttatttttgtatgaatcatatattagttcttggtccagaaagtcaagatgctacaatatgtccttgaactttagatgcatttctggaattaggatattaatatcatgtggcataaagaaagtgaatctgtttctgatagcagatctatacctgcatttgtgtaaagatggttctgggaggcttggtaacctccagaagttgaactcttttgcaacctcacagaagagcttctagtcaaaactaaggtcaaaggaacaaggaaaatactgagatgctaggtagaaggaatgcacaacatttaaaattgcactaagtgttaaaatggtatttaaactgttggtataatttagagctattgttcttactgtctgctcattttggacatatcctaaattacaaagggggaaagaaggatagtgaagtcatttcaagtttaaatggggaacaaggaagtagaagtgtttcttggcaagcctaacgcttttgccttcattacagtccagagcgggggtgccctcagtgtgtgcttttcctggcttctgttacacagatctggccaggaatgtccacaactcttctggaatataaatgagagtagagtgctcaagtccccatgatggttcagagcccatctccatgtaacttcccacacagccactgtcttagattacctaattgcttgacttcaagtattttcttactcacctgctctagatttaatggattccccaaaaccgtgagatggaaacaaggcaatatatggaacaggaacctgggacatagaaagggctctgtagatatgtttcctatcctgtctttcttttctttctttctttcttttttcaccttgtatctttccaaggctcagtccaaagaaaggtgtagacatgaaaggtaggactgtaactggtaggtctgaatgcccctctccccattcctctgctaaaacttacttaccagcgtgatagtattaagatgtggagtctttatgaggagattaagccataaaggtggagcccatgttcgtgggcttaggacctttaaagaagaggcttcacacagcctttggcccttttcacacttctgccttctgtcatgtgaggatgctaccattaaaaatttcatcaatggagtggtctctcaccagacaccaatgctcagacctcttcatggacttcccagtctccagaattgtgagaaaatacatttttgttctttgtaaattacccagtgtgtcacattttgttatagcagcacaaatggactaagacagtaactgaagcagaaaactctgtactaaaacaactttgagttaatattttttaataagacacactgaacatttggtctgtggctgaaatgaagatgtaatggctttctgtctgtaaatgagaactggcaggatagagagctccttacctcacacagcttggcaattatatcagcaagagaaaaggaggtatcacaaacctttggaagaatatccctggtgaatttctggagtcccaaaaaagaatatggatctggagtctgagttggtgggaagagtggggaggaagaggtagtgaacatgcatatatggtaattcccaagatatgcacattctcctcattacattccagtaatgattatgttctttgtgttacggtgtctcagacccagtacaaatacatttgacagaacaaatagggtaaagcctatttgattattttggacccagattcaaaaagggggaaaagcaggtctgatattaatattattgagcatttactgctataaatacataatcttccatggaattttaaaatacttaaaatttaaaaataaaagccatgttgaatagtaagaaagcagttaactttctgcaagaaaataatgaagtggaaataaaatgttatttagtatatattaagattggggatcaagactctctaagccttgaacaaagagagcagaaagggaggacgataggcctttctacctttttcctactcctaactcagtaaagagttgccgtgactgtgtgatccgggaacagcctgccagggaccccagaatgccctcgtccatgccaggtttccccttccaaagtgtggaatatgtaggggaggtccaagaacaaaaagtaatagataacttcttttttttttgaaactgtcaacaggaaaaactcagagctttgaagtctttgaagagacagaggcaaatggggtgaataccgctagctttgagttccaaagaaaccacaagggtggttcaggttgaactaatttcctaactgggtatataagatgtgataattggggactaaattgggctgagatggaaattaattaccatcagttagacaagacatctacctacttctacatgtttcagttatttaaaacttgtgccaaacaagtcatttttaaacaattatttattgaacacctgttatatgcaaggcagtgttatctgcattaggaaatttagcagtgtatgaaacagatcattataaagttactgtattagtccacttttacactgctgataaagacatacctgagactgggtaatttacaaaagtaagagatttattggacttacagttctacgtggctgggaaagcctcacaatcatggcagaaggtgaaagacacgtctcacatggtggcagacaagacaagagagcttgtgcaggaaaacccctgtttttttaaaactgtcagatcttgtgagacttattcactgtcatgagaatagcatgggaaagacctgcccccaaaattcagttgcatccttccagcctcctcccatgacacatcggaattacaattcaagatgagatttggttggggacacagccaaaccatatcaactactaagttaaacaaaatgaaattatagacatttgaccattttctacctacataaaaggcagtgtcatatggttcaagctaacacattcaagtgggataaagagataaagataacgaattatgactgtatatatatcatgttggctggtgataatgccttggagaatattatgcaggggaagaagatacgtgggaggaggggatcgttagttaatctattagtgacctcactaataaaccaacattttgatgaggacctgaaggaggtaaaggatttagctagaggcgagtaagtaaggaatttagctatggagtgagtaggtaagaaatttagcaatgaggtaaggaggtaagggatctggtcatgaggtaaggaggtaagggatctctccatgaagtaaggaggtaagaaatttagctatgagataaagagataaggaatctgtccatgagataaataaataagggatctggccatgagatcaggggtaagggatctggtggtgaggtaagcaagtagatttcccattcaaggcaggcgaatggcaaatgtagaccctgaggtgataatgtgcttactgtatttgaagaacagcaaagaagcaaagtgagtcacatggaagtgggggaggtgcattagaaagttagtagagggctggtgccatggctcatgcctgtaattccaatgctttgggaggccaagattgggagggttgctggagcccaggaggttgaggctgcagtgagctatgattgtaccaccgtactcccgcctgggtgacagagtgagaccctgtctcaaaaaaaaaaaaaaaaaaaaaaaaaagaaagaaagaaagaaaaagaaagtcagcaggaagccagatcacaaaaggcctgtaggcaatgtccaggacttgtcttttgcctggagtgaagtggagagctgctgcagggctttgagcatctaatggacatgatcaacgtcacttttaatggagtccttctggctgacaggttgagcccttgcagtgagcaagggttggaacagagagacccattttgacattgtatttagaaagagtcaggacagagatgatgggcttgtggagcagtagggtagcgttggagatgctgaatctattttgaggactggactgacaggatttgattgtagagtgtgtgagcaaaagaagagccaaggattattctaagaatggtattgtgattttggtgttatcgggtaaaccagataattataatttaatgagtatttattttcttcaaaactaaaacataactgactagattttgtgcaattgtttttcctgagagtatctgttggacttatcctgtgctgccaggcatctctattcatttacccccaaattaatcctgataccaacaagacataaaagctaagagtcaaaaagacttgagttctgactctgccaattagccaggatgtgaggtacgtctcctggaagcctcggcttctcttaggtgaagctaatacaatagcttggagtggtgggtgtggttaaatgagatagtgcatgtaaagtgtccagcaataaatactttatgtaaatttcagtgatagtaaaatgtgtatggactctatcagagttcttggcagccctctgcaccattttcacatattttttttgattttaactgttgaagctttcttactgagaatcattttatggtagtttgcttttttatgttggtaaaaataatggtcagtttgtctcaagaatttccctaaaaatttatgacacttgtgaagtaggtaaaagtaaagtgaaaacaccgctaggtcctgtctgtttcctggccttcatacaataccgcacttggtcctcatcttctgttcactccaaacctgaggctatccctcttgatcagcattttggtgctcaacatcagggtaacctgaagctcctgtctcttgtatttcaagtcattgaaactaaatctctgccttgattgctgtcaaattcctgtagatgtaacctagatgttatcttccaatcatgtctgagaatatgggccctgtcttgttcttggcatagcctctctcagagcctggagcttggctcttgaacacctgcctggagaccaggccttataacttgggcaactagaatttagtacccgaactggctctgagagtgaaatgaggagctataaattatgcagaaacagccctataggtaactatgtagacatatgtcaagatttgcataggatagttcaatatttggctgttgttctatcatcctattggtattcctttttactgtcaaactgttctgatttggacaataaattgtataaattattgactgagttacagacatttttttctgttaagagccagttttactagagactacatttgtaagtaatacatagatctgtttttaaattatactctaatttatttatataatttgcatattctggcatccagaaggttttgattgctgtagctttatgtcacattttagtatttgctaacactagaccatcattgtaattttttctcataaaaatttgttggctattcttcagcactttttcttccagataaacgttagaaacagtttgtcacatttacaagtttaaaaattctcgtaggatcttgattggaatttctctgaatttttgaattaatttggggagaatcaacatttttacgaaatcaagtatttttatactttctaccttcttttctggaatattattaatggatttgcaattcttatcctgtgtccaccttttggggtaccttactggtaggattctttgcctctctcccgtagttgttatttttaccttatgctcgatctcacgccttgcacaaactgcaccatctttgagtgtcaacagctggatcacacccccctcttaccccaccccagcagagggttgctggtctttcccattttaccctgtcctggtgcaagaactggttatgtaggcactaaccataagacatgatagaacacactttcattaagcagtgaaagctttttatactctcagtgaacctgaaaatccatttacaccatatatactttaatgggaaaataatggccaaaacatcaaatggttccagtgaattcaaggtaaatcagagaccatacacaccatgagtgaaaagctaaattgatcaagtcaatagaagaaggcacatttagaaaactcaaagtgtcttgcacttcaagtggcaggtgaactttcagtagatggcgtaaatgtaagtgtttcttagaggagggattgggttgggtttgctgggtttgttttgctttggacattagacagctctctaatattgctatcacttcttcaccgtgcaatgttggtacattatggggtattcttcctttcagatttcactcatgtgaaactaaaggaaaaatgtgaaaattagatacactgaattgatgagtatgtcttggttttttatttgctctgtgaaatgtacatgtggctctttttattacttttattgtttatgtgggggaaataagaaataggtcagtaagatctatgaggcgaaaatgcagatctgcctgagaagtaaatgcacgttgcctctctctagaaatgggcagagctcctttagggaagtgaaatggcaaagcaggtgtcctgagagtaagacttcttgacctttcaaaatccatacctcctgcagtgcttttcattctgttttctgccagccaagaacattttgtcaggttttactttctatagtgtgtattatagaaaacaaaaatatactgaatatatatttttttctcaaaccatttctttgatttgagattatcatttagagtacatgataaatttttatttatcatgtataaatatttatcatgtatagtcttcacttgctctgatgctttaaaatacttgagggcgctgcaatttgttagatggagagtatgatggagagtgtaatgggctgggatgagtgtaatgatcttggtcttatgaagtcagtggagaaggagaggaagtagcgtcaggcagaaactcattagctaaagcagcatagggaatcaggggaaaaccgagcttagaaggagatgctgccacagcagtggggcagcagatggcccagacatcaagattttatgtccaggagcacagcaagtacctagaaaatatttgctaaaataatctttgaataaattgttctgggggaatctatcttcacttaaattcctgtctgcacatagtaggtagtgggggaagatatctttcctggaaaaaaaaaaaagactgggcaagaaccaatgtgggtatcagccaaatgcgaacactgcagcctgtggtgatggaagtgatcagatcaaagaagaaagtgtcttgacaaaagtcctttccaatagattggcccagtatggagtgtgtgtgtagataaggagtgtttcatccatggctgaagagccacaaatctacataaaaccctcagccttgggctgtagatgtcaggttggccttgaatgagacatgtgagtgaggagagagagaagctggaaaggaaccagtggtcacagccatacagctgtggcatctgacctcaaatagtcccactcacaggggttgtagatgaataaagaagatgtttggggcatcatctccttataaaatgagtttctacctttggcattcttttgagcattttacactcataattagtttttagcagtttaatttgcatttctttttgcaacaacatcttgctaacgctaaccacaagatggaacagatttatgtgggctctagagaatattggttgattttttaaatgtgaagtaatatcataaagttgaaatctatttcaagttatcctccctaggtccattcttctccctcccattcctgaagcagccccaaatcatgaatttgattcatacctttccagttcatgttctatttataacatggctttgagtgcttctggaatatacaaacattcagaccatttgtgtatattatttcaccacattctagtttcactcaacattgcatttcaagatctacctattttgatacacattgtttcatttgctttaacgttattcctttgaataaatataatacagttgcttatctgctgatgaacagttagatcagggtccttcaacctcagcactattcacattttgaaccagataattgtttgttttgggggattgttcggtgcattgtaggatatttagtaccctctctggcctctactcactggatgccagtaacatcaattatgactatcagaaaatatgtccagacatttccaaatgtcccctggagggcaacctacatattgagaactattgccttagattgtttccagtttttcattgtgacaagcaataatgcattgtttccttggtcatgctcctggtatacacatgtaagcatttccttagggcaaacatctagagacagaattgtgggtttcagggtatgtaagttgtttaattactctctaaaattatatcaacatcatgatactcttttaaaaccatttatgtttttatttgacattgcatctaaagtaacgtccacatatcaaatcaagtgaataattctatgcatatttaataaattgtgaaaagagatgtttgttatcatgtcttcctttaaaacacttaaaatctagttgggaaggcatatcagaaatatgcacgaagttaaataacaaaataggaaaataaaacagcaattcaagataattatgcaattgtcacaaggcagaattaggttaactgccaaatcacatgtatgaaaaatatttgtgggctgagcatggtggcttatgcctggaatcccagtgctttcagaagctgaagcaggaggatcacttgaggccaggatttctagatcagcctgggcaacacagtgagaccccattgccataaaaaaataaaaaaataaccaggtgtagtggtatacacctctagttttagctacttgggaggccaaggcaggaggatcgcttgagcccaggaatttgagggtatagggcgctataatggcatcactacactccagcctgggtgacagagaaaggccctatctcaaaataaaaataaaaacaaaacttgtgataagaatatggaagaggggtatatctctttttcttctgggaacataagggaaggcttcctataggaggtgggatttgaggtgggtctttttgttcaatgagacttggacaggcaaagaggagtggagatgtggagaggtagaaaaacatttggttatattctaggcatggagtcttggggaagaaagaaggtcttagattaagaaggaagaaaatcaaaggaacagaggaaagtagactctggaatatttggagtagggaagataaggtagttcatatcttacaatcaccatcttctggtagaagtaagagcaaaggcatttaattaaatgtgatgataatagagatgggtgggattgagggctcgatgaacaggaagatggtctaggatagcaatttttaaggagttattggtactagggaacagacaggtgattaataaaagcattgtcttgtacaaaaccagaaagtacagggtttcagtcttgttcctccagtgcacacatgtgtggacatgcacacacacgtggacatgcacacatgcacacgcgcgtgcacacacacacacaaattctagcagaactgatctagaagcccagcttaggcatttgctgagaacgtgaatgggattgtggaagaagaattagtgacagattgtgtaggtgacaagccaaatcatgtttactgaagtaaacacctttttaaaaatctggcctcaggctccctttggaaaaataaagaagaaaaggtagaaagtgaaagtcaacaagaaatgagaggtggttttattttataaaacagaaaatgagccaggctgtagtaagtattcttgcagacactcaccccatatcttaaagtcgggtctatactagttggccagtgacaggcatcttttttagtgggtggttgataacacgtgtgtgaggggtagttgccacaacaatgcactttgggaaagaacgagtgaactctaggagtccatgcccagtctcaaatgctgcgatgactactttttggtgcctactttgtaagaagacacagcaccattacctgattagcaaagtataatttgtgagcaatagtgtacaatttagcttggatgtgttcacactgtaatttagtgaagattcccatactacgttattcattctagacatcaaagaagagtaataaatatgcaatatttttccttgttctaaatgtagtttattattctcattgatttgttttcatgagtcacacaaagtattatactttacttgtattagttcatttatctgagtgagttaaatagctatttaaatacccttccattttcttctgtggctaacacaatgctctgggccaggagagattttattttattttatttttggacaaagtttagttgctatatatgcatgtcactctgggtaatgcaaatataaaaacttccagtgttcataatgtggattgttcttgcaatcacaccagtcttaacaggatctgcactgggcattagtactcaaaataatgagttgtgctgagtctcattctttgactcaaggaagtacacacatgcactgcttaatgacatggatattttctgagaaatgtgttgattttgtcctgtgagtaacgtagaatgtattttacacaaacttagatggtatatcctactacacacttagactatatagtgtagcctattgctcctaggctacaaatctgaagtttgttactttactgagcactgtaggcaattgcaacacaatggtaagtatttgtatatttaaacatagaaaaggtagagtaaaactacagtattataatcttatgagaccattgtcctatgtcctatatagttcatcattgaccaaaaaagaggtgcatgaatgtaatatgttgtaatggtatggtattaagaatttctgctttttgggtgacaattcatgaaaaatcagtttataactcagtgtgccaccacatttcttgttataataaatgtatttgcacaaagatcaaaatgtgcgaagttatttctttttaataatgagatgtagattttatgtttgacaaaattgtaaatggtgtggtggaaagagcagtagactacgaatcaaataatgggggtttaattctaggtccttcatttatcatctaaccttgaacatttagttatcttgagccttgtttcttacctataaaataatcctgattatggcttgcattttatagtggttttctgctttaaaatgagtttgatatatgtcactctatttaacaatgacaaaaatcctgtgaatgttaacttagttattgttagcaccattttttcagatcatgaaacagacactgaaggcttttccaaggcatgccaccagtaaatgacagaagtataacataacctatggttttctacttccaaaaagattatttgttctaccactacacagtggtgtgtttcgtttgattctctcacaagaaattgctgagtatcaaaagacatgatctaaattttgtctccatctacccactctctcccatggtcatatcctaaattgtatcatcactagtatctgcaccatctcagaaatcttgattttaaacatcctactcctggtcaacagcattcacctgaagcttatttattctaagattctctatgcaatagctttttgagcttactgaatctcccagctgtttttcattatccatcaacttctcacttcctctctttgcttttctcctcatctaaatcgatttcacagtcttttcctataatccttcccttgcagtcacccctaactcctttgcctcattttccctttattgtccttatctgactgaaccccaatctttggtgaaaatagctatcttttctgctcctgtacagcagcagccaacctttactgaagaaaatcacaaagcctgacttactggcttcatattaaagaatgactatacatttcaaatgatactcaaccatcacctacagttccctaatgagtttgatttctctctttgaaacaattaattcatatcttcacctttcttgtcaaacctcccacagttttcagtttgttaactgatagcttgccttttccaccacaaatctatacatccttccttcctagatgacctcatctagttccatgcctttaattatcatctatcgctaagtgacttccaagactcccaaatttatatctctggatttgtctcctaaactctagactcacatatacttctgcctgacactatttatgtatctactagacatccaaaaattgacacttcccaacaggactctgattactttcctgacagatactcattcctttttttttttttttcaactcagtaaatgatcatacaatctactcagtttctcaagcctaaaattttataataacttttaatttctttttctatttcatcatgctttcctaaatccagaaatgtccatgctctgttgcttctacttccaatatatctctctaactagttcatttctcttcattaccactactgccaccccagtttcaactttcaacctttctctcatctggatctcagttatagcctcattactggtattatttttttcttggctgttcccttacattctacaccctgcagcagatggagaggcattttaaaataggacattttatcagggcttcccttgttttaaatctattaatggttttccattgctcttgaaatctgaattccccataggccctgcatgttcatattttctctaacgctgttgtgttgtactccttttcttactgggatatagccacactggacatgccacgtcttctcagggcttttgcatatactgttctcatgtcctggaatgttccattccttactcttgggttggctggattcttctcacctttttgtgttcagctccatagcatgtccccaggaatgctttgtgtggccacactttctaagagctccacctgcttttcctttttcttccgattactttctgttcttggtttttggtttttttttgagacggagtctcgctctgtcgcccaggctggagtgcagtggtgcgatctcggctcactgcaagctctgcctcccgggttcaagtgattctcctgcctcagcctcccgagtagctgggactacaggcgcccgctacgacgcctggttaattttttgtatttttagtagagacggggtttcacagtgttagccaggatggtcttgatttcctgacctcgtgatccgcccgcctcggcctcccaaagtgctgcggttacaggcgtgaaccaccatgcccagcctactttctgttcttaaaattttttcttcatagtcctcacaatctgaaattactttgtgtgtttgtttgtttattgtgtatctccttcaaccaaatggtcaatgcgtgatattagggacattgtctatattttttttatagcttttcttcagtgcttggcatagctcccagcagctactaggctctcggcaagaatgcttgttgagtagtgcatgaacataaaggactcttttactgtggtataacactttctactctttatggatgggaggatttgctttagctgatcagtggcacagttgatctatattgggcacgaaaaggcaaaatgacaagccatcttggctacatttgccattcaacagttcttcccacatgaaaatctatcttttgttttgccaactctaaactaggactaataggatgtggatagactgtaaggaagtgttgactcagataaataatatctgttaagaaagatttatggggaaatgatgttgcatagaagaaatataattttatttcttctgtgctttagaaaataatattggatttctattgctcgttccatgtgatgacctgagaagaatgcacaatgctactattgctctggcaccacaggaaactgccttgaaacattgacatcatagagacgaggaatgagaatcagagcatgtcactcactatgattcatttctagcctctttgtctaagcatggagattttctttaaatgaagttaaagttcattcagactcggagttagtgcagactcggagaaactgcccacacctcaacttaagtatgtgagtaattaaagatgtgccactttgaaggtctcacaccttcccatttttatgaaattcaagggattaaagaccttatccaatttcttaatgccgaggccctagagcccagaattgcaagtggtgcatattgttattagtaaatcaagttattagataaaattttgatcagaaaatgatataagcagtaaaaaagtaaaccctaaatatcttctataatcattctttccttcaatggccaacacttacatgtattttttctatttgttacttgtctctaaggaagaaactgattataaacattttctttagagactgtatttgttattaaatctgctgtttgggacaatttcaaagcctttcctcactacacccatccttgcttatctcccttacacttcgactgcatctttgtttcttctttttcctttaatttatttccttcttgtaaaagaaaatttagctaagattgataggtacaaagagaagtgaaaccaaagaaggaagagttatgataaaaagttaccagtgaaaattgtggtatacacaaacacacacacacacacacacacacacacgaaactcttggagatacattatatatataatatatatatatcttggatatggatatatatataatatatatatcttggatatggatatatatataatatatatatcttggatatggatatatatataatatatatatcttggatatggatatatatatgtaacgaaggagatatatatctatatatatctatatatagatatatcctcttggatatatctatatatagatatatcctcttggatatatctatatatagatatatcctcttggatatatctatatatagatatatcctcttggatatatatatatatatagatatatcctcttggatatatatatatatatagatatatcctcttggatatatatatatatatagatatatcctcttggatatatatatatatatagatatatcctcttggctatatatatatatatagatatatcctcttggatatatatatatatatatatagatatatcctcttggatatatatatatatatatatcctcttggatatatatatatatatatatatcctcttggatatatatatatatagatatatcctcttggatatatatatatatagatatatcctcttggatatatatatatatatagatatatcctcttggatatatatatatatatagatatatcctcttggatatatatatatatagatatatcctcttggatatatatatatatagatatatcctcttggatatatatatatagatatatcctcttggatatatatatgtgtatatatatcctcttggatatatatatgtgtatatatatcctcttggatatatatatatatatccctcttggagatatatatatatatatcctcttggagagagatatatgtatatatatcctcttggagagagatatatgtatatatatcctcgtggagagagatatatatatcctcttggagagagatatatgtatatatatcctcttggagagatatatatatatcctcttggagatatatatatatatatatatcctcttggagatatatatatatatatatatatatcctcttggagagatatatatatatatatatatcctcttggagagatatatatatatatatatcctcttggagatatatatatatatatatcctcttggagatatatatatatatatatcctcttggagatatatatatgtctcctcttggagagatatatatgtatctgtctcttcttggagagatatatatatatctatctcctcttggagatagatatattatatatatatatccctcttggagatagatatatatatatgtatccctcttggagatagatatatatatatatccctcttggagatatatatatatatccctcttggagatatatatatatatccctcttggagatatatatatatatatatatatatatatatatatatccctcttggagatatatatatatatatatatatccctcttggagatatatatatatatatatatatatatatatatatatccctcttggagatatatatatatatatatatccctcttggagatatatatatatatatatccctcttggagatatatatatatatatatccctcttggagagatatatatatatatatccctcttggagatatatatatatatatatccctcttggagatatatatatatatatatatatatatatatatatatccctcttggagatatatatatatatatatctcctcttggagatatatatatatatatatctcctcttgtagagagagagatatatatatatatatcctcttggagagagatatatatatatcctcttggagagagagatatatatatatatatcctcttggagatatatatatctcctcttggatatatatatatatatatatatatctcctcttggatatatatatatatatatatatatacatctcctcttggagatatatatatatatatatcaatcacctcttggagatatatatatgtatatatatcacctcttgtgtgtgtatatatatatatatcccctcttggatatatatatatatatatatatatatatatgtatcccctcttggagatatatatatatatatatatatatatcccctcttggagatatatatatatatatatccccttggagatatatatatatatccccttggagatatatatatatatatccccttggagatatatatatatatccccttggatatatatatatatatatccccttggatatatatatatatatatccccttggatatatatatatatatcctcttggatatatatatatatatatcctcttgtgtgtacatatatatatcctcttgtgtgtatatatatatatcctcttgtgtatatatatatatcctcttggagatatatatatatatctagatatatatatatatcctctagatatatatatatatatatctagatatatatatatatcctcttgtgtctatatatatatcctcttgtgtctatatatccccttgtgtatatatatatcctcttggatatatatatgtatcctcttggatatatatatgtatcctcttggatatatatatgtatcctcttggatatatatatcctcttggatggatgtgtatatatatatcctcttggatggatataagatatatgtatatatatcctcttggatatatatatatatcctcttatatatatatatcctcttggatatatatacatatatatatcctcttggatatatatacatatatatatcctcttggatatatatacatatatatatatcctcttggatatatatacatatatatatcctcttggatatatatacatatatatatatcctcttggatatatatacatatatatatatcctcttggatatatatacatatatatatatcctcttggatatatatacatatatatatatatcctcttggatatatatacatatatatatatcctcttggatatatatacatatatatatatcctcttggatatatatacatatatatatatcctcttggatatatatacatatatatatatcctcttggatatatatatatatatatatatatcctcttggatatatatacatatatatatgtcctcttggatggatatatatatatatatcctcttggatatatgtatacacacacacacgtgtatatatatatgtgtgtatgtgtgtaccacaattttcactggtaatttttgattgtaactgttttttttttttggttttacttcttgaacctatcaatcttagctaaattttcttttacaagaaggaaataaacttaaggagaaagaagaaacaaagatggggcggaaatgtaagagaggtaagcaaggatgggtgtaatgaggaaaggctctgaaatatacatatatatatatttccaagaattttttttcattgtcactttagtgccacttcttcccatttttgtactttttcttggcaatttttctctttaaaatcgctcccaagagtactgctgaagtgctgtccagtgtttttaagctcaggaaagctgtgatgtgcattatggaaaaaatgcatgtgttagataagcttcattcaggcatgagttttaatgctgttaactctaagcccaatgctaagcaatccacaatagggtacatccagagaaagaaagaggaaattggctgatatgtgcctgtaggtgaggttgctctggaaagtgctaaagtagcatcagtagtgcctgataaagctatggaagggagaaatggctgaatttgggattcatgagatgatgcctgataaaaataggcataatggacaacattgttctgaggctgaaagtcagagaaatttatattcattttacccaggttcaggaaaaatttaaactcttcttgactagtgtgttattataaagaaataatgcatataattatttgtgaaaatatatatgaagtcatatttcaaacagaaacacacataaaacacacataaaacaaggttttgttttgattggttgacagaaacattgtgaccagaggctcacagaaacctaattctttatttcccataggaatagtggctaattcaactttacataacataaataatgcaaataatgagaattgactgcccatatacatacttttctctattcacacaaacacacacacacgcatacacacacacacacacacccacacccacatatatatacacacacatgtggaaaatctatatataccctttaatatgtatattttattaaaatgggatcatgcttttcacaattttataatttgctttttttctattttaacatttcattatgatcatctttccagttgaactgatttgtcacatgatttttaatggctgcgtgacatttatttcattttatgaatatagcaaattttcagcaagaaagtttgtaataatttatatcctcctcagcagtgcctgaaccctgacctcaactgagtattgtctgaaattcttcctcattccattgttgtgtttctcattctatatctggcataatttctttctgtatttctgccttgggtgacttgaaatataatattttaggcatgtggctaattttgaaaagttctgctggttttgagaacagtgtttgagtgcaactcagaaaacggttgtattgtagttgatacagccatgccaagaaattaaatttgtcaaatttccaatagccgaaagtttttttgaaaaaaagtgaaggaataataacccagagaatgtcctttgcatagcctaggaaatgtcaaaaatttgccatccacataatctcattgtctgctccaagttaatatttgaaataatttgggcaaaaccaaaaataccatagcaataacattgacattttgttttacctgcttgatacaaaagggtggctatggtcccacagaggttaaaagtatttttgttcttaaaatgacctcaaccaaaggaaagatagtaaaatacattttcctactctacattaagctttaaacaaaaattgaaacagatcacaactgttaaagggtcaaacctgaaaagacagtggtgcttcccacccccagtgtggtgtgtaattgaaaataaacataatatgaaactgtacagtaagtgtgaggaagttctcactatgatttttctcatattggctatcttgaagcctttttatattcaaaatgccaggttcattcatggggcgttttttgagtgctcctgctatgcacaggcatgtctccttgttgctgctgccccagatggaggagttgctgacactgcctgccgtggaaacggcactctcatagctgttggtcatgcttcccttcctttgctgctggtgttagcaactcctagatgcggtaggggagcctaatgtgtgcctgccagaatggggaaatggtccatctgctctgcactgagctttaatttcattgccaatgacggctgcaaggcagattgatgcccaaacatggagtgcacaatggcacttagaggctgcgggagaggaactttagtctgttcatagcccataacccagaatgagggccaaacgtgctaaacaagctgtctgtaaagctgcagggtctatgccatcccaaccagatggaactggtctagaagctgggagcactcagttcctagcccactgatgttgctacagtagtgtgaccttgagcaagtcacttcgccttcatgctttgttacagcaaagtatcatctataaacgtcagattagagaatgtgatctacctacctcccctgttgtgggggcgcatgacataacatcaaatctcaatgattcatccaagtgcaccacaaatgctgcctcctctgtggtcattcaaagggcacctctgattcctccaactgaacagagtctttccttttgaattctattggcattttaatagcatctttctttggacacataataaatagattagcaaacatttattagatgtgccaactttattctggctactattctaagtacttcagtggtagttgggggtggagtagtgagatcaggtacaaagataaataaccaagttcttgaaggtttggtttaaagataatatgaactaaaatgaaattagtatgtcaaagagatatctgtctcttgtgttcattgaagcattactacactagctaagactggaattgatctgtgtccatcagtagatgaatgaataaagaaaatgtgatatatatatatatatgtatgtgtgtgtgtgtgtatatatatatatatatatatatatatacaatggaatattattcagccatgaaaagggggcatcctgttatttgtgacaatatgaataaatgtggaggacattatgttaagtgaaatgaaccaggcacagaaagataaatactgcataatctcacttatatgtgaaatctaaaaacattgaatttatagaagcagagagtagaatggtggttatgagagtctgatgggacaagagaatggagaaatgtttgtcaaagtatacagaatttcagttagataggaggaataagttcaagagattcatcctacgacatggtgattatagttaataacaatgtattgtattcttgaaaactgctatgaaagtagattttaagtgttttcaccacaaaagaaataaatatgtgaggtaatgaatatgttaattagcttgattttgcttttccacagtgcatacatatatcaacacatcacattgtatgccataaatatatatactttttagttatcaattaaaatatattaggaattttctatattccatctaattttctcccaataactttgtgctccttcataagagaaactcttttttttgataactcccttggccattttaaagcattcaccagaatgtctcatagaaagtaatgacagcatactgaacacttaagagtcccaggcatttttgtaaatgctttacatgaattaactcattcagtcatttttccaatacgattgttattactaccttatagacaagatcagaaaatggcacagaggagttaagaactgctcaaggtcacacagtcagtgtttggcagagccagaactcaatcccaagcagcctgactccagaacatacacttgtgatcatcgtggctacctcccgtggtaaatgaggtccagaaatatttgttgaatgaatgagtgttagagtgtttaaaaagtttaaagtgctttacaaggttaagtcattactacggttactacagacataactatcactacatgactgccattgacatcctgtaacattttcagaggaaggaaatctcatcattttacttctgatgttggagctcaataacatgcagagagcaagcacctgatcagagagttgagcaaacctagtataaaatgcaagttcagcagaaagaaaggtagaaaaaaagaagtctttgctttattatcctaatgcttggggcccatagtatttcggctaattctgggtgaattctgattactagccccaacccacagtgttagttttttgcttccccaaaagactatgcattaagtttgtctcttatacagactgattattcactgactttatctttactctcaaatatatcctttttagtacttaagctagacaatatcgtgtcatctttaatttctactctccttcagttggtggctaaatcctgcccattaagtgtttttgaaagatattccctctcttctactctgactaccattaacttcagtatttttgattacaccacagtaataggtttctaactggcctctcagggtatgatctgtattttctccagtttttcctccagttttccattctctaatttacatttatgaaatgcacatctggtattatcccttgttcttaaaagtcattaatggcttccatttacctccaagatagaccataaactcactccacaatgtggtcccaacctgctccttggacaccatttcccattatacttccttattaattgtatatactataaccacaccagactgctgttcaccattccaaaaatgggtcatatgctcccatgttcccaggacaaatgccctacattcttgtcaaaaattccacctgttaaaatgtttgattttcttaaaggcgcagctcaatgtcattttctgattatcccgagctaaaattcattgctattcctaacaattctatgtttatagttctcttctgacacttatttgttttatattatgagatcagtaatataccttttatataatagattggaagctcctcgaactttagaaaataattcaactttgtagctatataacaactagcatagttgtcatatatttttagctttttaaatatgtagggctcatctccccacatatactgttggctttggcaggcagtgaccatttgcaacatgagtttgcttctgtatttggggtgttaactttaaatttgcttctaccagttaacttccttgggcaggtggccaaaaggaagttattctaatttcttctttcaatgattgccgtgagggctaagagaagtaacatctgcaaagcactggatatattaggatctcaaaaaaaggtagccattgattggttgctttatgtttgaagttggcacaacactttatgttgctgagtcttggcatgagccatccagtctcagggattgattgtctcccataataaaacatgtgtgcagtttaattctagcacactctccaaataaacatttccctcttccctattgtacctttgtgaactgccagcatgtttccatttgctctaaaataatctactcagtagtgtcttgtaactgcttttttttttttttttttttttttttttttttgagacggagtctcgcactgttgctcgggctggagtgcaatggcatgatctcggctcactgcaacctctgcctcccaggttcaagcgattctcctgcctcctaagtagctgggattacaggtgcctgctacaatgcccagctaattttttgtatttttagtacagatggggtttcactatgttggccaggctggtctcaaactcctgacgttgtgatccacctgccttggcctctcaaagtgctgagattacaggcatgagctactgtgcctggctgtaattgcttttaattttgaaggatttaaaagattattattatctatttgtctctgaactatttctttgtatacctttactctggtcttcttggaacctaaaagaaagcctcagtcttgcagagtataatgcctgaaacataacatcaatagataagtatttgttgactcaataaatggggaataagtgaatggcttccatgctcctggtaggcaaaaaaaatgcaaactatttagttatgtgagttgtctatattagtcgtgcaaaactatcctgggtttctaggcagcatatctgagaatgttttttaatatctgggggtagattaatctactcctcccttaaataacaagtcgatccattgagaagaaagtgctatggtgtactcaggcagaatttaaaagaacatgagcattacatgaagcaggaagttaatttgcctgctggagttgatgaggaagtaacacagggaattattattcatctctttaggactgccagggtgaaaagttttccctcttattacctaatgaggctctgccaactgggtaccccataagctcctactgtctgaaaagcagtgccaaatcaggacttttgttgggaaaactgactctgtgcccatgcgggtgcaaaagtctgtctgcatgctctgggcagtgtgtgctgaatgacaaggtgagtctaaaggagacaaagtgactccttctacctaggttagattagacgacggcaagggcagataaagttatctgggaaactccatgtaccaggctctggaatcagatctgttggattctgccttcagagtagaatgtctgactggcctttctattgcccttatcaatgaagactgtttaaagctgaattgactgagcagtgtttttttgttttgtttttgtttttgtttttttttgtagaaggctgtcgcagagtaaaataatatcatgaaatgacttcataattagctactttagattcatttgtgggaaaaaaagtcaaagtcaaaactttacttccttttcttttccttcccaaaacacctacatcaccatgccctattttctaattttttttttttgccaaagttattgactaataagatcatggtatcttactggcagagtaagtggattattttaattcccattggacttcttttccaagtgacttcctcagcaataaggaaagagttcccacatctgagctctaaaagtggttaatggatgtgtctttctctacaaatttagtgtcttaaaggcacacaacatacttacttaaaggaagctctcctgtagttctactgtgattttcatgtccatgcccatgggaaagagcctctgtcttcaatcttacatagttactctgggtctcataaccaaattaagagcagaagaaaatactgagtggtaaattaaatcagctttcccagaggttagaaacacttctcagctacctctgtattcatacatctattttccaatctgttcaattcagctgtcacaatttcaccccatttaccccttgctaacacttgaaatgctgcctttaattaattctccacactcagaactttgagcaatgccaagttagttaattatccaagtgtattgctttaagcatttcctagatgcgaattataaaaattcttggtgagtgccagcatcatatcttcaaagacttgagcttccttgccctccacagagctgtgctggatacgaaatgagcagatggcacagaacagtatctagattaaattttctctctcaactatgatataggtatccagaaacatcctcctttactttactgatgaagtggaaaggttgaaaggaaaggtgtaaccagcttttgaataagttggactagaattattattgtataacttctctaagatctctaggggcttatagctttgtgctaggtgttaccagttgaaatgagataagattatcatggatgccaaattttactgttgtagtagaaatttgttttacaaaacgtctctcatgagaaaagaaaggaaagcaataacatttatttattttctttttctctgcaggcattctaatatatgcattcttcataacaactgtgtgaaacatattaatatcctcattgttaacgatgaagaaactaaatctcaggaagaaaaactaagtgaagacaaaagaaggatttgaactgaggtttgtcagactctcgggaccatgctgttgaaaccactaaaccacgctgcctctgggtcacttggtaaacagcatttaaccattaagaaagtcattaataaagttccttgtgctctccttgagattacaagccattgatttgctaaactggaatctttgttttgttatggtcacaattacttgccaacaggagataaatttattgagtttcttaaatatgagcacctgtcttccttcccttagcagagaacatgtctcagtcaatatttcaacatagtggacataggtcaccaagacacaaagtctcaggatagttaagaaatagtttgtgttctaaggtatctgggggtaccaattttctcaattttcaatagcggggttctcaattttcaatagctagcttctatttgtgaacattaatccaaaattgttaaaagcataaagttcagaatatttcctgcaggcctgtaagaaaaggtacatactaaaatctaatcttgttatagagaattagtttttatacaaactctctacttaggggtgggaaaaaggattgtatctcatgttgcctaattcccattcataagccattaatgttcttttctaaactttgaatttttacagattattctgggagattctgggagtcttttctccaacactccagtggcatctgactatgtgagctgataagatctatagatctgtgagttggcagagctgtgaaaagtttctcccttcttaggacataagcaggaaatcttgatacaggaatcaataaggggaaagagaaaatgtttattagaacaaatttattatatttgggtgaacaaaacacttattttacagtagactaaactccaggatatggaatatttctcaatttctttaacttgctattgttgaatataattttggctatagtcactttgagtgatggttccaaacaaggcagaatttggcctctagaaacagagagaaatatccagagaaaatatggaacgttcactggcctcagagtaaaaagttccaaattgaagtcctatctttggtgacaattaatggaatgaagttgggttagtcatcagacttttaaaaaccttcgttgctgaatctgcagaatgggcacattagaaatgtcaatcatattgctgccatgcaaacagactcctctatttggtgctatttcaaccaagtaactttcctgcctacagcaacagaaaactggttcagggtgaacacctgtcataaggtgaactagctaactttgaggaggtttatcataaaaagatgaactggatttgaaataggaaacagagtgaaacatgaggtagaatcaggaccaagagaagtcttggtgagccgaagttaggatcatttcaatcaagtaacagtgaggttgagaaaagatttatagactcaaagacaagactaagtcagttattacattagcatagtcattgagaccataggttttggagtgaaatggatgtagattcttattagctgtgtgatcttcagcaatttacttaacatctctaaggttctggtttcttgtcagtaaaatgaagataatagtaaataaatagtaaaatggagataattttcattataagattgttgtgaggattttaattaatacatgataaacccgtagaacagtggctggcattttgctaattctacatcagtgatatggtttagctgtgtccccacccaaatctcatcttaaattcccacatgttgtgggagggacccagtgggaggtaattgagtcatgggtgcatgtctttcccatgctgttctcatggcagttagtctcatgaaatctgatggttttataaagaggagttcccctgcacaagtgctctctctttgcctggtgccatccatgtaagacgtgacttgcccctctttgccttctgcatgattgtgaggcttccccagccatgtggaactgtaagcccattaaacctctttcttttgtaaattgtgcagtctcaggtatgtcttcatcagcagcatgaaaatagactaatacagtaaattggtatcagtagaatggggtgctgtggaaaagatacctgaaaatgtggaagcaacattggaactgggtaacaggcagaggttggaacagtttggaggattcagaagaagagaggaaaatgtgggaaagtttggaacttcctagagacttgttgaatggctttgacaaaaatgctgatagtgatatgaacaataaggtccaggctgaggtggtctcagatggagatgaggaacttgttgggaactggagcaaaggtgactcttttcatgctttagcaaagagactggtggcattttgcccctgccctagagatctgtggaactttgaacttgagagagatgatttaggttatctggtggaagaagtttctaaccagcaaagcattcaagaggtgacttgggtgctgttaaaggcattcagttttttaaagggagcagagcatagaagtttggaaaatttgcagcctgacaatgtgatagaaaagaaaatctcattttctgagaagaaattcaagccggctgcagaaatttgcataagtaacaaggagccgaaagttaatccccgagacaatgaggaaaatgtctccagggcatgtctaaggtcttcacagcagccccttttgtcacaggcacagagacctaggaggaaaatatggtttagtggactgggccccagctgtgtgcagcctaggaacttggtgccctgtgtcccagctgctctagccatggctgaaacgggtcaatgtagagcacgggccatggcttcagagggtgcaagcctcaagcctttgcagctgccacttggtattgagactgccagtacacagaagtcaagaattggggtttgggaacctctacctagatttcagaagatgtatggaaacacctgggtgtccaggcagaagtttgctgcaggagtggggctttcatggagaacctctgctagggcaatgcagaagggaaatgttgggttggagccaccacacagagtccctaccggggcaccacctagtggagctgtgagaaaagggtcaccatcctccagaccccagaatggtagactcactgatagcttgcactggcacctggaaaagtcacagatactcaataccagtccatgaaagcagctgggagggaggctgtaccctgcaaagccacagaggcagagctgtccaagatcatgggaacctacctcttgcatcagcgtgacctggatgtgagacatggagtcaaaggagattattttggaactttaagatttgattgccctgctggatttcagacttgcatggggcctgtagcccctttgttttggccaatttctcccatttgggatggctgtatttacccaatgctgtacccccattgtatctaggaagtaacgaacctgcttttgattttacaggctcataggcctaagggacttgccttttttcagatgagactttggactgtagaccttttagttaatactgaaatgagttaagactttgggggactgttgggaaggcatgattggtttgaaatgtgaggacatgaaatttgggaggggccaagggtggaatgatatggtttggctgtgtctgcacccaaatttcatcttgaattcccacgtgttgtgggagggaccgagtgggaggtaattgaatcatgggggcgggtctttcccatgctgttctcaattatagtaaataagtctcacaagatctgatggttattataagggggagttctcctatacgagttctctctctttgctgccatccatgtaagatgtgacttgctcctccttgccttctgccatgattgtgaggcttccccagccacgtggaactgtaagtccaattaaacctctttcttttgtaaattgccccgtcttgggtatgtctttatcagcagcatgaaaatggactaatacaatcagtgtttgacttattacctgagaggtatcatactaagtgtttatgtgatttatgtcagtgaatctttcaacaactttatgaggattattttattaatatctccactttgtggaagaataaactgaggcacatacaggtttattaacatcttcctgtcacacaggtagtaggtggcaaagcttgcatttgaagtggggctttatggcttcagagtctgcttgttcaccattaccttccactgcttctctataattgatgagtagcagcaagaagaatgtagagcaggcaaatagaaagtagctgagccctagaagtggctgataacttgtgtaagaagagcaaaatcaggctgtggggatttatggctgccctgggttcattgcaggtcttgggaagcctggccatgcctaatcctttttttttttcggatcccacaagatcctatgtgtccttgcaggaagtttcccgtttcaggagaaggctccagtgagcctctgttccaagcatgacactgagccactgggtgtcaacccttgctctatcttgaagaaacaaggtttgtcaaagatttttgttccatggaaacagggattggtttggtttggtcaccatcatccacctaacatttagcatagcacatagtaggggttcctgaaataactttttgaaagaatgagtaaaaaactggagtaaaacaaatgtaaagcactgctttcttctaattactgatataactatttctttcaatgactaattcctcatgcactagtctacatagttatagaaaaatgaccttttgttgaaaaacagaaggaattgtacaatagttataaaataagtgtttcaaattcctattacttgaaggactgagggagcaaaaagatatttcaggttattaatctatatttatcatgtcaacaatttatcaggcagaatgcctaacaataaaagccccattatggcttcatttaacatgaaataccgtgttattaacttacaatattatgtgtatttcaccctgatcatagacatttcaaagagctcacagtctctttccatctctgcaggtagttaaaaaaagatttaacttctatcgctatagcaaaccatattctagtgaatactgaccttcttgagggtcatatgcctataccctctgaactaaaatttgctaatgatatttcacaaatctccagaaatagatgctttaattctgtccaatgttacattctcttcaaacaatgcctctctttttcttgctgaaaattcatagcaagaccagcggtcgatgaagccaaacacttcccaggcttccccttgatcctcctgcatcaaatgcttaaaatttaatgctggagcttatagcgccatgagctccagagatagaagtaaatgaaaagtcaacctttcaggctgtatttctgctcaagcttttgtgtttgtggttccccccaccatggcagctgaaacagtttgctatcagaacactctactgtcagaggaactttgtgatcaacacgacgcagagattggaaaatgtcactattagggaattacagtaaccagggctctttctgaccaggtccatttgtgcttgcagaattttgtcaacacagcaggagcctggggagtcaggccacttgtagtagcacgtgggagtatatgcttgctttttctcagggaaaattcagaagattagaaggcttagctgctctgagtatctctgagcctctgtatcctcagaggatagtgctttaaggaggaagtgtggtgggcatcatctgacatctgcaatggccatgataggttaccatcgtaatctgtttttgtgtctgtcttgataaaaactagaaatataaatttatgtgtaccatttctacagtagatttatcctagcataattcagacacttacaacttctttctaggagacagaaactttggggagaggatgtgtgacaagcaagaacattgttacatgatatggtcacagggctcctggactccttttctgcacactctgctacactgctatggaggccacactgtcttatcttaagacttttcttccctttactttcccttctaggaatcccactcattttgcccacaggccttggtattccctcaaaatagtgtttcttgtaacagccacagactcaaaaaatcattcaatttaccttaccctgaataccacacaggcctctgagacagcctggacaaggccctagtgatgtttaccaagtctccctctgtcaggtcactggattgcatatttattggccagtgtacacacagcacagtgatgaaaaatgataccccacagccatattgaagcaatattccaaggtgtgtgaggccgtcaactcaaaaccctttgagagattaccccatccccagccatatgtttggtactacaggtacgtttttctgcctttaccactttgggaatttttttgacaaggggtctccgatgactgccttgttgctgtgcagggaggagagaagtgaggctcaggtttcaactgaggtgttaattataccagtgacagacttgctttattagggcttaattgacatctttgtctcaagcttgagaaatctaaacaaagaatatttaaactttggctttagttttgcctcgaccaaaaataattattattcctataagttgtatagtgatgtattaggggtcaaatggaaataaaatttgaggcaaatccaatgtcatttagagttacttgctttgccacagccatgatccttacagcacgaaataagcctcagatcagaggggtttctctagagcaaagacataggtgtgcaggtgtagaacacgtttaaacaaagcccccacccttgttgaaagaatgtgctattccattagaggttttatgaatgtgagtatcatttgaatctttctaaatgaatgagcctgattttcctaaccattaaccgtagagtagttttaatggctctactccatgaaatacatgctgacagtgaaactgcctttataaggtgttctatgactttcaatgctatcgttctgtagtcaaatgtatttttattatagatattaacagttggttagactttctttacctgcccattatgttcataaatcagtgcatctgtaatagttaagaaagaagaacttgttaaagcttatgtttattcttccacataataatcttaggagctagataggtgcttattcattacccattaatgttggatttctccagaataaatagaagactaaatctatcctatgagccttgggtagatgcagagttgggatttatcagagaaatatttaaatagttcataagggcaagttcatcccctcagcaggcatctactaaggtctgttgttgaccagactacacactaggctgggggtctcaccaacatgaggaggataagtctgacccttgaagaacttgctttctcatagctgaaggaaggttgtggacgcctggtctgaaattgacatttggaagcctggagaggatcaatgtcctccccttttaaccccagcctacaggaaaaggattgtggggagaggaatcttcctggtagaagacagggagggatgacctgttggtggtaagacagattcagttaaggggagggaagtaaaaaatgaagcatgggatagggataaatgtgatggaggtaagagatctttgtagaaaactaataaagccagtggaaaaaagaaaaacaagagatattttcccttccttctaggaggaatggaggaaataaatattcattgggtttctgctatgagccatacagtgtgctaggtgtttcacaggtgttccatttttttcttaaaacagccctgtaagttgatgttatgtccattttataggtgggagaatgaagtgagcaaggttaaatatctactaaaattcacattccaatgcatggtaaaagtgatgttcaaacacaggtgtgttcatctccaaacacactctgtttacgtgacagatgccaagacctcaactgcaaatggacaaacatgttcatttattaattcaacaaatgttgagccctattgtctgccagacagtcgaggatatttctctctcactccttacttttgggctttcatgcgtttctcctctccttgcctctaagccttatacccttttaagctttttttaatttgtcacttgtgaagaattgatgattttgtatcccaggtctgctgttcaggaaattaaattgttttgttactttgagcctgtgagttctcttctgtaaggtgaaggatagtaagaatctttctttcataatgttgggtagtttaaatgaggtaatgtatgcaaaagagcccagtgcctgacagatggcaggtgctcaacatgtgtgttcattaaggtagtcaaccaaagattctcccaccgaagcagaaagtggtacagagaatatctccttggagaacaataactctgctgatggtgatgatggtgaataatgatacagaaaatccttaaagacagagcacaagtaggcttcctaaatatatattttgtatggcatactaagcttaacagtagctcctaagattattatgtggaagaatataagtaagctttaacacattcttctttcttatttatagtggatgcactgatttatgaacatcatgggtagataaagaaaatctaaccaactgctaatatctataataaaaaatgtttacgggggccaggcgtggtggctaatgcctgtaatcccagcactttgggaggctgaggcgggcagatcatgaggtcaggagatcgagaccatcctggctaacatggtgaaactccgtctctactcaaaaatacaaaaaaattagccaggtgtggtggcaggtgcctgtagtcccagctactcaggaggctgaggtaggggaatggtgtgaacccaggaggcagagcttacagtgagctgagatcgcaccattgcactccagcctgggcgacagagcaagactctgtctgaaaaaaaaaagaaaaaaatgtttacgaagcagaagcagcagcagaaggaaaaaaaaaatcacttgctgacatttcaaatcaaaaaaattttacataaaagtctaaatttctgcattttcttgaaaaataggaagatttgtcaagagtaggttagtgttcccacgtcagctggagctgagcagtagctgtcccatgtcagcaggatcatgctacacagtgtcagggtgagtctgtgttctggttttcctgggacagcttggtttgttcccactgacctagcataattattaatagcatccccttttcttctgatttggagaagttttatatattcccttcatctcttttatgctttaggcctacttgcaccacctctcacctttatgttacctgcctgccccagtaagcgttagagattgtgacctctttttatgggcatctttttcctgtagactatgtttcaatagcacactgttttccaaaggatttggaggtcagagagatttagcttctctaccttcagaaactatattcaacaatcactcttgaattcaaggaaaggacaatatcctgttaagttctatctgccctatggagagcctataccaagcatggtaatttgctggaaaatttggtcagactcagtatgttgaactagataattcatttgcctttgaggagtcctttcatctctgcaataaaaaaatctggagttgtccccagaggtaaattctttgaaacactcaaacagcaggaataagaagatatgatttccatggctatatgataatggcctgttacttttgtataactcttttcctttgacatagaagtctctccttcaacttatcacttgaggcgggcaggtaagtgtttttgttctagttttatagatgcggaagctgactgagaggttaagtgacagagcctaaagtcacacagcctgtgggttatggaagtggggttggcccacttctgaatcctctctttatgctctttctacctcctgctgatatacatgtttttttttttttctgttatttagggacatttttctaagctagaggcccctagcctttcatcttatgacttttttccttactacatatcaattgaccactggaaattatatatttttataaaaatatatgcccttgtcctgcacagcattattttctacatgttgggaaacagactgattcagtaggtattcattgcaggcacatcatggactagacgtagtctctgacttcattagacttacagtttggtgagcacggagaacagacatcggtatgttattacaaactatagatgctggtaaagacaaagtttccgccctcaggggtttatgtttcagtgaaggaaaagtactgtgagggcctaatgggctgggaggcaggtgagtggggagaattagggtgtaggaaggaatctactatggagagtcaagagaaggctcttctcaggaagtgaaatttgtcctggggtcaaaaatggggctttaagttgggtaggagggttccaggcagaggaaagaagatattcaaaggacctgggacagaaggaagtttggcttatgggaacaacttagagaataccagtggtttcatgcttgaataatgaggaagagttgtacaacctgaagctgccaggtcatgtagactttggagccatgctgaggatctttggtagtattctgaaaacagtgtggagttagtaatagttttaagcaagggagtcacatgaccagatttgaattgtaaaaacatccatcttgctgctagagtagaatagattgttggagggagggcccaatagatgagcacaggttagaaggctggagatgccggtggctgggactaagggtgggaatgaagttgaagagcagacttggtgtggggttaaagatggggagtgagaatgagagtgagaaggtgttaggattactgctatgtttctgtcttgggtggtggtggtgtcactcattgagataaggagtagtggagggggaggagttctggaggaaaggaaattagtactaaaggttaataaaagtggttaatcaatcagcaaatacactgactttctcttgacaacagaaacaccaataccttctgatctcttgggtcgggggaggatattgacaatttttagctattcagtcaataaacacttactgatacctagttgagtatttgctaaataccagtgttgttagcaaatgccgatatctcacagccctcttcaaagtgaatatcttgggttacgttggaaaaagtgataacattgaggatccacttagaaaagttctaatcaaatcctgagtaatcctcatctctgagttgtttttcctgatattaccctcaacttacattttatgtgtagctctcttaagccactataccaaagccattatagtctttttttcatactaaagtatacattctttgtttccagcactactttggaagcttctggaggacagggaccatgttgtattcacctttgtttcctcagtgtcaagcacaggtctagcacttggaaattatttagcaaatggttgttggttgagtgtttgatattatagacaagttttaaatttgatattcctcagtctcattttttattctactaacaatgtgctgtaatgtaaatgtaggaacatttcctagaacgtaataaggacgaagtttgagacctaaactgaaatcccttaggctgtggtttgttaaaaagtaaaaaacaaacaaacaaacaaccctgtttttattcttgcattctgaaaggcatacctagcaccattagtggtttatcttgggggaagagatggaactaaaattttccataatgcaatttttttttttttaaacagaatctcactctgtcacccaggctggagggcagtggcacatctcggctcactgcaacctccgcctcctgggttccagtgattctcttgcttcagcctcccgagcagttgggattacaggtgggcaccgccacgcctggctaatttttgtatttttagtagagatgaggtttcactacgttgggcgggctggtcttgaactcctgccctcaagtgatctgcctgcctcagcctcccaaagtgttgggattacaggcatgagccgctgtgtctggcccataatgctattgtaacaaagtttagtaacagagttcaggagggaaaaaattaggtgctagtcttacttcaacttttgctgttttttgataaaattggttagacagtctttcatccatagacttcttgtataattacctgaccagggacatttcacgcatcatatgtcattgttttggcaccagtacttaaattaatttaaaacattaaacattttttgttagctttaaacatatttcattagtatcagttctcactcagacttttcaacttattttctataactctatgtggtgggcacctgtgtatgcccattaggagcctttggggtctatgtttctaaagaggctgctttatcagccctccttctgaaagctggtgcccattctgaatgtcatccaaagccatccatcaaaccggttacagcgtgggcagaggtgaatgtgcccctggcgctgtgtcaggagtttgtatagcttgtggggcttagtcctagacattcctctttagctgcagagtgaaaaggtctggaaaggagagcacagtctgttctttggtgagacagtctgagtgggtgtgaatgcaggagtctcagtctagcaaaacaggtacagaattcagaagcaggccctttaaagatctaaagccaacattcatcatggccttggtatttaaatggttaattaacccgtttagatgggttatcttttaagtaaggttattgagtcctcataagcagcatgacatagattgttctgttttatgaaatgtaattgaaagttttcttattgccatatttgaaatactagtttcaagtaaacatgctgttctggaaaagacatttattcagcgtccaggggagtgttgggtttgcagcctagctctatcactcactagtctggaatcccagggcaatccttgtgtctcctctgagcgtcaggtatgttatgagtattaaaaaagatgtgtgaaatgtgccaaatgtgtagtagacaccaaaaaccggcagactttatttgtactcctataaacattttactggacatagttgaattatccctgatggtagacacatctgtattttgtgttcttgggattgtctctgtccctctgtgctattgtcatcaagcacggtgctgactctcattacatagaaaaagtgagtctcttcttccaaccccttttccattaatccttactcttctcttgcacttctgactgattctgctctgtcttttgagatgtaacaataaccatgaaacaatttatcaaggagttacatgtaccagtactaagcctggtatgcatatcatcacacttaaaatgtatacaatgctcagaaatagagcttacctccactttagatatgtattgatttagatatgtaaagattggaaactgagcttagaaaaagtcatggcacagtgagttgtgaaggagctggaacttgaactcggttgttttaaacacaccctccaaaactgggctctcaaccccttagccaggactcttcagagtgtgcgttggctcgcatactaaggagtgaactggatattatgcagataatctgctctatttataggtagaaagcaactccgatttgcaggctttgggtttttgttgttactagtttttatttttggtgcctttcttggcaccctggagtgaagtcatactgttttgagaactgtgatccaggccatctcctgtgtccctctgtcctgccttagttctgaccagctggtgggtggcagactggatgctgcccaggggcagactgctcagcttctctggtgtggcatccctgtcactctctggctatcttacttcataaggagtgcttttcaaccttacttgggtttgtttacagacagacactaaagcttgtagcagaaggcaacatgctggggcatcctgtttaattcagggcaggagagctgctaagaaggtaaatctgactccctagtcttattcactactctgctacagagataaatcatgatgaggatattgatctgataatgggctaattgtggcagagatttatgaaggtgaaaagatcttagctggcatacaagaataaggattttcagaaaacttgaatatgaacgttagtgagagtttgtgggaatctttggaagtcattaaaaatgagacaaaagtggttcttggtaggccttttaatagatatactgtaatcaattgattgaagacaccagttaactcggttctttgacttgtaggaagaaggtgggattagaatggagaattcttctggaatctggctccaaatttggaatcagaggacttgggtctaaaacctggttttgccacttaacctgttctttgaacacaggcaagtggtttcacaccttgggtcaggaatttaaagactggacaaaataataggtaacgctagaattgtgcatgccaacattcaagcagagacaagctgtgcagctaattttttctacaagtatcactaagcacctactatgtgccaggctctctgccaggtgccagaggtatatcagtggaccagatggctgaagttcttgcacttaatggtgtttttattttagtgaagggagactgaggaagcacaaaaataaacaagatacaattgagcatccttaatctgaaagtccaacatccgaaatgctccaaaatccaaaagtttttgagtgaaggcatgatgccacaagtggaaaacttcacacataggtactaacataagctttgtttcatgcacaaaattagtaaaaaatattgtctaaaattaccttcagcctatgtgtataaggtgcatatgaaacatacatgaattttgggcttacacttgggcaccctcccaagttatctcattatgtatatgcaaatgcttcaaaacctgaaaaaatctgaaatttgaaacacagggctactcaacctgtagatgttgctcagctacagaattttgatccttcttttctctcatatcccacatccaactggtcagaaaatcctattattggctctgcttttaaaatacacctagaattcaatcacttttcacctcctccactgctacaacacctcaatccagctaccattatttcttacttgcattactacaatgttcttctgagtttttttgcttttattgtgaatttttcatagtttagagtttagattcaatacagaaaccagatgatcacttaaaaatttaagggctgggtgcggtggctcatgcctgtaatcccagcactttggggggccgaggcgggtggatcacgaggtcaggagatcaagaccatcctagctaacatggcgaaaccccatccctcctaaaaatacaaaagtcaactgggcatggtggcatgcacctgtagtcccagctactagggaggctgaggcaagagaatcacttgaacctgggaggtggaggttgcagtgagccgagatcgtgccattgccctccagcctgggcgacggagcgagactctgtctcaaaaaataaataaataaataaataaaataaatttaaatcagattatatccctcctcttctcaaaactttccattggctgcctattcaatccagagtaaaagtcaaaccccttacaaaggcctatgatgtcctgtgttgtttgacttctcgtgacctctctgatctcatctgccccagctcactctactccagccacattggcttccttgctgtgcttggagtatatcagtgatgtcctgcctcaggacctttgcatcaacaattctctctgctttgattgctcttgttccaactatctgtatggccaactctcttacctctttctgaaatgtcacctgcccatcttaactgaaattgtaaactttgctgcctacctgctaaaatttctaccccatttatctactctatttttatgactttttattatggaatatttcaaagatacacaagagtagagtacaatgaaaccctaaatatttattgcgcaattttaactatcatcatctatggcctgtcttttgctgtttatcccccatcactgctcctcatcccagattattttaaagtgaatcccagagtcatgtgattacatttgtaagatagcctcgtctcattatttgtggtagttacgttccataaatccactgtgaacactgagccagcgagtactaaaccatgactcctggaggaaatacagagttaggttcctgtgagcctctggtcacattttcatcaatagatcaatacacaactttgtttcatgtatatttttgtttaaatgcactttatataatatacattattgattcattaacattgcactcagggcaacatcattataactcatgcttgaatgaaacttatttaacacatgtgttttctccattaagcacatcacagccttttcgtaccttggagcactagacagcacttcagtactatgcttgggggacattttaaacaataaaatcaccaacaaaacccacaaaaatgtgacactaaatagaccataaaaagtatactttacagtatgagagctgtacaactgttgccttgttcagcctcaggtgggaatatgtacttcaggcaacttaaattttttgcctctctgcacatgtatgtctctgaatgactgtgaaagttcttcaagtgttgattttgaggttacaaataaattgtatagcaagtaggtaaatttgtaaatatggaatctgcaaataataaaaacctactgtagattagtatctattttcaatagagattcttttaaaaaacacaatcacaatattattattttacaaaaattttaataattccttagtataatcaaatatccagtcactgttgtatctcgcaaattttttctatatttcttaaatcccttttaatctgtacattttctctcgacctctctctgtcttttttctctcttgtttttaccttgcaatccttggttgcagaaatagattgtttcccacggtctggattttgctggtggttcttctggcattgtctaataaggtcctctgtcccctgtacttcctgtatattcgtagttagatctacaggcttaatcagattcagattttaattttgagacggagtttcgctcttgttgcccaagctggagtgcagcggcacaacctaggctcactgcaaactctgccccacgggatcaagcgattctcctgccttagcctcccgagtagctgggattacaggcatgtgccaccatggcaggctcattttgtatttttattagagataaggtttcaccatgttggccaggctggtcttgaactccagacctcaggagatccacccacctcggcctcccaaagtgctgggattacaggcatgagccactgtgcccggctaggttttaattattttaattttttggcaggactgcttataggttgttttgtacttccatcagggaacacataatgtctgtctgtttctcatctagtcgtatacattgccgctgatgctcatttccttgaccagtggttctcaatcagggacaatatgtttcttcccacgggggacatttggcagtgtctgataggtagagaccagatatgctgctaactatcgtataatacacaggaaagcccctcacaacagggaattatctagcccgaaatgttggaaaatggtgacactctatcatttctgctccactggttcgctgaaatccttttatattagagaaacttctcaaagtttaatcataaacttctggtatcctgaggtacaagtcatatagaaatggtatgatttaaactatgatgctcgatattgttccaactggggccagtaggaggctattcatataggctcccacttggctctggttttcttccttttccttatttttttttctttcttttccctttgttaaaagccatcttttaataaaatatataatttaatatgttggttgtatatcgtatgtctcttccactaaagcaggaatacttgtttgttttgtttatgaagatacttaagtatataaactagtgtctggcacatagttaatgcttaaatatttgttaagtgaatgaataacagtgagcaattagagggggtactgttttagattgtgtagtcagggacagcctccctgcagatggtgcattgatataaggcctgaatgacaaggaggtgcctgtcatgtgaagatttgaggaaagagcattccaggcagggggaaggcttgatgcaaagggtctactgcaggcattagctgagcttatttaaagatcagaatgaaggccattgtggctagaacagagtggacaggaaggaatggtaccaggcaaagctgaagaagttggcaggattgagctctcataagtcatggcaaagagttcccatttcattgtttgacggaaataaattggaaggtcttaagtaggagaagatttgattagatttacattttacgaagaagcactctggatgttatgtgaagaaatggcctttgcagggcaagggtggaaacaaagagatcagttaggaaattattggagtagctgaggattggatgaggggatgtgtttgtgtgtgtgtgtgtgtgtgggggggtgttgggggacagtagtgacaaagataaaggaaagcagttcaaaatttgaaaaattaaaacatgcagataccttctgactttatacatgcaagtaccgtaaatatctagtaggttattataacaagcatctgtatcatgagcaagttatgcaatttgataatttgcagatcatagggccacctcaaagcacaaattttttagtagtatgtgattgttattagggtcattcaccaatattttgaatctctaacttcttggaacgtggtagaattgtcttcttagttttcttgtggttggttgaggccaatgagtgtggatgaaagtgatatgtgtcaaactaggctagagcacttaattgtcaatgcaagattctctagaggtctttttttccatgaagatggtgagattacggctattttgtcaatctcagtttcctgcttagtgactacaatgaagagagccttttgtcaaccagcagtgggcatgtagcctgagtgaggagtaaacttctgttgttttaatcaacttagacgatttgtttataactgcagcataatctagcccatgatgattggtatgtggcacaaaagcaaaaccttaaagacagaaaaaccaaaccatcttccaggaagtgcctgggaaagacaactattcaaagaccatttgcttcatacatacatacaattaacaagctgagatgacacaaagtgtaaaatatgcctggaaatgaaataaaattgcaatctgcccaatgtggtcattttattagtctatttattagtaaaagaacttttggcaggaatctttgacctggctgacttcgccccagcaccagactaattgaaaatctcaccacataaaatatgaaagtcaagatagcaggaacctagaaacagaatttctcaaagtgataaaggattgcaagatcatggattgtgctggagttaaaaaaaattagaaggagaagacagggatgaatgacatacttagctggatttttgtctgcttgcagttgctgaacctgattctggaaggtacaacaatttcggccatcttcctaatcaatactgtgagatgggaccaaattgattgtgtggtacatgaagcacagcccaggaaaagctgatgagacctagacaccattatatattttgcctgacttattaacttactctgtgtcaaaattgagtccgtttttgataaaaatacagtactgaggaactgtttctttcctccttctccatgtccttgtctcttcttggttaacaaacctgactagcaattgtttttcttttttctttttttgcagtgtttgtgaagattttctaacctggtatcacacgggtaacttccttttgtttgcttatcttacatttcatctggaaaattatgtgataggccagagtaacacacagacctttctcctaaagagttaagtagagctatgtatcaacttaccaacacttgattctttggttctaacgttgagaacagactaagtaagtttggagaaaaatgagataagcacaaatgatgaaataggatcacatccctgagtaactttccaggagtagaaaagttctcaatttaatagagggtgagatgccaagtttcaagtgtatatactattttttgtaggtagagtgtatccccatagaaaagctcattttgaagaagcataattgtaactctggatggaggtagtcaccctgtgtataaaaggacagcacaggtagagggagaaagtggatgagagagagtgggacccccctagacctgaggctaatggaggtgactggtaggtgcctcttgcaaagagttgtcaagaacacagattcatcccaaagctgatctcatctcttttgcttcttggacagacagcgctcacgtgattcataacttctcttagaaatagtaatctgtctgtttgtgtcacgggcagcattgcttgatgcctcctgcccaacactttttatatgaaaaataagaaactgcatttcctttctgcagtttctcccccattttggcccatcatgtttcccaaaataacctcactaattcactggaaagattttgttgatacaaatgtgtctttaatgttctctgactgctagatctaaagatgtgaatactgttagggtccatgtctgggtgaagccacccatctttattatgtctgattcctgcccactctctttaaggaaaaatcacaggaaggagactgattggaatgaaaaggcaatattaatatgcattgccattatcagagtctatcccagaggctggtgtgagtgatgatgcaacaacaattttgggtgattaatgaaaaaattcacagatagccagttccatgcataaggcctatacctgtttccaaggcactcacagtctattgcaaggaacagataaataagaatatgaaatcaatactgactgtatggtaagtgctatgcacgtattgttagcagtatgtgtggaatgtggcaagaacttttaaaagtagcatttaacctggcctggaggggattatattagttttctattcttgctgtaacaaattaccacaaacttagtagcttaaaagaacacaaatttattatcttatagttttagaggttagaattctgacacaagtctcatggggctaaaataaaggtgtgtgcagtgatgcattccttcctagaggctctaagggaaaaccattttcttttcttttctagctactagaggttgcccactttttttggctcatgactcccttcctccatcttcaaagccagcaatgttgcatctctctgacttttcttccttagtcatgtctctctctgaccatagccaagaaaagttttctccacttctaaaaactcatttaattagattgggctcacaaggataatacaagataatttccaaatctcaaggttattaacttaatcacatctgcaaatttcctcttgccaagtagggtaacatcttctcaggttctagagattaggacatagacatctttagggtgtctactactctgcctaccacggtggagaaagaggacactaataaaagccttctaaatgggagtgacaatttatttgagtcctaaaaggcgaaactaaaattattcaggtatataggggaaggggaaaaatatggggaagagaatcttgaccagatgggaactttggattagatgagagcaatatgtattgaggccagtacgtagattcaagaacattgagagctagaatagatatttccttggtatttcaaaagggtatatggctatttcctgttacttcaatacacacctaaatagcaagagttttgctgttattagcttacttattctaatttaattagcagcctgacgagggaggcaggtggtgttattaatgaagatagagtttgttgtttgtttgttttttagatctctagccagggtagtaatgaaaatgtgatcgcaacagaatggaaaaatcaatgaaagaacagctgaaactgtaatgaaagagacaatatatcttttcaataaattatgggagaaagacaaattaataaaaatagtgacaggctgtgatcttgagctacattggctcaatgtctcatattatcataagtaaacattttatgtttgctatagaaacttttctactttgaaatcttcagggcaagtgcagaagtgcaagtaagtaatatatttgaatgtctattttatttcatatattcttatcataaagagaaaaaatggagcagactctggtctgtaaaagcaattccagtgttctttagatgcagtgtatatctaaaaaatatctaaagaaatatttgaaaaaaaacctgtcaaccaaaattcaatatacagtgaaaatattcttcaggaacgaaggtaaaataaaaacactttcaagtcaagtcaaagaaaactgaaagaatttgttgccatcagacctactctaaaagaatcagtaaagaaaatcttctgacagaagataaatgataccagaaggaaactcagaacatcacaaatgagaaaagaccaacagaaatggtaaacacagtagattatttttttcctcttgaattctttaagtatggttgatggttgaaagtagaagttagggcattgtcatatgaggttttcagtatgtgcagatgtcatatataaaataattgtaagataaagggggaagataaaggaacctatttggtggtgagagttttacattctacttgaactagtaaaatattgattgtatgtagactatgaaaagttatatatgtagactgtaatctttaaaagggccactaaaatattattcactgagataattaaaaacacattaaataaattaaatttaagcattaaaaatatttaaattatccaaaaaagtcaaggaatagaaaacaaaggaatgaaaaatagagaaaacaaataaaatgggagagctaaattcataataattatattaaaagcaaatgatctaaatataccaactaaaacatagagattgttaggatagatggattaaaaaaataaaccaactacatgctatgtacaagaaactcacttcaaaggaaataatataggtaggttaaaggtaaaaggttagaaaatgatacgtcatgaaaacactaatcaaaagtaaatggacatgtttatattaatatctgacaacattccatcgaataacagcacatgaaatattcctttttaagtgcaaatgggaaattcactaagatagattatattctggggaaaaacaaactttaacaagttgaaaagctgaaataataaaagatgatctctgaccacagtagaattaaactagaaataaatctagttgaaagatatcacgtgtatagaaatgctactgatttttatatgttgactatttttatcctgagactttactaaagttgtttatcaagtctaggagtctttttgcagaatctttagggtttcctagatatagaatcatattgttagtggtgataactttttcgttttttggtggggggagggcagtgccttttattactttctcttgcctgattgctctggctaagacttctagtactatgttgaataggagtggtgagaacaaaatcaagaatgtaatctcatttacaatagccacacacacatacaaatacctgagactacatgtaaccaaagagatggaagatttctatgaggagaactataaaacattgcctaaacaaatcagagatgacacaaacaagtggagaagcattccatgcacatgggttggaagaatcaatattgttaaaatgtccatacttgccaaagcaatatacagattcaatactattcttttcaaattaccaatgtcatttttaacagactttgaaaaaagtattctaaaattcatttctcaccaaaaaagagtctgaatagccaaagcaaccctgagcaaaaatgaaaaaataaaaataaagctggaggcatcagattacccaacttcgaactatactacaaagctacagtaaccaaaacagcattgtgctggtacaaaaatagacacatagaccaatggaagagaatacagacccctgaaataaacctgcacacccacaacaaaatggtatttgacaaagttaacaaaaataaacagtggggaaaaggtacgctattcaataagtggtgctggaaaactggctaaccatatgcagaagagagaaactggacccctacctctcaccatatgcaaaaattaacgcaagatggattaaagatttatgggtaagaccttaaactataaaaatcctagaagaaaccctagaaaatactcttctagacattggcctaggcaaagaatttctgaacaagaccctaaaagcaaatgcaagaaaataaaaaatagacaaatgggacttaattaaactaaagagcttctgtacaacaaaagaaactatcaacagagaaagcaggtaacctagagaatgggacaaaatatttgcaaactctgcatctgacaaaggactgatatccagattctataaggaatttaaacaaatcaacaggaagaaaacaaccctattaaaaagtgggcaaaggacatgaacagatccttctcaaaagaagacataccagtggccgacaaacatgtgaaaaaatgctcagcatcactaatcgtcagagaaatgcaaatcaaaatcacaatgagataccttctcaaaattgtcagaatggctattactaaagagtaaaacaacaacaacaaaaacaataacaaaaacagacgttggtgaggctggagagaaaagggaatacttatacactgtcagtgggaatgcaaattagttcagcccctggggaaagcagtttggagatttctcaaagaacttaaagcagaactatcattcaatgcagcaatctcattactgggtatatacccaaaggaaaataaatagttctactaaaatgatacctgcacttgtatgtttaccatggcactattcacaatagcaaagacatagattcaacctaggcacccattaacagtggactggataaagaacagtatacatacaccatggaatactatgcaaccatgaaaagaatgaaatcatatcttttgaaacaacatggatacagctagaggccataatcctaagcaaataaacacagaaacagaaaataaagtaccacatattctcatttgtaagtgggagctaaacattgggtatacatggacacaaagatgggaacaatagacactgggagttccaaaagagggagatgaagagaggagcagaggttgaaaaactacctatcaggtactatattcactacttaggcaacaggatccttagaatccccaacttcagcataatgtaataagtaataaacctgcacatgtattccttgaatgacaataaaacaataaaaaataaaaacaggaaagatattggggaaaatctccaaacacttaggcattaaaaacactcttctaaagagcatctgcctattttatttgctgaaaactacaaaatgctgatgaaagacatgaatagatggagagacatattatgctaatgaattataagactcaatatagtaaagatgtcaattatccacaaagtgattcatagatttagtacaatttcaatcaaaattccagcaggatattttaaagatatcacaatctgattctatattttatacggaaaggcaaaggaattagaatagccagaaccattatatatgaaaatgaaaaactaagttggaggaattatattattatattactgattttaagattactataatgctatagtaagacaatgtggtagggatagacacatagatgaatgaaattgaatggagagtctagaaactgattcacccaactatagtcaactgatttttttttacaaagatacaaagacagcccaatatcgaaaggacactgttatggtttgaatgtgtcccctaaagttcatgtattgttaatttaatccccaatgcaaaggtgggaactttttttctttaagacagggtcttgctctgttgtccaggttggaatgcagtggtgcaatctcagctcataacaacctccgcccccagggctcaacccatcctcccacctcagcctgctgagtaactgggaccacaagcatgcatcaccacacccagataatttttgtattttttgtagagacgaggtttccccatgttgcccaggctggtcttgaactccagagcacaagccatctgcccatcttggtccccaaagtgctgggattacaggcatatgtcaccgtgccccgccaaaggtgggaccatttagaggtgactaatatatgagggcagaattctcatgaatagattaatgtcgttatctctggagtaggctcattatcaccagagtgagtttgttataaaaatgagttcagccctctcttgtgctttcttatcctctctcaccctcttgccttccaccatgggatgatgcagcaagaaggcctgtgccagatgccaacagtttgatattgaacttcacagcctccagagctgtgagaaataaatttcttttctttataaattacccagtcagtggtattctgttttagcaacacaaaactgatcaagtcttttcaacaaggctattggaacaattatatatgtatatatgtgtgtaaaaaaaggacctcattttaaacctcatacccccttattaaaaaattaactaaaaatatatgataggtaaaagctataacatcaaactctaaacttttagaaaaaaaatggggaaatctttgtgactaggaattaagcaagagttgtcagatatgacaccaaaaagggtaaattgtactttatcaaaatgaaaccttttgctctgcaaaagactctgttaagagaataaaaatacaagccatggactaagagaaaatatttgaaattacatatctgacaaaggacttgtaagaaggatgtgtaaaaaaattctaaaaattcaaaattttaaaatgggtaaatggcttgaacagacatttcaccaaagtagatttaaaaatggaaaattaccacataaaaaggtaatcaacaccatcagctatttgggaagtgtgagttcaagccaaaataagatagtatgacacattgattaaaatggcgaaagcggaaacacactgacaattaatacttggtgtttgaaaaaatgtggaaaacctggaactcttttgcattgctgttgggaattcaaaatggtacacccactcatccacagtgtggtagtttcttacaaagttaaacatacacttatgacatgaacccagtaattgcgctctggggttttcattccagaaaaataaaaacttatgttacataccaaatgtacacacaaatgtttatagcaaattacttacaatcaccataaactgcaactattgaaatatccttcaagggttgaatggataaaccactgtcctatagctctacaatgggatactactcagcaataaaaagtaacaaactatacaaacaacaacaagagcaaatttcaaatgcattatgctaactgaaatactggtaccaaaacagagatacagatcaatggaacagaacagagccctcagaaataacgccgcatatctacaactatctgatctttgacaaatctgagaaaaacaagcaatggggaaaggattccctatttaataaatggtgctgggaaaactggctagccatatgtggaaagctgaaactggatcccttccttacaccttatacaaaaattaattcaaggtagattaaagacttaaacgttagacctaaaaccataaaaaccccggaagaaaacctaggcattaccattcaggacataggcatgggcaaggacttcatgtctaaaacaccaaaagcaatggcaacaaaagccaaaattgacaaatgggatctaattaaactaaagagcttctgcacagcaaaagaaactaccatcagagtgaacaggcaaaatgggagaaaattttcgcaacctactcatctgacaaagggctaatatccagaatctacaatgaactcaaacaaatttacaagaaaaaaacaaacaaccccatcaaaaagtgggcaaaggatatgaacagacacttctcaaaagaagacatttatgcagccaaaagacacatgaaaaaatgctcatcatcactggccatcagagaaatgcaaatcaaaaccacaatgagataccatctcacaccagttagaatggcaatcattaaaaagtcaggaaacaacaggtgctggagaggatgtggagaaataggaacacttttacactgttggtgggactgtaaagtagttcaaccattgtggaagtcagtgtggcgattcctcagggatctagaactagaaataccatttgacccagccatcccgttactgggtatatacccaaaggactataaatcatgctgctataaagacatatgcacacgtatgtttattgcggcactattcacaatagcaaagacttggaaccaacccaaatgtccaacaatgatagactggattaagaaaatgtggcacatatacaccatggaatactatgcagccataaaaaatgatgagttcatgtcctttgtagggacatggatgaaattggaaatcatcattctcagtaaactattgcaaggacaaaaaaccaaacactgcatgttctcactcatagatgggaattgaacaatgagaacacatggacacaggaaggggaacatcacactctggggcctgttgtggggtgggtggagtggggagggatagcattgggagatatacctaatgctaaatgacgagttaatgggagcagcacaccaacatggcacatgtatacatatgtaactaaccggcacgttgtgcacatgtaccctaaaacttaaagtataatttaaaaaaaaacactgaaaaaaaagattatataccctatgactccatttatgttattctggacaagggaaaactttaggacagtggttgccgggggctaggtactgggcaaacggcagagatttgaatacagcaggagggaatttgagggaattgagagaacagtgtatcctgattgtggtgatagttacatgacacactatgtgtattaaaatgtacagaatcaaacaccaaaaaaagagtcaattttactgtatgttattttttaaagagaaaaatgtatatttggacataaagatggtagaagctgaaaaatcttgcttatgtctccagtttgcaatggtatttttgatgtgggacaggagagaacataaaaatcatgagtttattccacctgaaaattataactattcctcagccaggttttataagcaaaaaaagaaagaaaaaggaatcaaacttggagacagaatatagtgaagccaaatgcttcccactgccttctgataacagggttaatcacttctgaagtggcctagaggcccagaacagagtcacacaagctgttacctatgagttataaagccaggccattcctagtttctggggatcaaggttaaatgtggcattgccacagcctgtagggaagtatcttgaaatggaatccccaggaatgttcaaagatcattcaactcccttgggtttaaaagactgtaataagaggaaagcccaactttagtctacttggaacaatgccagcctcctgtacagggtttggtatgctgacaggagaaagggtgttgacatgcagtaattgttaaggaaaagaataaagcaactgatgaaaatgcaagaagctgggctaagctgtaaaatgttgtactctataagcagccttaatcaagagataatagatccagactgatgcagtgatgcttctgaaaaagtcacagggctgggctggaggctgcgagagatcattagcttagagacccagccctacctctagatgtccatagcttgtgttaaaccccatcttatagccacttggggtcttctggctgcttctgtgatgggatagatctcattagacttgggcttccaaatccaggactatgagtttagaatgagacagagatttgtgtctctgatgttggtatgaccatatatttgcttaggtcagtaagatgcatatacgatatagagaaaaaaaatcagactaaagtatgctaaagtgcttcatgatttgactttctgagaaggtgtggggcagtggaaagaaactgggaatttgtctaaaccccagctctatcccgactcaacacatggtctagagcaatctcccagtgtattccaatttatagctcacctaatctatgccacttctgatatcaaaccaagaaactgagtcccagaaagacaaaatgacttgtcttgggtaacactgtcatttagtgccatactggctttaactcagatcttctgattccagagtgggggaacacgaaggaaatgattttgatcttataggcaggcctacctaacttctgagagaaaaagtttatgtccttgagaggaagattagctagctagctagacacatgcatacatacagagatagacagacagaaaaaaactcagggacttggtaagattttcttgtttggttgggtttttacctgcatacagggcaatgcaatggaacgtaacacctgctagagaggaaattataaggaaaagtttcttctcaggcacaaagctgcaagacgcttgtatcccaaatacctgtaatttgttaagtgttattctgatctacttctatcacagaagggatgcagagtggctgacacaaaggggctcagatcagagcctgctgatagaaggacagcaagtgagaaacagtaaagattattcagagggaaatgcatgaaagtaaactctatttacaaaagggataagtcatgtccacttattattgttaaagatggtggcagttttgaaacaaaataagtaagtctctagaaatggacgagagtttaggaatggtgatctcacttcagattctcaggagtcaccaaaggtgaagatgccttttttttttttgtaaagaaagtactgacaaaattctgactctgttcttccttcctgcctaagttcccataacttatctgctttgtctacctactccccaggttatcccgaggctgtcttattcatctttgtatcacttattagactactctagtagagtgcctggcatacagcaggtactcaataaatgcttgctgaataagttgataatgttgactttgtaagctctaaagggctacataaggaattattgtatctcttgagaagatgcctccctgaagctatttcaattccaggagtcagttatcacacttaatgtgaacagaaagggtgtttaacttcaattgtccaattctctctgggagagttgaagcaaactcaggggagtttggacctggcagactggcccttgggcagcatcctatactgaggttgcattaggcttcatcattaactggagggactggaagcaattttctagcaatttacagccaaggaaggaaatcaatttcagtttaaaagaaacataatcaaaggacgcaaagtatgaatgtgaagccctgggcaggatctgaggaggttagaaatgagtgaaaaaaatttggtgcaagcaggatgaaggtaaatggttcatgaacacagtggtgctggaagtccatactttggaaacaggtggccagtttaaaagcccaggccaaactagatatgaagttaaaaagcataatagaaatacactagttttattctctttaattttccatttatatatggatacatcttgatgttgacatatacttattttaggttagacatgttggaacttgaatagttcatccttttttttttttttaagttgctgaaatttgcccagacataaagtgtgggcataagcctgacaagctgatcatttaacttattccaaaaaggcagggctttatgttttttaagcaatgcctaaagactgactctactatgacctgtggatatgaatgatatcctggagaaagaaggggtgtccctggaatgtcctcagtctctgacttgggggtgaaatataatttggtccagggacccgttcctcccaacttcctgcagttactaatatgcatatatgtggaaaacctgtccctgagattctctcaaggcctgtgatatcaagaaatgcaggttttgggatcatgcctgtaatcccagcactttgagaggccgaagtgggcaaatcacttgaggtcaggagttcgagaccagcctggccaacatggcaaaacccatctctactcaaaatacaaaaattagctgggcatggtggagcatgcgtgtaatcccagctactccggaagctgaggcaggacaatcgcttgaacctcggaggtggaaattgcagtgagccgagatcgtgccattgcactccagcctgggcaacagagcaagattccatctcaaaaaaaaaaaaaaaaaaaatgcaggttttagttctggctccacctcttaccagttctgtgaccactgatgaattatctttctgagactcagttttctctcaattgaatgggaagggcaatagtatgtagctcatgaggttgttgtgagggagataaatgtgataacgtgaatgtttaacaagaccctgacgtattgcaaactctcaacaaatatttgatactatcaatgttattatgtacattctctgggcattcagaaaaattcagaaatatcaaatatggaagagaagctaaactcactgttagcgggtatgtgatcaaactgcagaatgctctgctaattctgttaattcagaagaaccactgggagttggctgaactgtaagctttggttagagagatttgtgtattcagttgggaacaactgacagtatggaaagatacctcacagggtcagaggcactgacaggaaagtcctataaagcataagagaggggcaggcagttctggcatcttatccagatctcaatcagtgctgttggaccactacaggtcttggacttgctacctgaaaagttgacttctgttctcccagggccctggtctcctggtcaggttggtttagttgtcatcctaccatgaaagggaagctcactaagccaagggccctttgtaacaccagtgataggaaaaaaacttcatcaactaaacacacagagtacttgacaaatgccaactgcatatagtgtttagtaaataatcaccacatgaggaagaggcaggtcccagttggatataacaataaaacccatgacagcagtatggtgtggtttccagatatgcttgatttacagtaggactcagaaaccagaaaagcagcctagtgatataggtcctaacttgttcctccttgaaacagtagatcctagctgaaaacttaactcaaagacacagggagacatacatcaaaatgttgagaaggtgaacttcagaggaatggctcatgtaaaccttccatttgagcccacagaaggaatctttctctatttgcctcaaccaaccaccaactttctgaaaccaaaaaaaaaaaaaaaaccaaaaaacaaaaacaacaacgaaaaagacaatagaaaaaactataccactgctctttcggatctgttcttcccaagtgatgtgagtgtttaggagttaaattttcttctgtggctcctgcaatccccctagaatagagctctaaaagcagacagacagctgtttcagaaaagcatgaggcaataatcagcccacattgcttaccaaagcacaaagctctcgggaacacaggccattattcaaatcagacccaaactctctctttctctctttttaaaatcctcaaacagaaaaagtaggctggaaccttcaaaatctctctgtaattttcctccaaaataaacaaagtggtcagatatttttttcttttcagtgctataaaaatgcccgggcagacatatagaatttcatattcaggaatgaagagcttcaggaagctgcagatgcaactagctgttttttctaaacagaagtctagatgttttttctagacaggagactggtgcagccgtgatttccatgttcaatctctcctcaaagtctaagaaagtgggcccagcctcaagggcagaagctttgccaacggctgacgaacattagattttcccaaaatgaccctgagtctgctcactactgtttagaagccttcaccagagcaaaactgcccacctacctgtgaacaagttcaagtgctttcatttgacccaaaagagtcttctcattattattgcaacctatctttccaaactgggctcattcacttctgcgcactgttccttgtcattcactaaccatgtcgtgctttctcccgagtctacatccttacacatgctcttctcccttccaagaaccctccccagtcatcacctggaaaattcccactggtcctccaagacctagtgcaaagtcacttattttgtgaagcttcccagatgtctcaggaagagatggctgctccttctgctgcctcagccaacactgtgtccctcctcatgagtccaggagagcacttgtaacttacttgtttgagggtctgtctccccagtgaatgcctccagagcaagaagtgtagcttatgtctagcataggaccgaatgcatagcaggtctgaaggaatatttgctcaatgaataaatgaaaaaatattgaaatgaaatacatggtaagtccagaagcactgaagaagaaagagtgtgtctggtatttccactgtgtgtgtgtgtgactgaaggaagaggcatgcagctcaagtataaccgggaatctattccttgaaaaattaataccaagttttctggtcagtagctacttttctgaagggttttgtttttcacaggcaacagaaaaacttgagagtttaagaagataatgataatatttttatatgcaagcagaatttttcttaaaaacatgagcagactagtaagacaacacaaatgcttttcccacagggttaatgatgagggattcatgcattccaggggctatattacttgggagcttccacacaggtttgctccacagagctgagatttttataatgatggtcattctcagagcacctccaagggcctccattcattaaattgtactaaagatagaccatgtgaaggtggctttgtgtggaagcagcgtcagagcatggctcatcaggtagctttgcagggcccatggagagccttggggcagagaccataccttctgtgtggcagagaccatacctatgggggtggggtgaagagtggaggtagggggcaggctggcagagcaggagtctactgcaagatgttgccccaattggatgtggaactttggacagagtagttcatatctgtgtttggtttctagatttgttggaccagatctataaagtaatctctaagaaatatttttgctctagcagtgggtgacttcaggagtaggtaaatctttctcttaatttgcagctacaacattatttttcttattttgtctgcccattaaacattcatgtggaccagctttacagagctggttttgttttgtaattaacagtgatttgactgttcagatatttcccaagaatgaaatgcaatttttctgagtatttgcccatacccaatgtgaaaggataaaaacatgaatctgtaaccacaggatgaagaggctctaacatttacaaagtaatcattacatgctaatcactatacaagctttctcagtccttacagtaaccaatccaaagccagttttaaccttattttatgaggaggagactgagcgtggtataagatctctcagtccatttcatatttgaacaggcccttcctctcttttcccaactaaatgtgtatgtatatgtagcaagaggaatactaaagacgaaaagtaggagaaacctgggttcttgtttccagccccctgtgggctagggctatgagtttgccagttgctttaactttctatttagttttagtttttaaaatggtgatgtgtaatacctagtattcccaattcacagatgtgttacgaagttcacagaataaaatataaaatctctttgaataatataaaataccactcaaaactccagattatatagaaaggcagtttgcactgtgattgaggcagaagtctctggagtctgtctgaatcctggctctgatatttatcacgtgtacgaccttgggcaagttaactgacctctctgtgcttaggttccccatctgtaaagtgaagataataaaagcagcaaatgcttgtagggttcctaagaaaataacacacaccgacaacacctaatattgcagtgcctcacatacagtgtgcgtgtaataaatgtcagctatcattggcagaattttttcactggggtgacatgctacaagagccagaactctgtttgtctcattcaacatcttcagcacccagactctcggctggcacctgggaaacattcaataaatatttgtcgagtcaacgtaaccccacacttattcacatgactgcaacctccttcaactagactgtatgcagtatgaactgaacagtcttcagggaatatcttgggataggtatccaaaataacaggtaaatttctaatcagttccaagttcctcccattatacacaacatctaccgattatggcacgtaggtggttaggccccctagtaaatatgttactcttgttattttctgttgggaaaaaagtgatacggagctaccagtacactattaatctcctggtttgaataggcatgctaaggtagagaccttttcaaacttaggtggcacaatagaaggattaaactcacaacatcaaagtagaaaatacagaattggatactccctactcacagtgacaacggcaaaattttgtctgacagagagaggatggaactgagggagccaacatttgttgcatgtcatcagagaccagataagtgattttagttaatcctcataacaacgcagcattttacactttccactccacagatgtggaatcagaagttcagagaaattacataattttctaaggaaacaacataatttgaaacaaggtcatcttatccaaaaccagtcctttctgcactacgttaagcctggcacatagaaaattctcagtaagtggagaatattaaaggaagttttattttatttcttctggctggccagagatgatggtggaagtgatgtttagcctgactttaattttaactggggcttttggactgttctgaagactctgttttctctgggtttcgtataggaagtggctttactggctgagactgctcccagtcccaagtaaatttaattccgaagttggttcttatcctgcgttcttagtgtcttatgaccaaatcttgtctcttggttcctaaagaataggtagaaatctgtcttggtgggagagacagcgcaaggccacaatgattgtctggagctatattaaggggtgatgggtatggtagaagttttgggagctcaggattagttaagttctctctgtgcaggatgcaagaataaaaacaaattgctgcagaccaaatgccaggcacaatattaagagtttttacttgtactgtgatatttaatctttataactaaaatatttgcaaatatacacaattaaaataaatgcagtatggcatggtggtaaagagtttgtgctctggaataccctggcttgaattttgactgactattggcaagtgccattttctcatcactttttctcaactgtaaaaagaatattaatcataatatctacctcaggtgatttttatgagaattgatgcaaagaaaacttaataaactatttatataaacggataggtatagttcctggaacagagcaagcactcagttaatgtccccttgatagcaatctccttgagggcagaacccatgtccattcaattcagccccgtgtctccagctccttccgtatagtaggcactcagcaaatattaaatgtgggttgagtaaacaaatgaatgcataatggatgtaacagaagaagcattagaaggacctcagatcacgaggctgaagtaaaatatcaatactataaggaggtttaatgttaaaataaaattaataagagcctcaaggaaaactttcaaggtgctttctaccccatttagtactagggagaatttgaatgttttaaatggctttcatctgcataatggcttttctttggcctcctcctatacacagagacacgcacacacactcacgcacacacatacacatatgagtgggggaaacctctgaaaacaacctgcctccaggccttgggcttagttatagccctctataaacaggggttcctataggttggggaggagaaacacaagtttggtttcttctagctggcatgcaaatctggaatttaggattattgaggtctgaggcttggaataaggcacctgagaattgtgtcttcccaataaggttctctccaaagtcctagactgccctgcattcctttccccggtttgaatatgggtagttcaaggtagtactttcttacaatggggaaagaagaaaaaaacctcaagggaagttcagaagtgaatatacctctgggccctgaaaaggccttgctctgagaatgagctgaagtgagcccctgcttgactccagtggcttgagggtgccatttagttcatgccttggattcctcctgccagtggtagggaaaaaataaaactttatattaactaaattaatatagttaatttttggttaactatattacttcaggtccctggaggctacctgccagggatgggaggttatctgaatggataggtacacacaggagcttcagagttcagagaaggtaaatgtgcatttccagagcttagactgagatttaagtgctcggtataaattgctgttgatcctgggctcctctgaaagtttttggaccctaactatattttgcacagggaccttatccatacaatctcagctgctttatctgtaaaatcagtgaaaatatttttctcccagaattgtagtggagatgaaacaagatgtacatagaatggcttaaatgagcagtacaaataaaatctggggaagactgggaaacaaataccaggattgcctaaactggtgtcttaatgtgttaatttttaaaaattctcaacttccactaaaacaaaatttctacttgaaaattttgtgagttcatttgaagtcactgaacttaactgaatgaacaaaattccattctgcataatattctgcaatttatactttttaccatttcagatgtgccctttctgatgtttgagttagggaatcgtactgtatataaaacagtcttaaaaaatccacattgtgttaacccgtcttttgctattgacctagcactgacagtgactgctgctagtgacaatctcagaaaaccagtgtaaaattaaatgccatcttctgtggttctgtttcaatactttgccatagcctatagctagaagtttaattcaagacttccctagagctgaagcccaggtgatttagccacgatgcttggaaagcaggaaaactgttgcctggcaaccggaaacatttgaaaatatccagtacattttctgtttcgcgttcacagccctcttgatattccaatacacatagcagatgttaatcctcctgtttgaattttaaaggcatgaaacagagtagtgaaaagtggagacaacgttttcatttgcaaactaacaaattggcttcggctccaaatctttgggaatttgcagagactcattttcttcatgttgattttcccttcttcttcccctaaatagaactagtacactgctattttttcctcctttaacctataagaggagttaagcttcttataaatcagaaatgcttgctgggaatgttgataaagaaggtaaagctagaaagagactttagagtattatttattcattcgctcattcattcatttgttcttttactcacccattggtaaattaacagatgcatgctgtattgttagtaattaagagacaaaaaccagacacacttaggttcaaatctatctgtctgaatgactacatttgaagttatttaacctcttactaagcttcaatatcctctttgtaaaagggaataataataggaattgtgttataggggcttttttttgctgagaattaaatgaaataaagcaggtaaagggatcaacatagctcatggtatagagggagcactcaataagttgtaggtgatgctattgctactgttgttatttttgttggtaaagtcccactctaaggccacactatggtatggaggtttctataacttcatggaaaacagtataagctctgccatcagactacctgtatagctttgagcaagttttatacactgtaagtgcctcagtttcctcaggtgtaaaatgaggtaaacaatagcattttaccccacagtttgttgagagaattaaatgagagaatgttttttaacagcatagcccaatgccaggcacagagagctagtgctccatgaaagctggcttccatcaccattatcattattacatattaccaccactggtagtacaaagatgaataaaccatggtccctgttcttgagcagtcttgtgagggtatatgcattcactggagcacacttaaaaatgattacctagaagggggcaggtatgataatagagctacaaacagaaagccctagaaaccccaataagagtattatcctcctaaggcagacactgaaactatggttctcttaaaagataaactttggcatgttaacattttaaagagtttatttgagcagatagcaattcatgaatcagtcagctccaaactggaagtgatttagggctctgtccaagaggcacaaagggaaggatttaataggttgaatgtggaagtagagcaaataaattattcgattggttaaagtttgagcaattgccttacttggactgtcctggtgggaaggtccagacaatataagtagtggttagttggcctcctgtgattggctgagctgaagttttgttttcttttaaattagccccttacaggaaatgaatctgagctaggtttctatttgcttaggtaggaactcagggtgtgagaatcacctcagtctaatggctcccatttaatgattttaacagttttcactgttggctgcatattagcatcgcctttaaaaattacttatgcctgggttctcctcccagagattctgagaattggcacagggtatcatctgggcatcaggaatttttaaagctctcagatggttttaatgggcagccaagtgcagaattactgtgaggtaatcaccacttgatcctgatcatctttactgcgaaattggcacaagtatctgagaggagctgtgaggttcttatccttgttatctctacccctgccaagagcatggcacttcagagtaccaactgcaacagaagcaaaacttctgatttttccaagtagtagtgctggcatgcagatactgacagtaattgctctcatttatttagaatattttatctcatttaaccatcccaacaactctgagagctacttttctcttctttacacagatgagaaaactaatgataaaaatatttaattagtttacccaatgtttcacagctggtaagtagcagatgtctctgttccactcaactcacctcaaggtttataccagaggccctgaaatttgaccctgaaaataagtatcacttgccactcatatcctcccttaggcctttctccttctgtctccacttgcacttgcaaatgaaagagactaagtattctttactttttttctttttgctgtatatgtatatatatttattacactttaagttctgggatacatgtgcagaacgtgcaggattgttacataggtatacatgtgccatggtggtttgctgcacccatcaacccgtcatccacattaggtatttgtattctttctgtgagtcctctgatggctgcgttttgtgttgatatggtaaataagtcaagctaactgtaaagcttctttggtagaggagtctggtgttttcctgaaggcacagaaacattggtgtggactataatgcgcacttgcaaaaaactggggatttgggaaggtgcagatagcaagttatattagagttgggtagagtctggggtgcagagagagctgttcttaatcatcaagtgataaagttggggcctggcagagggattacaaactgggaaagaatgacttcctcttttttatgaagttcctgagggctcagtagtgctggcttggattgggagttgaaagtttggagattagaaaggggtacaaggccagatattgtgtctagtcaaatgtcatctgcacccattgggaaatagcgtggaccttctaaatgctccaaatgtggttatttctacacaaacaaagactagatggtgagggttgctaatggcaccttacctttgtcaagggcatataattgcaaaaaggaatgtcagctgttgtgtggggaggtcctccctgtgccaggcgttctgcatacattatctcatttaattattataaaattcctgtgagcttagtattatcgtgaccttgctacaaatagaaacacggattcttcaagactcagtactttgtggaagatcaagcagctggtaatttgagaagtaggcaaataaataccttctgtctctggttgctgacaccaaaggcaggaaatgtgggttgtcagtgcatgtcttggagtggttattcatgttcagccttgggcaactgactgtgagctccgacaagacaaaattttcccctccctccctacatatttaaaggtgtgtcttggtctgatgtgtgggtggtagaagcaggagcttcatagaatgaaggccaaagtatgtcttctacatttgtgcctttcttcctccgcttctatgtctatgtttctatgtaatgtttttggctgaaggagatggggttttatttctcctaccactgactccaaggtatttgacattctgtttcctggaggagatggctttgactccaattttggtatttccttttaactgtgattatttcagatatgctgaatataaattaccattcaaaagcataggaatgaataacaataatttttaaaggttttgttggcaaagaaaaggctcttacagacaactataaaaagcattctttttttaagtttttcccaaagtgcaaacatcataacccttctggagtgtgtatgtatctggaacttatttttaagcattctttcctgtgtgattaagctctaatttgaacaacatttctgtaatctttaattttatgaaaataaaacctactctctcatttatattacttgaagatagacaatgaaacaacttttcataatttcacagtacctgatacaagttcttggctaggccagctttagcctatggaacgacctaagagacaagtgaggatattatctcttacccccaagaagctgctgcacagtggcagcatggttttcacaggcctgagattcattcccttctttgctgcttgggataggaagtgactacctagaaaattgtccagggaatcacccctccatcaatactgttcagggactcagaataggcctctgctcaaaagtctgaggtgaagctaccagaagggctgtatagggatgtagtgggtgggcaggttcccaggatatgactggtttaggctaccagcttgaggattggggttgggagcatgagatctggaaccatggatttatgggagagagtctgggttttggcttagaaaaccctagaaaggagcttacaggagagtttatgctaacttggatttgagtttgaagaggaggaaaggatgatagtggtgatggtggtatatacctagagaagtagaaatagaaatgaaagagcctggagacttgtgaaaatttcatcttataggagtcaggaactgaagatggttggaaaatatcttggccattcaaatataccatttattcatagcatttaatgaaacgaccctgtgaatagcctgggaatgagcatgatgcaagaaaggtggactttagtcttggttctctcattaactggtgttgagtttaacaaagccagttaacctcttgagtctcatgttcttaaattgtaggagaggaagtaaggtgattgctttcttgttctcccttccaacaaggtatctttaaaaacagatttccatctttgtgaagggaagatacttgtctagagaagcactgatgaagaaaatttttttttgcaatgatagaaatattctataaccatgtgccaataaatacaatagccactagccccatatgacaatggaacacttgaaatatggctagtgagacaggaatatggaattcttaattttgttggatttaattaatttagccttgtttggctaatgactaccatatctagacagatatctaagtctagataaatttgaaacacatagtatgcttctaggtttggaatgtatgcaggggtgatacccagaatattttacagctagcataaaaaagggaagagactatctcttattagttgacctctctgcttgggagctgccacgatgagtttgaactgtcagaaaatgtttgtttgggagtgtgatttacatagcaaatcaaacatagggcatgtcaatttttacaatgacacttgaaacctggttgttttccctggaagatggagattttaaataaaattaaacataaaaagactttgtcaatttctaatgccatatctttcaaattccagcattataaagtgaaatgattcttttctccaagttctgatgtcaattggtctataaacgaaagcattttctttattgcttgagagattcaccacagacctgactcttgaattttttctggacttaaaactctgggaattgtgttactttatgctatcatttaaaccaccttgttcctcactctaacatcttataataaatgtgtgaagttactcacagatgaattccttttgattactcactgtttagaaagagattgggtctacagcaagctgggttccacatggaaaagctaagataaacacacccatgtaagtagatacatgattacataaacaaggcctgtggagaatgttcatacattcatgtgactctcaaagtttttatgactcatttatgctatatatattttcctataattttggtccagcattagctgagtactgttagctaaagaataacagtttctctttgctgtgattaaaacccttggtttctttatcaatttcaacatgaataatgaacacgaacagctactttttttgggggggtgggtgcctgaatgggacttaccagggtctccatatcatcccctgactgaaatgaccagcaggaggccagaggagtacaaatggagaactaaataccttccttttccttttttctcccctttatctagccacttctgtttttctaaaaagccttgggaataatggaatggtggaaagcatgtaggcaaatcccaactccaaaaacattccagttctgtggccctccactcaaccccttttctcacttgcaaaatgagtctatgagtacctgatagagataagaatgtattcggcacttagcaaataggagccctgaatagatggttattaatattattggtcaagaactcgtggtcattgtcatcatctctctcctttttgtttatttactgattctctttcccttttttcctgttaatattaatcatccttcaaatatttttcttgactatcttaaaacttaaagggaataaggctatctgtacaattaactacataactaatcttcatccttctcctcttgtctcccaacctttccttggcctgaaaatacatccctaccaacaagcccattactatatacatgatgataaagttgcaggaagcaggtaggataaagctacttaagcagaagtaaaggaaaagttgttaagaactcactttgtatcaggcagtgggactagatgcttttagtaaggaagaatgtctggcgtatctgccctaactccacctgcttccatgaacaaagatttgacagtgatggtctcagactcggttcatatcccttgattaactgttttttagcactgatatttgtgtagatgtgaaggctattggagctttaaaaaatcattagatgaaatttatttttgcttgaaaagtctacatagaatgtaagtggcattaattaagtgagttttgataggcagtcacagtaaaatcctgtaggggaggacctttggctcttgtaatacagctcagtggggctcagtttcacactcaaccaggcaaattctctcattagctttatttatttatttttatgtatttctttatttttaaatatatatatatttattatactttttaagttctagggtacatgtgcacaaaatgcaggtttgttacatatgtatacatgtgccatgttggtgtgctgcacccattaacttgtcatttacattaggtatatctcctaacgctatccctcccccctccccccaccccacaacaggccctagtgtgtgatgttccccttcctgtgtccaagtgttctcattgttcagttcccacctatgagtgagaacatgcggtgtttggttttttgtccttgtgatagtttgctgagaatgatggtttccagcttcatccatgcccctacaaaggacatgaactcatcattttttatggctgcatagtattccatggtgtatatgtgccacattttcttaatccagtctatcattgatggacattttcgttggttccaagtctttgctattgtgagtagtgccgcaataaatgtacgtgtgcatgtgtctttatagcagcatgatttatattccattgggtatatacccagtatacccaaaatggtaatggtatggctgggtcaaatggtatttctaattctagatccctgaggaatcaccacactgtcttccacaatggttgaactagtttacagtcccaccaacagtgtaaaagtgttcctatttctccacatcctctccagcacctgttgtttcctgactttttgatgattgccattctaactggtgtgagatgatatgtcattgtggttttgatttgcatttctctgatggccagtgatgatgagcattttttcatgtgtctgttggctgcataaatgtcttcttttgagaagtgtctgttcgtatccttcacccactttttgatggggttgtttgtttttttcttgtaaatttgtttgagttctttgtagattctggatattagcccaatgccatccccatcaagctaccaatgactttcttcacagaattggaaaaaaactactttaaagttcatatgaaaccaaaaaagagccctcattgccaagtcaatcctaagccaaaggaacaaagctggaggcatcaggctacctgacttcaaactatactacaaggctacagtaaccaaaacagcatggtactggtaccaaaacagagatatagactaatggaacagaacagagccctcagaaataataccacacatctacagctgtctcatctttgacaaacctgacaaaaacaagaaatggggaaaggattccctatttaacaaatggtgctggggaaagtggctagccgtatgtagaaagctgaaactggatccctttcttacaccttatacaacaattaattcaagatggattaaaggcttaaatgttagacctaaaaccataaaaaccttagaagaaaacctaggcaataccattcaggacataggcatgggcaaggacttcatgtctaaaacaccaaaagcaatggcaacaaaagccaaaattgacaaacgggatctaattaaactaaagagcttctgcacagcaaaagaaaccaccatcagagtgaacaggcaacctacagaatgggagaaaatttttgcaatctactcatctgacaaagggctaatatccattctctctatagctttaaaactttgtttgaagagtagtttaaagcatcaacaatttcttgttgttggtttttttttttacactactcatcaaaaagatattggtgattggggatgagttagctggaaaaagtaatgagctcttgtttctatgtcacgagtaatatatgttgcaaatatcttctcaaatctcttcctaaatctcagtcatattaggcatgggaggatatttagaattcttattttctgtaaggaaatggccatgtgaggatccagagcatatcttttcaccttcttgggcttgttttccttttgagaaagaagggcattgggctagcccaatatcactgtatggcctgaaaagtcctttcactgaatctaagttccagtggtccagggatttaatttacctccctggtaaggataggaggctataagagagcttgtgtatatactttccaaaatatatgtgtactttattaagcctttaggcttaaaatggaattttaaagaaatcctataaatgttttagacagtgaagtggaattatttagttgataggagataagtactgaattggttgtgagaagatctggtatttttttaagctagtttagtatccataagcaactaacatgggcattaatatttgcattgtaaaattaatgtaattatatctgcacagaattattttgaaaattaaaagaggcaaagtgagtgtcttctgtaggcttgagtcaagaactctcagtcatcttggtaatactggcttggatagatgcctagagctgctggaaaaaggccagaactttcagatcttcagaggaaaggcaccgaccttgcatgggccattgcacactgggactcatttttgaaccacaacagctccaggggaactggtgagttcaattggcaaggagaaactctttcttgccacaggcctctagaaccccggcaggaggggaaccctcgaccaccacatgacacttgaggtagcagcaagagctgcctagagaagtggtgggatggcaagccagctgatgtgaagcccagagggtttggtgcaggagtgtctgtagtggagcacggtcagggacagccatccccctaagctcaaattgctctcataggagactttagccctaggggaattgtcagttctgatctccgcagggtggtcttggacatcagacggggttggactgacctgagcaccccttggtctcctggcctctcccagggccccagcctggtcatgccagcttacagagcagttttgggtgcccggggggcccacaccatagcttctgtactggcagaccttacctgactggcacagagctccagtgagccagcccctatggcctcacaccagcctgtatgccccctccccatactgcagctttccccaagcccacatcaattcctcatatcactttgctggtgtgtgtcttcacaggtgggttttgcattactttgcccatcaggatgcaagagtgcagtccactccccttcactcactaaccaccattgcagggagccttggctggcacagagccagcaagccccaccctcaccagagccctgcttttgcactaacactgtgcagacaacaatggatccttctatgccctgagtgatcctgcttgcagggcatggagaaggcacccaggcctgagctagtcagcatcctgccccaagccaacaccacttctagtgcaacagcacacataggctccagcaggggccctctgtaccccctggttgcattgcccccaccactgtggtggatgcccacaggatggcaggcagccctgcgtctgctagcactctgctgcagctgctgcaccttggccctcccagcacagtggactccaaaccttgaagagccagataataaagttggggccgaatatgagtcccccagagttggagcatgcagtctagcagttgggagctgagggttggccccctaaaatctcccagagacaaagtcagtcagctgaatccaccttataccacaattaaatctccaaggttgtccaatagaataaaagaaaaaaatccaaaaatcagcaacctcaaagattgaaggtagataaacccacaaagatgagaacaaatcagcacaagaagtctgaaaactaaaaaatgcagagtgctttctttcatccaaacaactgcatcactgctttggcaagggttctgaactgagctaagatggctgaaatgacagaaaatagaattcggtatatagataggaaagaaattcactgagctacaggagtatgttgaaacccaatgcaatgaagctaaaaattatggtaaaacaatgcaggagttggcagacaaataaccagtaaaaataagaatgtaactgaccagatagggctaaaaaacacaagaatttaataatgcaatcacaagtattcatagcagaatagaccaagtggaggaaacactctcatagcgtgaagattggctttctgaaataagacaggcagacaagaatagagaaaagagaatgaaaaagaatgaagaaaacctccaaaaaatatgggattatgtaaagatatgaatctgtgactcttggtgttatgaatctatgacttattggtgtccctgaaagagatggggagaatggaaccaacttggaagacttatttcaggatgttttccatgagaacttccccaaactagctagacaagccaacattcaaattcaggaaacacagagaaccccagtaagctacttcacaagatcatccccaacacacataatcatgattctccaacatctaaatgaaagaaaagatgttaaaggcagctagagagaaagttctggtcacctacgaagggaagcccatcagactaacagcagacctcttagctgaaaccctgtaagatagaagagattggggaccaatattcaacattcttaaaaaaaaaacttttaacccagaatttcatatccagctaaactaagcttcataagagaaggagaaataagattcttttctgacaagcaaatgctgacggaatttgttaccacaagacctgccttataagagcttctgaaggaagcactaaacatggaaaggaaagaccattaccagccactacgaaaacacactgaaggacacataccagtgacactgtaaagcaaccacataaacaagtctgcaaaataaccagctaacatgatgacaggatcaaatccacagatgtcaataataaccttaagtgtaaatgggctaaatactccaaataaaaggcatagagaggtaagctggataaagaactaagacccattgggctgctgtcttcaagaaatccatctcacatgcaatgacacacataggtttaaaagaaatgtgtggagaaaaaatataccaagcaaatggaaaacaggaaaaagcaggggttgcaattctagtttctaacaaaataggctttagaccaacaaagatcaaaaaagaccaaaaagggcattacataatggtaaagggttcaattcaacaagaagatctaactatcctaaatatatatgtacccaacacaggagcactcagattcataaggcaaattcttagagaccttcaaagagacttagacttccacacaataataatgggatactttaacatcccattgaaaatattagacagatcactgagacagaaaatcaacaaaggtattcaggacctgaactcagccctggatcaaatggacctgatagatatctacagaactcttcaccccaaaacaacagaatatacattcttcttattaccacatggcacatactctaaaattggtcacattcagaagtgaaatactcctcagcaaatgtagaataattgaaatgataactaacaatctcttggaccacagcacaatcaaattcaaatcaagactaagaaattcactcaaaaccatgcaattacaagtaaattgaatgacttccttctgaatttcattgtttactatttggtaaaagtaatttactttttggtaaataatatcattatttacttttgagaacaaagataccacatatcagaatctacaggacacagctaaggtgatgttaaaagggaaatttatagaagaaaatgcacacatcaaaaagttagaaagatctcaagttaacaacctaatatcacaactgaaagagctagagaatcaagtgcaaagaaatccaaaaggtagcagaaaataagaaataacaaaaatcagaactgaactgaataagattgagaaatgaaaatacattcaaagtatcaaagaatccaggagctgatattttgaaaaaaatttgataaaatagacagacttctagctagaataataaagaacaaaagagaaaagattcaaataaacacaatcagaaatgacaaggcggatattaccagtcacctcacagaaatacaaacaaccatcagagaatattatgaacacctctatgcacacaatctagaaaatctggaagaaatgggtaaattcctgtacacattcacctgatatggtttggctgtgtccccactcaaatctcatcttgaattgtagttcccatgatccccacaggtcatgggaggggccaggtggagataattaaatcataaggatggtttcccccatcctgttctcatgatagtaagttagttctcatgagcttttatggttttataagaggctttccctttcactggggactcattcttctccttcctgctgccatatgaagaaggacatgtttacttccccttccaccacaattgtaagtttcctgaggcctcccagccaagctgaactgtgagtcaattaaacctcttatcttataaatgacccagtctcaggtgagtctttgttagcagtgtgagcatggactaatacagtaaattggtgctgggagaatggggtgctgctataatgataccaaaaaatgtggaagcaactttggaactgggtaacaggcagaggttggaaccatttggaaggctcagaagaagatagggaaatgtgggaaagtttggaactccctagagacttggagggctcagaagacaggaagatgtgggaaagtttggaccttcctagagacttattgaatggctttgaccaaaatgctgacaacaatatagacaatgaaatccaggctgaggtggtctcggatggagatgaggaacttgttgggaactggaataaaggtgaatcttggtatgctttagcaaagagactggtggattttttacccctgacctagagatctgtggaacattgaatttatgagagatgatttagggtaactggaggaagaaatttacaagcagcaagacattcaagagttgatagagcataaaagtttggaaaatttgcagcctgatgaggcagtagaaaagaaaacccacttcgtgggggagaaagtcaagcctaatgcagaaatttgcataagtagcgaggagccagacactaatcaccaagacaatggggaaaatgtctccaggatatgtcagagaccttaatggcagacccttccatcacaggcctggaggccaaggagggaaaaaaggtttcctgagctgagtccagggcccccctgctctgtgccatggggacttggttccctgtatcccagctgctccagccatggctaaaaggggccaaggtacagctagggctgtagcttcagagggtgcaaaccccaagccctggcaacttccatgtggtgtttgtcctgcagtgtgtagcatacaagaattgaggtttgggaacctctgcctagatttcagaggacgtatagaaatgcctggatgcccaggcagaaacctgctgcaggggtggagccctcatggagaacctctgccaggtcagtgcagaagggaaatctggggttggagccaccacacagagttcccactggggcactgcctggtggagctgtgagaataagcccaccatcctccagaccccagaatggtagatctactgacagcttgcaccgtacacctggaaaagccacagacactcaacactagcctgtgaaagcagctgggaggggaattgtacctttcaaagccacatgggcagaactgttcaaaaccctgggagcccacctcttgaatcagcattacatggatttgagagatggagttaaaagagatcattttggaactttaaggttaaaaattaccttattggatttcagaattgcatggggcctgtaggccctttgttttggccaatttctcctatttggaatgggtgtacttacccagtgcctgtaccccattttatctaggaagtaactaacttgcttttgattttacaggctcatatacagaagggacttgcctggtctcagatgagactttggacttggacttttgagttaatgctggaatgagttaagactttggaggactgttggaagggcatacttgtgttttgaattataaggacaggagaattgggagaggacaggaggggaataatatggtttgactgtgtctccacccaaatctcatctttaattgtggttcccatgatccccacatgttataggagggactaggtggaaataactgaatcaggggtgcggtttcccccattctgttcttgtgatagtgagttagttctcatgaggttttataagtggattccagtccactgtccactcattcttcctgctgccacatgaaggaggatatgcttgcttccgcttctgccatgcttataagtttcgtgaggcctccccagctatgctgaactgggagtcaaacttctttcctttataaattacccagtgtcgggtatgtctttattggcaacatgagaagagactaatacacaccctcccaagactgaaacaggaatgcgtttaatccctgaaaagaccaataatgagctctgaaattgaggcagtaataaatagtctactaactaaaaaaaaaaaagaaaaagaaaaaaagcccaggaccagatggattcacagctgaatttcaccagatgtacaaagaagagctggtacaattcctactgaaactattccaaaatattgaggactaggggctcctccctaactcattgtaggaggccagcatcatccttataccaaatcctcccagagatacagaaaaaaaagcttcaggccaatattcttgatgaatatcaatgtaaaaatcctcagcaaaatactggcaaacagaatccatcagcatatcaacaacttgttcaccatgatcaagtaggcattatttctgggatgcaaggttggttcaacatatacaaataaataaatgtgattcatcacattaacagagctaaagacaaaaaccacataattatctcaatatatgtagaaaatgctttcaataaaattcaactttcattcatgttaaaaagtcccaataaactcgttattgaaggaacatacctcaaaattataagagtcatataaacaaatccacagccaacatcatactgaatgggcaaaagctggaagcattccctttgacaactggcacaaaacaaagataccctttctcactgctcctattcaaaatagtattggacatcctggccaggacaatcaggcaaaagaaagaaataaaagacatccaaacaggaagagtggaagtcaaaatatcctaatttgcagatgacatgatcctatatctagaaaaccccatagtctcagcctaaatgcttcttaagctgataaacaagttcagcaaagtctcaggatacaaaatcaatgtgcaataatcatgagcatttctatacaccagcaacagtcaagtcaagagccaaaacaggaatgtagccccattcacaattgccacaaaaagaataaaatgtctaggaatacacctaactagggaggtgaaagatctctattaggagaactgcaaaacatggctcaaataaatcagagatgacacaaacaaatgggaaaacattccatgctcgtggatatgaataatcaatatcattaaaatggccatagtgcccaaagcaatttataaattcaatgctattcttattaaactactgttgagattcttcatataactagaaaaatctattttaaactttatataaaacaaaacacaacaaaagcccaaacagctgacacaatcctaagcaaaaggtataaagccagaggcatcacactacccaacttcaaactatactacagagttgaagtaaccaaaacagcatggtactgacacaaaaacagccacatagaccaatggagcagaatagggagcccagaaataaggctgcacacctacaactatcttatctttgacaaacctgacaaaaacaagaaatggggaaaggattccctgttcaataaatggtgctgggttaactggctagccaaatgcagaagattgaaattggaccccttccttataccatatgcaaaaattaactcaagatggattaatgacttaaatataaaacccaaaactataaaattccttgaagacagcctaggcaataccattcaaaacataggcatgggcaaagatttcatgatgaagatgctaaaagcaattgcaacaaaagcaaaaattgacaaatgagatctaattaaattaaagagcttctgtacagcaaaagaaactatcatcagagtaaacagacaacctacagaatgggagaaaaatttttgtaaactatgcatctgacaaaggtctaatatccagcatctctaaggaacttaaacaaatttacaagaaaaaaacaaccccattaaaaattgggcagacatagacagttttcaaaagaagacatacatgtggccaatgagaatatgaagaaaagctcaacatcattgaccattagagaaatgaaatcaaaaccacaatgagataccatctcaccccagtcagaattgctattattaaaaagtcaaaaaataacaggtgctggtgaggttgtgaaaaaaaatggaatatttatagactgttggtgggaatgtaaattagttcaacaattatggaagatagtgtggcaattcctcaaatacctaaagacagaaataccattccacccaacaattactaggtatatccccaaaggagtataaattgttctattataaagacacatgcatgcgtatgttcattgcagcactattcacaatagcagagacatggaatcaacataaatgcccaccaatgatagactggataaataacatgtggtacatacacactatggaatactatgcagccataaaaagaatgaggttgtatccttttcagggacatggatggagctggaggcctttatccttagcaaatgaacacaggaacaggaaaccaaataccacatgttttcacttattaagtgggagctaaataatgagaacatatgggcacagagatgggaaaaacacacactgggaccctattagaggttggagggtgggaagaagcagataattgggaaaaataactaatgggtactaagcttaataactcagtgatgaaataagaaatgcccatgacacaagtttatctatgttaaaaaaaaaaaaaacctgcacatgtactcctgaacttaaaacaaaagttaaaaaaaattaaaaagccaggtgtggctcacacctgtaatcccaggactttgagaggctgaggcaggtggatcatttgaggtcaggagttcaagaccagcctgggaaacatggtgaaaccccgtctctatcaaaaaaaaaaaaaaaaaaaagacttaatggggaattatgctgtacacctgtagtcccagctactcgggagactaaggtgcgagaattgcttgaactctggatgtggaggttgcagtgagttgagattacaccactgcactccagcctgggaggcagagtgagactccatcttaaaaaaataaaagattataaacataaaaatactttgcaaactcaaaggccttaattgacctatagatcgctagatcacttgagtcacttttaaagatgattccatagattccctgccaaaacgtttgaagcagaagaactctgagtttcattccaacctttagtacaccatgtcatgattcaatcttccatgagtgaactatccatagtgctgaatctgactgcattgatttagaaagggaaatcttattttatgtgagtggtttgttattaatgactttgcataaaacataatttaaataatccaaggctaattttcccaaagtagtaagtgtaaagaagaagagtgcatgtcagaggacaaaaatctacatccccattgtctcagttcttccctcactccctccctctttctcttccttcttccttctcattctcctcctcttcctcttatccctctcctcttccttcaatgatgcttttatatattttggtgcaaaattatttattatttatcacacttctctcctaaatcagcagttcattgtttcatggcagtcatctagttctctttaaagtgttttagcatatctaacctttgtcccaaagttgttatttttggaggcttttttttttgccctagcactatgatttgatgaataattagaaactttattatagtatattaaaaggctacatacattcataatagtaagcatcacactaaaagtcaaatagtcaccagaattatctgccaaagttctgatacatacaatgataagattcacatgattttggcaaaggataagttattttgccatttggtgatggcataatacagtttataattcacttggctttctacttcagaaataacacatttcctgatttctaaaaacacagatttttattatataaaattttgtgtatacagtgattttaatatatcacactatttcaaatttgcacaatctaaatttgcataaaatgtcaattacactacactttaaggtctctctcctttcctttgtctggagaagaaaacataggtgatgtattctcttttcctttggtaagtttccacagtaatattgtattgtttcagtggagatattgcagagtagtgtatgaacatgtcactagagtgagaagacccaagttcaagctacaattttactactcactcactttaagtcctatccatgcaaggtctatgttttcttttctagagaaaggaagggagaaagaggtattttccagagtatttgggtgttaaatcagatcatctggatgtctttcttccataacttctctttattttgagacagagtctcgctctctctcccaggctggagtgcagtggtgcaatttcagctcactacaagctcctcctcctgggttcacgccattctcttgcctcagcctcctgagtagctgggtctacaggcgcccaccaccacgcccagctaacttttttgtatttttagtagagacgggatttcaccttgttagccaggatggtctcgatctcctgacttcgtgatccccccatctcagcctcccaaagtgctgggattacaggcatgaaccactgtgcccggcttataacttctaagatgctatacaaatgcaaggcggttctagctggtaacaccctttttaacagtacacaaagttccataaaatgagataaaaaatatggtattaaaagtccaggattataaagatgctcatcattatcaagtcaatgtacatttttttaactaacatttttttgaggagagaatgacacaaatccactataacaatagaaatttgcattataataaacaacaatattttctttagactcaagattttctgaatgctaactttgtttaaaattttgtaatacacagcaattttctctaaagactgatttgacttaagccaaaactgatgataagtttagtttcttttctcttttctctatttcttatagttttaattcccaaagagtattttttatgtataaatacttactgaaacacttgctgttcaaataaaaataaatactgataacaaagctggtacatatagatattcaaattatttgatagaaatatgagaacgtttaccacctttagttaagtctgtctttctttgcctcatgttcaataactttcttttggcccttccacaaaaattaaagcctatgcaaatataaataaatacgaagttcacaaaaactttaaatttgagctagaaactcaatggttaaaaaaaaagcaaacactagatagtctatctttagggttttctttttgtttgcttgtcctttcatttttcctgaaattgcagattggacaaaaccatttcaggcctctgggatatgtatcttccatctataatagaacaaattacaagtgaaaaagcattgttatggagtcttcagcttaaagttggcatatttatttgttatgtgctgcacaatttctattccttggtctcttcccattataaattcatcattatacttgttttttaattaaaaaggtagttatttattgtgtccccatttaatttagaacctgaggtatcatatcattaaatcaataagatttgatgacaaattttataaagttgccagaaaaatatgaccataaacttgattttaaaattcaggctacaactgctatcactagctttattttttctagtgatgaagtagcaaaatttgccataacattaaacctcaattattatcctataaaatatttttcacctgagcactcagaatctcattagtttctttatcttttcaaatcagcaagttctgaaaattcttatttgaaatgcaaaagcaaaagggagggttgtcagcagcccacttaatccttgattctcaatttttctcaccccaaacctaacctctttcctcctcctgtattccattaataatttcaggaatatttcccaaactttcattgattgagttaccttagtaacagtggacccaaagtttctggtaagaaggtttcaattttgtcaggcaaagatatttttcctttcagttacattcatttgtagtttcaccttttggaagaaagcctatttaaaaataagtagtttgcagaaatattctatttccaaagagttttgaatttttttctttcttttcctttactcaaatttttgaaggtattttccaagaaaaaaaataatgaaagtactaaaagtgtcaaaattagagtattttcctagtactttctcttggctgctcatgaacaaaagcagcagtcataaaaataaataataaaaattgaggttctgcattcaaactttattttacaaagccctggttacctccacaattttgaaactctgtctctgccctaccgtgctgtttgcgtatcattctccagttgttttattcacttgattcctgagcattatgttaattcccataagcagcacagttcagcattcaactggatatgtttttctcatgctatctttgcaaaagtctttgtttaaaagctacttcattcccatcaggcagcaaggtagaaactccagacccataagtacactgaagcatattacaaaaatatgatgagactcaatgaggaaacttggatataaatattaatcttccttttatcaggataggaaccaaaaagtctgatctgactttttgaattgttcatgcagttcattccagtcatgtgaaagtaaatcagggtcagcttttttttaaatggcactgcctttattttggaaaatgtcatggctgcagccagagatatagttttcttagttcctatttctaagagcatcctcatatggattcccggatggaaatgcaaaatggctttgttatccttagccacccctactgggccactttgtccttggatggtatttgtttttctaaatcaagcatgctcaagagaaatttccagtccatctaaacctattcatagattcaatatagagatacttgctaatttgctttcatggttaaaaagataaataaaagctgtctgcacttcttgccagtagaaattcataatctacagttggttggaacatgatttgttctttttttaaatgtaaggtttcctgaattaagtagagacagtttgtccagataccactctctgattcatcagggagtctctgtggtaactacattttcctctttgattatttgggtgtcgcgaaagttttttaaattgtaaatgaagtaactaaaagttgtacaccatatacagacatggacttaggtgcatacatacacaaagaggtgttacttgatgggatttaggacatggtatccccaaataggacaccttggaatttgagagaacagcaaaagcaggaaggtcactctcaccttccctcctcccttgaagcaggtaataaaacttaggaagaatttttctggcccgaagcaggttataaggccctcatttgagaggtgcccttcccatactcagaagaaaagaacgtctttacctctaaagacacagggcacagagaggaattggaataaacaggtcttactaaattccttccagtttattaccaatagatcacttttaaagaaaattaaatcatatttcttcatgactaccaactttatcaccaaacctagtatggaaaatgcacaggtttatccatttctttgggtctttatttctttatgaagtctcccatgccacgtagaactttattaaataaatgtgtatgcttttctcttgttaatctgtcttttgttataggggctcagcctatagaggcctcagccatcaatgtagaatgggtgagaaaaacatatttctcatcctatctatactaaaaagtgagtttactatttgcaaaagtatgggaccatcaaggtttattatctctctctctctctctctcacacacacacaataaaatcagttatgaaagaatactagagtttctaaaaagtatttcataatgatgttattaagaccatgatttgtggtagtcagtgctttttcctgaagcctggaggactttttactttgactaaccagaatttgcaacttgagtgcctcttacctctatttttaaaaagcaaaaaataacttacttagaaggtattaactgaactattaaatattttattgggttttcttctggtttctatctatcaatgcttattccttcagaatgatactgtttaaaaagaaagcactgctaggctgtgggaacgttattgattaacttcgtggtgaggaaataacaactgctcaggtttggacttaataatttcctaacaaaaagcttcccacgtgcatagcccttcaaggcaataggatgatgttatataaaaacaaggtgactaaagtattaagtatcaattcctaaatataaaaacagaaccactgttgatgtggctgatggatttggcaagaataagcaatagccaccttggtctctggctgcctttggatggcactaacacccacaggccaacatgtagttgtaaccacatgccttaatgttataagacaacagaaacctcaaggtatctatgaaagatcttatcaaaaagcaaagatgctatcaaaaggcattctcaagtgtggattccttggactaaactagattattattattgatggttatggcctattccaggagcttttaaaatactgatagctactggtcccagccccaccttcacccctatttatcaaggaaacctaatggcagagcctaggcatgaacataaagccaggcctgcctcacttcagagcccttgcttgtcaccagatcagtttttaccttgtaatcaatagatctctcttctcagtttgtggcctctcacccaggtggagttgggtaggcatggtccccagaggagctgtccaacactcaaggttctgaagtagcagagtagaagaggaaggagggagggctttccaaacagataaaagatgtatgcatttctttaggtaagaaagggaaaacttcacagatgcgtgcttttaaaataaattttactgtgtatgtttaaggtatacaaaatgatgttatggaatatatggagatagtaaaaaggttgctataatgaagcaaaataacacactatttatttattttttgagacggagtttcgctcttgttgcacaggctggagtgcaatggcgcgatctcggctcaccgcaacctccacctcccaggttcaagccattctccttcctcagcctcccgagtagttgggattacaggcatgcaccaccacacccagctaactttttttgtatttttagtagagacggggtttctccatgttggtcaggctggtcacgaactcccgacctcaggtgatctgcccgcctcggactcccaaagtgcttggattacaggtgtgagccaccacgcctggccacatacccattatctcaaataattacccattttttttgtttttgtttttgtggcaaatgcagctaaaatctacttatttggcacaaatcccatacctatattacctatagtgctcatgttttacattagatctctagacttgttcatcctgcatatgtgctattttgtatactccaatctacatctccccatttcctctcccaccccccaccctggcaaccactgttttgttctctatctctctatatttgagattttaaagattccacatataactgagattatgcaatttttttctgtgtttggcttatttcacttagcataacgtcctccagacttatccatgtggtggcaaatggcaatatctcattttttaggaataaataagttttcattgtatatatatagaacagtttctttatccattcatctggtgatggacactcaggttgtgtccatatcctggctactgtgaataatgctgcagtgaatatgtgagtgcagatacaaagtggtgatcctttcctctgggctttcactgtaagtatagcagtgagtatctccacttctcatttactctgagtatttgaccagaagaggggttgttggatcatggggtagttctattttttgtttctttagaaacctccatactgttcttcataatggctgcacctatctacattcctaccaacaagatacaagcattcccttttctccacacctttgccaatatttaccttttgactttttgataataaccaggcagatgagtgttttgataagcatttgacaagcctggaaaatcagaaccattagcaaacaggagcagttgatgagtgaaggttaaactgagggttgggctgcattgtctgatgcaataacgactaggtacatatggccactgagcacttgagatgtagctagtgtgaactgagatgtgctataagtataaaacacacatctgaatgtgaagacttagcataaaaagaatgtaaaatatctaattagtaatttctatgtgattacatgttaaaatgataattttcatgtatttattcaacttttatcctagattcagtgggtacatgtgcagattagttatctggatatattgcatgatgctgaggtttggaatatgaatgatcctgtcacataggtactgagcatagtgcccaacagttagtttttttgagacttgtctccctcccctctctgtgccatctagtagtccccagtctttattgctgccatttttatgtcctcaagtatctaatgtttagtttccacttacaactgagaacatgcggtatttggttttctgtttctgcattaattttctaaggataatggtctctagctgcattcatgttgctgcaaagaacacgatttcattcttttttatggttgcgtagtattccatggtgtatatgtaccatctactgttgatgggtaccatggttgattccatgtctttgccatggtgaatagtgttgcaatgaatgcgcaagtggatgtgtctttttggtagatttattttcttttgaatacatacctgataatgagatcactgtgttgataatgagatcactttctacagtggctgaacaaatttacattcccaccaacagtgtataggcatttccttttctccatagccttgccaacatctgtttttttttcttttttgactttttagtaatagccattttgactgatgtgagatggtatctcattgtggttttgatttgcatttccctgatgattagtgatgtggaacattttttcatatgtttgttggctacttgtatgctttcttttaagaagtgtctgttcttatcttttgcccatttttaatagggttttttttgcttgttcaattgtttaagtttcttatagaaaattataatattttagatatattgaattaaatcatcaaaattaattagccatttattttcactttgctttaatgtagatattaggtgattttaaaattacatatacaagtcacatttgtggcatgcatcaaatttctattggacagtgttgacttagaacttgaaaggaatattgcttaggagatgctgaatagaagatttgagtaaataggtgacaaaatcaacattatacttgaggattatgttcttgtgattgtggcagcttagaaaaatttgcaaggagaagacagcagttggagggaagagatgaccaacagcaattattgtgtagtgactatgtgcctggcacactggtccactatctctctttatctccacaacaaccttggtatgtaagtattccttgtatttcacagatgaaaaactgacatttagcaatagtaagtaacatttcccaaattacttaacctactgaaataagattgcaggttcaaactcatgtatactccatgtccttccacttgaccagggaagtggagaagaatggcaggggtactggggacttacctatggggatggggaacatttagaaaactgtaacacaaaaattagcaggctttgagaaaaaatgagtgcaaacagttaagaaagaagatatttaaacaaaccttaggaccaaaagccttggggatactgagagtggtgagaaaagttttaagtctcaagttgagggttatgctgatgaaatagcactgctctccccgcagaccattccataagtccactataataatgtacatttagtggactcccactgtatgcaagatagtgccaggcaggatggtagggggaaaaaagaaacacaaaatacattttctagttctttgtctacttgagaagacaagaagtatgcctctgaatccattgagtggcaacaaagcttcaggtagtcgatatgacagtatccggctacgtatttgtctaaggacctttggataactagcagtaggaccttggacaaattacttaacccttctaatgttcagttttcttatctgtaaacttgacataacattatcttgcccacctttcatggttgttgtaagaaccaaagtctaaatgaaacaatgtgtattaatatgccttgtgaattatgaagtgccatacctgacttgaaaactcatttattagatgttattaacctaggcagatataggcccattgttttttggggggccattaataaatccacagatgttgtcaggcttctaactcattcccaaaagcacctgaatgtgaattagctattacaaattattgagcacataactaattctcactgcttacaacaatcctgtaaagttggtattgttatactatttggctaacaagaaaactgcagctccaggtttcagtgactctaattagtaagtgtgagatgatgatctgaaatctatgctctctgacacaggttctgtgttctggcctctgactcccagagtctgattctctgagtctggagtatctgtatatctgttaaaatttttcagtgattttaataggcagctaagctaaggaatcactgctctagcaagctcttggtgacaggagttgtcttgtgaggcaactcagagctctgactgtgagaaaagtcacaatctgcctcctggagcttctactgattggccccaatcctatcctgcagggacacagaggtagcctgaaaagctttcaatgacagtccttcaggcacttatcttcaggggcatctgtttagggaatctgggggccccgttcctaagagtcatattctactagtctttagactccaagtctaaaatttctttactgggatacattttgctgagagaagataggaagacaaaatttagaaaatgagtcacactgagcaaggttgttgaatgaggagtgagcaaaaccaggagagcgtggtgtcccttgtgtacacctagactagatctgtacagttgccagcagagagctctgatggaggatatcagagacatgacctcagtagcttcaaaagccaagaaggaaaatgagaaattcctcacattggagttgggttataatatttcttttttcagtaaaatgtaatataaagagttttagctgtgtcttgattttcctgcattttcatttcccaaaataatgaaacaaaaatctttggaaataaagaaaaaaaaggtttggataaagaatagcccaggtgagtgacaaccagcctccagatagcacaggtaggtgttgtagaagctgtaagtgtagctggagcacatggaaaaagtgtgcttctagccggacaggccctgaagagacctctgggcctccctaggcaggtgctggtagagtcagattaaaggaaaaggcacagtccttctgcattccccagctcttcctcaccttatctctctcccacaggctttgcagtaactttactgggattagggaagacgtgtgcagtctcattcaagaagaaaagaaagtggggagcagaaacaatcagctgctaatttatgcgcagaggggtgctccagagctccttggggtctccagaaagttgtccactaacaaccctggagtctggggccgattcttccccactgtcacctgccaaggtcagactctatgctgtcctccaactgcttgggggaaaagctctgaaatgtatctttaggagacatttctgaggacagagcactttgtgaatgggggcattttcactcaccctctttcaaatccttgttggaaaaaataagggaaatatatacaaaaatcaaatgataggcactctggaatggtgaggctttattgcactagggagtttttaaatttaatgtctctgttaattctttccaggcctttgggcatctttattttaaccaacaccaccagaggtcaaaggggacagggcaagtggacatgaacttgggtgtaacttctctttgtttccaaagatccttgaaatgtgcatgtggcccctactgccatacctaagaccttccttgaacctaatcttcactaccagctcttcttttgcagatctaaatcagcatgtcactctgagctttgtgtagaatcatgtatgtacatgtgcaagccccaacagacagttggaaagctctgagaggaaaacttggatgtatgaaatacctactaaaaatcaggctttgtgctaaagattttaatacgcattcattcattccactgatacaaatagagcccataggctgggtatggtggcatgcacctgtagtcccagctactcagaaggctgaggcaggatgatcacttgagcccaggagttccaggctgcagtgaaccatgagtgcaccactgtactccagcctgggtgacagaccaagagcctatctctaaaaagaaaaaataaaggagaaattgagaattgagcccttagttaatatcacattagtgattaatgttaatgtagtgtatatcttttgggagacccagtcaacaaataaaaaaactgataaatatacatatgtaactaacctgcacaatgtgcacatgtaccctaaaacttaaagtataataaaaaaaacaaaaacaaaacaaaaaacaaacaaacaaaaaaaaactgataaatgaacaacaatgacaacaacaacaacaaaccaattatagcaataattaaatgttaagaagggtacgaatagagtgctgtgaaagagaataacagaaggatttattttagaaagaagatcaggaaaggtctatggatctcttttacattgagcccggtaatgtgatgagaaagccataaccatgctagtgactgggggaagcctgcagcccacagaatactacatgctccccacgttattctaggacatgttggtctccccttcaccactcactggcatgctttgcccattgaatacagaaaatgtttccatatctttctgttctttctcttttggatacagcagcatccccaataggtgaagtcatctgagttttcatgtgctggtggttctcagtgttctgggtactggactatgtcggaaatgaggttatcagtctacaaaaatgtgttccaaggcaactccagtttgatcagccattcacataaggctgaagataaacaaatcaagttctgctatgcttgaattttactgccagttttcctgtcttctatcttcctcttatttttatgtctctttggctaatttcttatatacctgtgtaaaataaaaataaagtcccttaggcccacaggcaagagggaatgggctctttgtggcaataagattccaaattataaatgggatctgaggccatgtcaggcaagggttaattcatgcaccacccccttccccctcacttaaagaataaactatgttctaactgccacagtttccatttttgttttttcctctaacagctaaggaagcactggtctcaagataaaaaatgttaaaacaattgcagctcactgacccctgacactgactagctcaccctcctgttccataagccataactcccattttgattggacaagagactgatttcagcaaccttctcctaattagagaccactggtgatgaactagttctggcccgtttatagaggttgtgaactgggagccttcgtgtccttcttttatcttttgacctatacaggctaattataatgcatttaaatgcgaagtctctaccccaaagtgagcatgggtcatatgtaacatacatgatcatttagtatgtgtgcattaggacccccttcctgaatattcatagctcctccaataacctgttgaatatgcatacttgaccaacctgttcagtataaattcctgtcccatccttctcccccttgaagggcttgcttgctttctctgttagaggctatgcttcccagcctatcaaaatgatcacctctcagggtgtaatcctcattaagaaataaagcttgctctctgaatttgtgaaaacctcgtgatttttgagttgacatctggttctctttacatggtgcacagacgacaggccaggggttttaggaggaggctgggaagtgaaacacatgttcctggtgggaagacaaaacaaatgagctgagggcagcaggggaaggtggctggatactgagcttcatctgggccagcacagagggctgacgatgaagagagctgtctgcgtcaggtggggacttcccacgtgcccaggcttatctgtgtgagtccctcctcatgtcttcttgtctcttgtcctttacatgacccatattcatcatttctttggttgttcacagtctaaaattgtcctccatgtacataccctccttatggtgtctggtgttttcgttaggaaaagagatataaatatgtagaggttaggaggaaatctctgagtcaggaagccctctgtcaactgaggtcagcgtggggagtttgatgttccactcccagagttgtggcaagtgcttttgttttagctggttttacttatattaactgaggcaaagtttacaccatgaggaaatgaaagttgggctgaagaagactttgcttcaattgcaggtggagtcattctctctttcgctgtggtgaggcgagcagggcccagaatagggaccactggctctgggctctgactgctgtttgaggttggccactcctatggcctagggtggtctgttcaccttctcccaggctccatttcctcatctgacacggggattaggccttccacactctagtgagggctcagtgaggtaatgcagcagaaagcgtttcgtaacgttaaaatgctaaacaaatggaagggtttgtctctccctagtatggaaaggtcaggaataagtgagtgtcaggcaaaacatgagaaagttgtgtagcatgcaagtatattgactctgctacctaaagtccgtgtgccaggctataaagactactgtaaggacatttgctgtgagaggttactttacctccaagtggcttattttctgcctctttatggattatcgttacctgggtgacaataaaaaaactcaagcttagggctcagtggccttcttgggaggcaggaggtggtaaaattcaaacccaggatgctcccttgtagagccactaaggtgtgcttggagagaatggtggagctggaggagaaaaatggctgaggaggatgtgaagacggactttggatgttaggggagaggagagtggtgaaggtccctcctgacagtcccagccctgcactgtccctctccatctgtgtcagtatctccacatgtctgtcagtcagttcacctctctgtctgccaaggattagactgtagctctaaccatggagtgaagcctttatcattcgtgcccactgagttagtcttgtcactcatgctctggtgtgcgtccaggctctgagactggacttatgccctgggtggcctccagttctttactggggccttagcactgctatgatgccagcctactcccttttccaggcctgggtgctttctctaaaccctagcttcagcttcagcctagtattagaggcgtaacatgggcttggggtcatagatacttgagtttgaatactgaccctatctcatactagctgggagattttaggcaagctgattaacctttctgagcctcagtattctcatcttcagagtgcgggtaataagtattttgaacaattatgagataatgttgataaagtatctaacagacccaacacagaatatgttgtttagaactggttgatattattaaggttattgcacagggggagaaactttgggaagaagcatgtttctctctgtctgacaggaggccagagactcctctagccaccggctctagcattttagataccaatcctcattttgtaatgatgctgtcagccctctaatttatactctgatctctattatggctattctgttctcttgcccctagaagtttctagagaagagcagatagttccacttttagatgtgcatttccaagaaaacatgtgaacattgatcaaagatttttcatatttattgaagaaaactttttttttaatgtctaaggaaaaagtggtcagatgctaacttgcactctttacttacccaggcttgcccttgatcaggttttgccctgagtccaccccgagcaggtgtgtcagcagttctgacactaacagaaatccagccctgcgggaaagctggcagttcatccctctaaactgaacatcacctcactctcttgaaatgccctcagaaacacggtaactggtacttagcttgatgcaagttagaggaataagatcctttgtttcaaacctcatcaagttctgcaagtcttggctgatgtttactattcagtaatttaaatacaccaggcttttcacaaatgcttattaagaggcttgttaggcttttaaatactgaatagcttgtataataggacatgacaaaggttgaattaaaaatgaatcaaaattatattttaaaactatattatctttcattcaacatttacagacatttactgaatccctaccatgtgctggatatggtgctgaggattaaaagcaataagactatttctgtccttgtgaagcttgccgtctattttaacaattagcagaggacataataggaagtgcaggagctgcaattataattttatggtcagagaaagtcttgctgagaatttgagagggaaccacatggcattctgggagaagaacattctaggcaaagagaataaagccctctttctggaacaatgtccagtttgttccagcaatggcaagggggccattgtggctgaactgggccaagcaaggggagagcagtggaagagctcagattgtggtggccagatggtgatgggactgggaggccattgcaaacattggcttctattatgagagaggtgggtttcaagaagggggaaaccatgatctggcttgcctgttaggctcaccgagactgctttgttggaaatagaccatgatggggttgctagggaaggtagaagcagggagacctgagataattgatgtgagagataaaggtagcttggattaatgtggcagaagtagtggtgtcagattctggatctattttgaaggtaaagtctatcaaatgtactgatggattagatgtagggaatgagagagagaggagccaaggatgtcttctagactttcatcttgagcaactaagttaccattaatggtgaagacatgagtgtaggtgaaataggcttggaggaaccagatatttaacttaacatgctaagctaaagatatatatatatatgacatctaagtggagatgctgagtagaaagctagagtggagtccagagtagaaatataaaaagttgtgagtttacaaaaggtatttagagccatggcactagataaggtcatccaaggagtgagtgtagaaagagaagagaagaggtagaagagatgaggagtaaaacagaggagagtgaaagagagtggccagtggggtaaaaaaaaaatcagaagatcatggcattctggaagcaaggcaagaaagtaattgatggatgaagaggggacagagtcaatggtgtcaaatgtttctgagatataaagaaaaggaggcctaggaattgatatttcgtttaacaagtagaggtttagtaaacatgattaaaacgattggtagagtggttagtaaactttattaaaacatgtgggcaaaagtctaattgaaatgaatttaagaaagaaggggaaagaaagaattggtgagagtgtaggcagaggcttgttaggcttttacagatgaggaccttactttaatgagaagcagaccttaaagggccttactgaaatgaaaagcagaaaaatgaggcagttcctctagggaagtgaaatcaagaaaagattcttgaaagactggagaattagcctgaggctgcctttaggctgatggtaaagtttccatagagaagaaaaatttaatcatacagtgttggagcactgtcttgggtgggcatgggctccagtgcaaagtgaaggggttgctctcccacacgtgtcctgacagttcatctatagtaagaggagggaaggtgaaatttataggcacagatgctggtaaatgggtaagtgtgacggtgggagcttgaaggagttctcttaaggttgcttctattttttttcagtaaaataagaattaaggtcattagctgagagtgaagatatgggaatagaaaccagagacgtaagaaataatgagatatgaatagaagaatattgcatttggtaatagactaggaaagtatattaataatatattttcccttaggcccacttgaggtttatggacatgaataaaaagtgagactccttccattgtcgtatgcttgtgtccagccataataaactgaagggtacaagcacagattaagtggagagttgaatttaactagggttgaggtttttctgaatgattgtaatgaagtataagaggggcaagagaattgagagtgcatgcaagggagggatacaaataattgggtatgcactttaagctgggtaagagagaaggaaaaataaggaggcaagggacaataaaagaatagtatgatcaatgagttgtggctctttgggccatcaatggtttttggtaatgtgtaagagcaaatgaactggagatacagaaagtggtggtcagaaaatgggatgcttcaaatttagattacaggtgttttgcaggtttggaggacaagcctggaggtatgaccctggaagtgagtggctgagataggaagatggacaatatcactagaggagagcggttttggaaatgaaaaggccagagttttggaagtctcatcttgcagacactgaagtcactacgaatttaaagaacttccctagtaaaaatattgaagacattagcttaggatgtaccatcagcttcctcaaatcaaatgttcatgggcacatttctctgtgggtgtatgaagtcacgaagtcagtgttagcatagacccttgtgaatgttcggtgcctctccgctgcatttccataagcaaactttatctcctctaggctatcagttacacagcagtcatctttttaatctgctttctttatccaactacaagctctttaaggacatggatgtactattagtcataggaaccttaaaggctggcacagtgctcaatagatatttgttacttacagtggttgagaacactgattctgaagtctgaaagacctaggttgtaattccagctgcctcttattagctaaatacttctggaaaagacacttatggccatttccttgtctgtaagatggggacattaccccctactacctcctgcacccctcacaggggtgtggtaaggaatccatgtgacaaggctttacatagaaggtgatcagtagagtcctggaacgtagaaaatgctttataaattttaaatactgaatcatgaaggcaataaaacttcatgcttgtgttatttccagggtgccagacttccacatcagccagtcctgtgctacagtccttcagagaaaaagggtgttaggaggaagctgactctccaagagtctccagtagtttggtaacatgcccagtgagagatgatgaaagaatgttattactagaaaagatttcatgagttctcttagccaaaggtgtgcacctctctgtgtgcacagcccaggaaatgcagtgtccctgtttccatagttacccaacgaactgaaaagtgttgctagttccagcctctatgttgtcaatgattacattattgtattacatgttgattaagctagagcacatagatatgataaatactcatttataagcacaaaaactactgtttcagaaaagtgcacttaaggaactgttcttaggctctttgttttcagggaagcaaggacagacagcagagcagggtgacgtggcctgaaatgcacgctgtctaatgcaatgcagcctttctctgctctctgttaagcccctcaaccttttgactgaccagaaaactgtgctgtggatcatcaatttcaccttctctctgtattctgtattttctctctaagctcagagcttgccgctctgagacactgggggctgagataatgagtctagactgctcatttgctctgccaggcagatgggagcacctgtcatgtgtgggcagactgcctctctagaggttgggcagtagtggtgtgtttggaccctctttctagttccaaatgccacaaggttacacaattaagggagagtttgaatcaaaacatcttatgtcaacctcaaagcaactgaaaagtggtttttcttgtagtttagtggaattatccctgaattggaaactttaatcagagcaattttctttcagtgggcctagaagtttttggaaacaatacaggcattttgattctctcgatttctttagatctctgcaggttcaaaccaatatcaaccaaattctctatttccttgaggcctgtgtgtttgtacgtgtgttttggggtggggggtggtggtgaggggggcagtggtggtgtttgactttcaagagttaatcttttaatgaaggaatcagattgaatctgaaacttctttctattctagaaccagttgtattgtcacctgttacttgctccaacctctgctgtacccacgtcttccagcgggaagaatcaatctcccttttgtacattcccagaggcctctaggtatcagaaaaacatctgaagtgtgagttagaagacctagattttatacccagagtagtcaccaacaaatgagtagccttggacaaatcacatcacctctcccggcttcagcttcctctgtagcagaataaagaacactgagctgcctcacaggagaggcaatgcagcagagtggttaagacttttgaccagcagtcagatgacctggttcaaagcccggattcaaaacttaagaactgaatgacttgagcctcagttttattacctgtaaaatggggataataatggtacatagtttgtaaggattgaggccttctgttgtgcagccctcttaggagttgaacaatgagccatcatctttaggtaggtttattctgctaatttttaacttgcttaacatcaatacaataaagacctcagaacactggcacgtaacactagaagtgttaattactgttgttattactaacagacattctagagtctcccagttttaaaattttcttttgttttaatatcatttgcttctataatccccacccctttgcagaagttctttgattgtcgtgactggtgttaatgatatctagtgggtagagcccagaggtgctgctagatgtcctacagtgcacaggccagccctgcttcccaccaacaaaaaattgtcctgtccttgaggattgctatgaaggagggatttgaaacctgctttgagtgtcttttggtgatatgttttcttttcctttgccaaattagtatttattggcagtgatgatgcttctggctcaataagtggtaatagaagaggatggtaagtcctgttttatatccttcactttccactgagaaagctcaacttcgaatcctttctcgcaaatcaatcaatatgtatatgtattttctagtcaagaagaatcaatgaaaaccagctccagacacctaaaagtgaaacttttcttggctgtatatccacttcctgcttgctttctcttatctctgtggtttgctgctgcttcacattctacccactgttgggacaggggatccctctgcttctgtacctactaaaattctgctcttcctttaaaatccatgtcacacatggttccttccatgatgtttttccaaaacatccaaaagtttcctttttactgctggctcccagagcctatgattttatgtttcatggtgtatctcatatcctgccctgtatcacaggtattgacatatttgtataatcctttctcctaaatgataagttcctggaagacagggattgcctcttattcacctttgaattatctttagaatttagccaatgtgttgcatacacattggtgaggttgattaggtgaggcttcaagcaacacttggtgaattacagtattgttcccatgactaaactccacccctacatgttcactgcagttgcccaggacgtccctaggcctgcattagaattcctgttttaatgttcctaggtattacctttgcaatgtctacactctgtcctctccttctctcctctctcctcttttttttgaaggttaattattttcactgatgaaatctgccatgatatacttcatttgtctgtcctcttctgttaacatgcaagctattttaggaatgcagtaaaaggtcgcagctgctattaataaattaagaagcagcctgaattcccctgtgggtcacatgcccatccatcttcacttatgtttgagaggtgtttcctatgagcccatgtgatttacttttttcctatcatactacccaccctacacactacaccagtcattgaggattttcatgttatttttgtcctggctttaattttacatttgatttatattctttccttacttctctcttctcataagaagcagaagacagggaaaaccctctgagctatgtaaatatctttttatgaattggatgaattggacctctagagatgagagcttcattactgaaggaaagatgaactgtctgtccctgtgatttgatcatagaaatgtgccattttataaagtcttaagtatttttttaaaagtagtaatagataaaccatttaatgttataatcacttgctattaaagaacagaagatatggacaattgcagtaagtcattataagtaatcatagctttatttttggtgctgatgaatggaattacatttggacctgcccacaagtacacaatgcccacacatacataagtagcagttgtgattcagttttacacactgtagcaatactattagatcgatgcacagatccgtaactttaggacctcgtagggaagagattcattacttcatgactttaaagagcttccaagctcagccccctgacatttcttttttcctacctctatctaacctcacttcctgctagggttataattttaaagatgatcctacgtttcatgtcctgaaaaatttcacagtctccattgtgtacagcttggggtccacaactcctcaatatcgcagaaaaagctcttacactccacccaaatttatctcttggctcctgtattcaatacacacttaagccacagcaaacttctttatcttctctgaaaatattgtggacccttctgtgccttggaccctctgagcaaaagcttcctatttcctggaaggctctgctcacccccgtctccttacctcctcttgacataaccccacttcctcctatgaagtgataaatgtgaaaaggactagcagagggcttgccgcagagcagtggctcagcaaatacatgttccgtgggtgaatagacaactgagcttgcaaattcaaagaaggatctttgtcttattaatgagttctcttctggatgtttataagtaagtttaacccagcatgactgatccatgtataatattgtttttatgtaaaaagagatacgtactccctctgcttaaaaactcatgggggcaagagaggaccatcctcacagtaattattcgcccccagccaaccacccactgtggactgtttgtctgtcagccttggccaaccagaaaccctgaggtaggggaagaaatagaagtttggacaggaaagccgatactcaagagtggggctttagggggcagagtcctggatggtagaggtttgatgggagaggtgggttgtattagtttactaggtctgccaggctaaacagcagaaattaattgttttgaacattccagaggctggaaatccaagatcaaggtgtcagcaggattggtttcttctaaagcctcttttttttggctgtaaattgaggccaccttctcactgtgtcctcatatggtgtcttagtctgttttgtgctgctacaacaaaatgcctgagtagtttataagaaatgaaaatgtgatttctcacggttgtagaggctgggaagtctaagatcaaggcatcagcatttggcgtcttgggagggccttcttggtgtgtcctcacaaggtggaaggtagaagggaaagtgagctaaatgatgtgtgaagccttttttatgagggtcataacccctttcatgaggaaggaatccttatagcctacttacttcttaaaggccttgacttcctaggccttgactatcacattggccccatctaaactttggaggggacacattcaaacaatagcacatggtcttctctgtgtgtctgtgtcttaatttcctctttttataaggataccaatcagattggaataggcctatcctaataacctcattttaacttagttacttctttcgtgactctaagtacacttgaccccccatgtccatggattaaaaatgtttgaaaaaaataaaataaatataacaataaaaacaatacaaatcaaaaagaatacaatgaaaaaccatttatgtagcatttacattgtattaagtattataagtaatctagtggtgatttaaaatatctgggaaaacttgtgtaggttatgtgcaaatactacatcattttatgtaaggaacttgaacatctgaagagtttcgtatctgtagggggtcctgggacaaatccctgctcaatcacattctaaggtactgcaagttaggactttgttgtatgaactttggatggggggatacaattaagttgttaacagggtggtaattgggacagcaatggctgctcacaggaaacgctggagagcaggagctattccttgccttggcatttttcacagtgccttgttcatggtgggcatttaacagatctttttggaattaaatgacagactctacttagaagtgaaataagattttcaacatgcaagctttccctcttggcctttatttcatatgcgagttttatcagcattttgttgacatactgatttaaataattttagaaaacaccacgcagaatcaaggatcgaggcctttcattgtacacccttcctctggattggcaatagctacaatttttggtaggtttatttcattaattttaaattcaactaactatattaccatgcaggtcacatgcctctacaaagatgttttgttatgtgtttattttaccaagtgtattcatggattttttacatgcttatcactaaactgatccctaaaaaatgatttgaggtggcccttaaaatttagacacagtatttctattgcattgtcttcatctatctctttcatgaccctcttgcaaatgtaagtagtgttgatctgctgatcttacttgttctcagtgaaccatgctggtgtctagtaaatgtcatgctcttaagtgttcacaaaccatgttttaagtaaccttttcagaacatttacacctacttccctggtctgctgctctccaatgacacacacacatctacattgaatagacaagtagagctaaagtgtagaggcctccaaagttgcctcatgtgaccagtaaagccacatcatacatacttatcagcattagctggaggcgtaatagaaaggcttaacggggatgctattcttggacaaccccacttggcaggatttgtgctgatgaaaagttgctaggaatagttctgagatttgagactggtcacttgtatggtcttagtatcaccatttattattctcctggcattatattacatatttatttgttcacacattcgtgagtatctcattctggaagataaactgtacgaggatagaaactttgcctgtcttgtgtgctgctctattgccaaccatcagagcagttcctgatattaagcaggtgacagattctctgaggataaacttgctcatatgtcagattataataccaatatttgttatgcctaatctcaaagtcattgaaaacaactaaagaggcataaaggcaatttgtatagtgcaaagtagcttgtaaagataaattaagcagttataaatatatgtggttttgaaacactataaagaaacactatgtaataaaatgttacgtaaggacttcagacttgatggagtaaaaacctttaaaaaaaacagtttatttgctgggttgccagctcagtatttttaaaaagtttatcattttttaaacaatgttgaatttgtttagagaaatctaaaagaaaacaaaattatatttgaaagcaaaaattgttgaaattacagatagcacatgaacctctcttctcttgttaataaactcttttaaaagtgtgacttctctctcaaatgaatcctgtctatgagaaatgtcctctggtggaaccttaaaggttgatcagaattcctagaagctctttgtttaaataatcacatgaaaagattcctcttaaacttgtctgtcagcaaacaaatgccacaaagcagaatgaattttacaccttttgggagtccattaatttactttcagtggcatcaagtaataaaaactcttatagcaaggtcacagttccattttatatcaaacaactatcctttctcatgtatgatacatgaagcacatttcttgctcagggcaaaatgttttattaaaattatttcctttgttcttttgtatagatcgtcctttgtgacaagaaaaattatcttcacaatatatctctttaggacttcactgtatgattataattatgtcaatagaacttcatctaatgctacttttttattttctttaagaaggatgccattatttacgtgaaaatgaaatttttcccttcctccctccttctctcccttcctttcttccttcttcccattcttccttccttcgtctctcctttcttttaactgtgggagatttataaaaagagatgtagaaaaaaatgaatctttcagatacagggatgcctttcttaatcctctgggtacaaagaatgactgataattatagattttacagagcaaacaagccaatcttcataatctcctccttacaccatcacaagtatattctctagccaaaattgatgaaaagaaaaaaaagtatataatagtgtagcaaagaggagtgcatgcccaggttgtttgactttagaatcatcccctctgtcattcagacttagatttttatagcctttcacccagattactgtaaaagcctctcaattgttctccctcttatctctgctttctccaacctatctttccctctgttgactgagaaatgtttctaaaattccaatctaatcatgtcatttgttctctacttttattaaaattttaatcttgaccctcctcctccattgtggacatttacaatttacagggctagctgcagtgagttcctgcaggtcccagtgtaccacatgaaacttctctgaatgaggatgagcattcctgttctccctaaccatcaggaggtaaaagtgctatgtaaacggaaaaatgccaagtctaaagacattaaaaagaacagtaacccttgaacaccccgactctttcttttccctcccctctagatggttagaaggactagtttttcttcttttgtgaggtcttgtatgtttcattgccataactctttcaaacttgtgccacagtctctagattagtcttcttgccaccagtgtttcagctacagtacttctttcacatcagtttaacacccttaaaacactcctttgcaccatgctaagatagcttcagaagcttccagatgcctatagggaaagcccagatgaatgagttttatattcattttgaaagttctgtgctaatagtaaagtgttatacaaaatgaggtaatactgttgtcttttaatgcattggtatcattttggtatcagctaggtccctagagagcagctatgtaaagttcaatctttctagtagtacaaatgacttaaggaatgaaaacataatctgtcttcaatttgtactttgctaagcctaccctgagactcaagggattttgtaagtcagaaagaaatcatttggagatgagattaggaatatctttgctgtttcataaggtggcagtttaagagttaaaagagaaaccgacatcatgtagaaaacattatgggaatttttcttggaggcaagtgtgatgtcatggttaagagcatgggatatgaatttacagttcttcagttcaaacttggaacacttttatattctgggtaacatatcttattactacagtgactctcaaagaatcatgcctattgtatgtatacccttgttgagctctctccacattaaccctaggtttgggacattggtaatgtgactcaagcagaggcttaaagagtgcttattcactgaggcttgccctttcttactccttcctgggaacccatttggcaacaagtgaagaaacctaggccagcctccttgaagatgagggaccaacggagagagaggctctgctgtcctagccctcccacagaataagtaagcctagccaacaccacgtggagcagagatgaaccatctcagttgagcccagcccaaattgctgaccaaaagaattgggaacaaataaataattattgttttaagctactgtgtttctgggtggttttgtatataatagtagctacctgatacattggatgacccaattactgaacttctcttaggcctgttttatcacgtgcaaatggggataattttagtaatttggggttgctgtgaagacagtgagataatccatttagagatcttagcataagtaatgaataaatattagttataattatattttatatcaggaattattataattaaaaatcattaaattagtagtgaaatagtgtaattttttcatatttgttatttcatactcacacttcctctgtgagatattattatccacaatttatatttgaacaagtggaaattaaatgatatccttgacaagcaaatgttttctaagcctgggctctttgcaccatgtaatagatgatacaagctcttgtcctttttataccacagaaaaggtataagaccataatggtgtgaattttgtatatagtcttcatccttggtcatattttataacccaaaatgatctgtatcattgtttacatcatatttatcttgcattttatgtgtctctaagctacctcaaatcgtttttcaaaacttttttgaggcattagaaaaagactataaaatttatataaatattgcccaagtaatgacatggctccttgaatagtttttgatgttggataaagctgagtaaatgagaacttgtgaagagaaattgcaaagaaaacagtttagcaaagggtattctacttttaggattatctttgagaataaaaatttatttctgtggctatgcgataatttcaatactttagcatataaacacctgtgcttataattgtgaaaacaatatttattcacatctagagttagtacctatggaatattctgtgtggccttagtcataccatttctgagatgaatatcatagcagattgtttaatttctagttaaatttcaatgccatctattgtctccttgattcatctaatttctctgagcttttgtttcctcatctgtaaaatgggataataacagccaccttatcctgttgtgaggactatagatctagtagtgtgtattgtccctgtaagaatgcttggactataagaggcattcaatgaattaaagacatgtagagcagagcttctcacacttcaatgtgtgtatgactcttctggagaatcttgttaaaagtctgattctgattcagtagatttggggcgggatccaagattctgcatttccggcaagcttccaagtaattctaatgctgctggtgcatggaccacactttgagtagcaagcataatgatcaggggttggtaaactgtagcccatgggtcaaattcagccaactgcctggctttgcaaaaaagttttactggaacacagccaggatcatttgtttatctactgtctatatctgtgcactacagtggcagagtagagtgaccgcaagagagactgtatagctcacaaagctgtttagtgtctgtctctttattaaaaaaaatgtttattgcagcactattcacaatagcaaagacttagaaccaaccaagatgcccatcaatgtagactagataaagaaaatgtggcacatgtacaccatgaaatactatgcagccataaaaaaggaagagttcatgtcctttgcaggaacatggataaagctggaaaccatcatgctcaacaaactaacacaggaacagaaaaccagacactgcatgttctcactcataagtgggtgctgaacaatgagaacacatggacacagggaggggaacatcacacactggggcctgtcggagggtggggggctaggggagggacagcattaggagaaatacctaatgtagatgacgggttgatgggtgcagcaaaccaccatgacacgtgtatacctatgtaacaaatctgcacgttctgcgcatgtatcccagaacttaaaatataataataatatatatatatgtatgtgtatatataaaaaacactgaaggtttgtaacatcatgaaggggcaatataatgctgctagagggacatagaaggatctgtctgaagaatcaggttattttattggatcccactagatcaccatgtaggaagaaaatgctgggaataactgtcagtgtcaggccctgtgtatatgaagcaataggacctggtgacaagtgtgcaggatttgaagtcttgaccctgccctttaccagctctgtgaccctgagcaagtcattttaacctctccgagtcttagtttgctcaactgtaaaataacattcaccaaaccaactcttggattcccttggaagattagtgattatgtatgaaagatatttaacatataacctgccacagagtagataataaaataactgttaccagggcatgggctaagcaaagagggtcttgtcagctctgagagacatggctggaatttctaagttattgtgatgctcagggtcaagtgggtagttgtttcctggttccaggtggtccttcttgggaaggggccccagtgagaactcagtcccagccaagtgggttgggcttcatggcagagttctagtcctgatggtaatatctcagaatctgagacaaaagccttatcacacagatagggaatattcgtaataataaaaataatgactattttcagttgaatgcctaccattgtctggtgctgtaattggtattttgcatacgttttcttatttaatatcctctgcaaactctgcaatgtaaatactaagagatgagacaactgttgctcaataaaattaagtaattaatcaaagggcaatcaagtaataagtagcagaaatggattcagatacaggactgtgtgattcaaaatttatgctccttttgcttggctatgaggctctcatgctgcaggatagaaggaatggctgacgcttgatatagagactagcactcagggctcatcttaggcctattgggaagtcagcctattgtgaaaactccaacttcaacaccattttccatttgctgatggaaagtggtctcttaaaaacaaagccaggatgtctgtgattaggtgggaaactgtgtggggcttagactgcagattggataataataataataatagtaatgataatgatcatagcaaaagctaccatttataaggaactataatgggccatgtgctacacacactatctcatttaattaacataactttcatatgaaataggagttattcattttattttaagagatgttaagtagcttgctcatgaagcccatgtggcttgcattatatatcagaggctgcacagaagccaagctgtacagtgcagaaattgaccaaatctggggccatgtcttggctttgatgttagctgagtgaacttgagataatcatgtacccttctaagtttttatttctttatctgtaaacagaggtaattgtaccagaaaatatatcatggatattctaacaccaacattttaagattctatgaaattgacatcaaagttgactaatatcactatctggagaaaattgaacttttaaaattatggttttaaagaacttgttgaaggctttaactctccagcttcacaatattaatacaaaagtttaaatatgaggggcttctatgtctaagtgtggatttgttcttcacaaatgttttgtctggctggaaacctgaggatgcagaacattctggcttgaaatcaaattgcataatataatgcttctgtgattttcacctggcagttgtcatatcggatctggcctccattctggagacatgcatagaattccatagtgactgcttcatgcatgagctgactttgctatttgaaatgttgaaaatatccttagccgattgctttgcgaaagctcctttagccagagtagaggccagaaggaaatgtgcatcttctgagagcccgttcactttactattggctttctgttgaggcccaagctcaggcatttgcctgaagagataacctggtattcttaataatctgatggggtgggagctgtctctcaagtatgtcattcatgttcactcagcactgtgcatgccagacttaatgagattatcctaattcaggaagataacattctgagcattctgtaggcttttgatgtaataatctgagcagtccttcatgtgtattattattttgagcatcatttactgagtaatatattatagtcatgatatggtactagctagaggagtctggatgaagtaaagaaagcagaaggcatggccctctgggctttctgttcattggctggcatgcattctgtctagattggaaggcaaccatccccacattaattaatcagaaaaaattcatcttttatagtgacacaggagagtgtgacacagatatcttagttcagaggaaagaaaaagtaaaggaagagagggatcagtgcaggggtaagaaaaagcttcttggagtaattagtaccatgagctttcctgacagcgtaaaatgtgggtgctagagaaaagggaggaagtactactaagaagagataaccttatcttgattaaataatgaagattcatttaactttcatgaacagatggttttgacttcaatttctcaatgatgaaaacactagcagcttactggacttgttattatgagggatacctgtttcttaaagtgcatactttggaagtttgacaactggtatgaaaaaaatggcattattttgacaagatcttaagtttcagagccaatgatggctgtctcttccctctcatcatctatgtctttgtcatcacttcctttccttatttctcttccctggactcattccatgcatttaagctggatgggattctaaagtgccaataccaagacagaagtaatggcaaaataggactggatcaaagtcagatacttgagggagtaagtgccatggttaaaagatggtttgtccccatgaaaacttgtgttgacacttgattcccaatgtggcagtgttgggaggtggttcatttaagaagcaattaggtcattaggatgcattgctttctttgtgtgggattgagttagtttttgtggcactggattagttaccatgaaagtgggttattataaagtgaggctgcctcttgtgtttgttctcttttgaacatgctccttccatgtgatgccatctgccatgttatgacacagcatgaggccctcaccagatgtagcctccaggtcttgaacttcccagcctctagaaccatcagccaaataaacttcttttcattataagttatccagtttcaggtattctgttatagcaatagaaaacaggctaagacagtgtggtacaaaacactcattatagagcaaaaccataactgattacagaccacagacatgaggatagcttttatccattgatggtaagcttgctatgtaacatcacctcattttgaaagggtctcgtttgaggtaggtgtaactatccttattttacaggtgaaaacccaagatttagagagatggcatagcttgaacaaggtcacataggtttagaggtggagtttgttcccaggtcagtccagcttcaaaggctgagccttatgctgagagcaagagctctcaactccaggctggagtgactaagaatcagcaatgaaagagaaccttgagatatctttcaaagaattcaaaacaattaggagagaacaccagcagcctgaagaaatgaactcagagctatcctgtgtggtgcaggacctcttttgtggggatcgtagcagcagggaaaacatatgggttctggagtcagattgaggtttaatattgcctctgctacttactagctgtgtagatttagacaacctgggaaccctatttccctcattttgcaggaatgtaataacaactgaggtactgagagacagagagcatctagcaggcaagtggcggagggccagcatagtaggtgctcaatcaataaaaaccctgaaggtcacaccctgcatttgggtttgactgagtgaattttttctttttttaacttcagctgctcctacttgtctcctttaccacccccctaccccgccccaacaaacacatgttttaatcgtggtaatatgtgctgtttaaacttcacaggtgagacttaggatataggtcaaaatgagtacagcattcctttatttatttatttttttgagacagagtctcgttttgttgataagactgtagggcagtggcgcgatctcggctcactgcaacctccatctcccggttcaagcgattctcctgcctcagcctcctgagtagctgggattacaggcacccaccgccacacccggctaatttttgtattttcagtagagacggggtttcaccttgttgtccagactggtctcaaactcctgacctcgggtgatctgcctgcctcagcctcccaaagttctgggattatgaacgtgagccaccgcacccagcctgagcacagcatttctttagctggttgcaagaacaccctgttacctttgctattacactgattaacacatttctgacatatgctataatatcattattcaagaagaattctcaggtgataatttctactttataggaatatcatttgaattcagtgtttgttagcatgaatgcctgctagctagtgaaagaaagcttgcctgttcctggagaatcgttttgggacttatttgggaattatttcagttgtcagaaataattctatttgcatttactagactgtgaagatatctcagaagaaattaaatatacattttcatttacattaatgtaatataattgaggtcccactcagtacttcctaggtcatattgataggtaagcctgttttctatcatgtttacgtcttaattacatgtctggttatgagacaattgttgccactttcaaaaaggaaataatatttccttttactaaaggagaaaaggccttttgtgggcctcctttatggagaatacatgagtcccacttggtttcattgctgttccatccccggtaaaagaaggctgatagttactgtgatacagatctcttgttttccctgtgataaaagtaaattctgatgagaggttgtgaattcaggaagtctgggaagctcctacttttatatgaataactttcatgcatcaggctttggggaaatcctcagaagaccaatttgtctgcttagaagtgtggcaggtagggccttctctgctggtgctgcccagagcccaggacctgggcgttcctggcctctgaaaacctcactcttcagaccagtaaaccacagcactgtcgccctttctacagggctaactctttccttgcattttctctccgttttgttttgtcgtttttggagaatattctttagaaaagattgggaaagctcaaaggcaaatcaaccaaggggggatctttactgtccttgtgggtgtttaattcttaccagttaccctaaaagctttctcttttcatttctcagcactccatctgggctacagctgtgatgttttatttccaattcctttatctacttcttataggtagaacccagagatcattctacatcagctttttgtcactaaatttttcacctgtgatttgaaactgccttatactactttaaatctgaatttgggtaaactcttactaacacataatacaataattatcttacatttttgagagaattaaaattaatactgaagtaccattcctagtttgtgcaagattttcttttcttggacatggaaaggtgtatttaaatgtaattcatttcactaagtcccagagaaatagagatagagagagagagagagagagagagagagagagagagagagagagagagggagagctaatatttactgaactttacactaagcatgttatataccttatttgatctcatttaattctcatgactgctctctgaggtagaaaccactaaccttatttgatctcatttaattctcatgactgctctctgaggtagaaaccactataatctccatgttacaaatgagaaaactgaggcttagacagcctgagataacacagcaaataagcagaggagccaaaacttgaacctattcaggctgaccgtagagcttactcccttaaacaagtatgtgataccatttttcaataagaacaatacagctccaccttacgttttgctagtcaaaatgtcttcacctcaaaatgtcctcgcctcttgtgttttccttaccaaaaactctctacacttaaaaaacaaaaaccaaaagcaaacacataaaaatcccatcttttttaaaaaaagtctaagtattggaatataattcaaggctatgcctcaagagataacatgtatgtaaaagttctttgaaaagtataaattgtcagttttgaccaatttttgttgtggttttcgatctcattcatttttgccattaattttattattttcttcctcatttctttgggtttgctctatttatcctttgagttgaatgttcagctcaaatttttggtcatctttgttttgtgataaatgtattcaaagctgtaaattttcctgtaaatattattttatctatgtccctcatatgttgacatgagatgcttttactacccttcagtttaaagtatttataaatatgcataaatgaaaccaaaatctccttcgttgaaaagacaaacaagaagaatcaacgtatggcaaggctaatttttaaaaataaatgaaaatacataaaacccagaatgaaataagggaaatagtcacagatataaaataagtttataatataataagaataatcatgtaaaacactgcatgccaataagtttgaataaaatggacaaatttctggaactgtgaaaagtgctaaaattggtgcaagaagagacttagctagatctataacctaaagcttctaggttcagcccattacacagatgatctgactcaaacttgcaagaaatggtagttttcatcttatgaaagagttttcagaaagtagtaaaaaaagggaagattttctaactcatttcatgaggccagtgtaatactgagatgagggacacataaactcagcacacatatgaaaattataggccaatttcaatgatggttattggtgcagatgttgcaagtaaaatctcagctagccaaattttacagtatattttatgaaaattataattaagcatgattcaatcttaaaaacataaagacaatttgatattaataatatattaatgtaattcaattcattaatagagaaaaaattatttaattatatcaattgttactttagttaaagaatatcaaaaacacttgatgaagatttatggtttctaaaaatttcctggagggccaggccttgtttaactctatagaagctacatatcaaaaggctagagcaaacatcgtacttaatggagatactttaaggtcagacacaaaacaaggatggccacaatctttactactatttggtacagtacatagtatcctttctatgctataagaaaataaataaagaataagaattagaagggaagagacagaattgttattatttgaaaatgacataattatttacatcaaacataaaaaagaattcatgaataaactataaaaactaatatgaatgtttagcaagtttaaattaacttagtatttttatattagcaaaaatcagatagaaaatatgatattatccaaaggctatgaatataaactatctacatagaaattaccttaacaaagaatccataggaccattatggagaaagtataagatcctactaaagaatataaaagatacctgaataaatgaagtgatagcattagtatatggataagatgatgttgtaaaggtgttaataattcttaaattaatatatcaattaatttatggatataaatttaattaaaataccagcaaaaattttagggtaatcttaataagttgacttaaaacagtatatagaggactgggagcagtggctcacgcctgtaatctcagcactttgggaggccgaggcaggtggatcacctggggtcaggagtttgagaccagcctgaccaacatggtgaaacctcgtcactattaaatacaaaaaaaatggccaggcgtggtggcacatgcttgtaatcccagcaacacgggaggctgtggcaggagaatcacttgaacccaggaggaagaggttgcagtcagctgagattgcaccattgcactccagcctgggcgacaagagcaaaactcttgtctcaaaaaaaaaaaaaagtatatagagaactagaggtccagaaatagctaagaaagaaaaaaaaaggagcaaagaggggaaattaccttacaatattaaatacgtaacattattaaattaattaaatttaaacattaaaacatattacagtatcatagatgtgtgttaaaaatagcttcacaaatcactggagaaaaaaatacatgattttttttttaatacttcaagttctggggtacatgtgcagaacgtgcaggttttttacataggtatacacatgccatgatggtttgctgcacccatcaacctgtcacctacattaggtatttctcctaatgctatccctcccctagccacccaacctcgacaggtcccagtgtgcaatgatcccctccctgtgtccatgtgttctcattgttcaactcccactttttgatggggttgtttgtttttttcatgtaaattcgtttaagttccttgtagattctggataatagctctttgtcagatagatagatagataaaaattttctcccattctgcaggttacctgttcactctgacgacagtttcttttgctgtgcagaagttctttagtttatttagatcccatttgtcaattttggattttgttgccattgcttttggtgttttagtcatgaagtctttgcccatgcctatgtcctgaatggtattgtctaggttttcttctagggtttttatggtttaaggtctgatgtttaagtctttaatccatcttgagttaacttttgtataaggtgtaaggaagggatccagtttcagctttctgcatatggctagccagttttcccaacactgtttattaaatagggaattctttccccattgcttgtttttctcaggtttgtcaaagatcagatggttgtagatgtgtggcattatttctgaggcctctgttcttttccattgttctatttatctgttttggtaccagtaccatgctgttttggttactgtagccttgtagtatagtttgaagtcaggtagcttgatgcctccagctttgttctttttgcttaggattgtcttggctatatgggctattttttggttccatatgaactttaaagcagtttttttctaattctgtgaagaaagtcaatggtagctcgatggggatagcattgaatctataaattcctttgggcagtatggccattttaactatattgattcttcctatccatgaacatggaatgtttttccatttgtttgtgtcctctcttatttccttgagcagtgctttgtagttgtccttgaagaggtccttcacatcccttgtaagttgtatttctaggtattttattctctttgtggcaattgtgaatgggagttcactcatgatttggctctctgtttggtgaataggaatgcttgtgatttttgcacattgattttgtatcctgagacgttgatttttatcctgagatgttgctgaagttgcttatcagcttaaggagattttgggatgagacgatggggttttccaaatatacaatcatgtcatcttcaaacagagaccatttgacttcctctcttcctatttgaatgccctttgtttctttctcttgcctgattgccctgccagaacttccaatactatgttgaataggagtggtgagagagggcatcgttgtcttgatctgtttttcaaagggaatgcttccagctcttgcccattcaatatgatattggctgtgggtttttcataaatagctcttataattttgagatacgttccatcaatacctagtttattgagagtttttagcatgaagcggtgttaaattttatcaaaggccttttctgcatctattgagataatcgtgtggtttttgccattggttctgtttatgtgatggattacgtatattgatatgcctatgttgaatcagccttgcatcctatggatgaaagcaacgtgatcacggtggatattctttttgatgtgctgctggattcggtttgccagtattttattgaggattttcgcatcaatgttcatcagggatattggcctgaaatttttttttgttgttgtgtctctgccaggttttggtatcaggatgatgctggcctcatgaaatgagtgagggagaagtccctgtagttcagaaggagtacccagattcataaagcaagatcttagacacctacaaaaagacgtagactcccacataataatagtaggagactttaacaccccactgtcaatattagacagatcatcgagacagaaaattaacaaggatattgaagacttaaactcaggatcaagcggacctaatagacatctacagaactctccaccccaaagtaacagaatatacatttttctcagcaccacatcacacttattctaaaattgaccacataattgggagcaaaacactcctcagcaaatgcaaaagaatggaaatcataacaaacagtctctcagaccacagtgcaatcaaattagaactcaggattaagaaactcactcaaaaccatacaactacatggaaactgaacaagctactcctgaatgactactgggtaaataatgaaattaaggcagaaataaataagttctttgaaaccaatgagaacaaagacacaatgtacaagaatccctggtacacagctaaagcagcatttagagggaaatttatagcgctaaatgcccacaggagaaagcgggaaagatctaagatcaataccctaacatcacaattaaaataactagagaaacaagagcaaagaaatttaaaagctagcagaagacaagaaataactaagctcagagcagaactgaaggagaaaaaagtcaatgaatccaggagctgttttttttaaatgattaacaaaatagactgctagccagactaatgaagaaaagagagaagagtcagatagatacaaataaaaaatgataaaggggatatcatcactgatcccacagaaatacaaactaccatcagagaatactataaacacctctactcaaataaactagaaaatctagaagaaatggatacattcttggacacatacaccctcccaagactaaaccaggaacagtcaaatccctgaatagactaataacaaattctaaaattgaggcagtaattaatagcctaccaaccaaaaaaaaaagcccaggactagacaggttcacagccgaattctaccaaagaggaaaaaaaattctatagatgatgttgggagaactgttgcagtatatggaaaaaaataaagctggatccctacctcacataatatgcaaaaagcttctaattgaaataacttctaaacaagaatagtaaaaatatgaaaagaatagaaggtgatgtttatgagtatctctagtttttatgtggagaagaatttattgaacaagactaaaagagcttaaaacataaagagcaaagatgatgaactgatttacatccaaacaaaaattatattcaatgaaagagaacacaggaaaaattatcagaagatgaaaaactaagacaagttacttacaaaatgtaaagcagataaaggaaactaacatctaaatcatatagggaattacaaatctgtaagaaatggcaggaaacctaggaaaaatgggcaataccatgattaggcaatttagagaatgagctacctatgtctatgatgaataatgacattaagatataagcaacatcacacttattagagaagtgcaaattcaaaaaacaatgaaataccactccacatccatcaaataacatatattagcacaccaaataatgccatgctttgccaaggacatggggaattggaaaatgaggcagcaaactataagtgacattaaatatgcaaatcctggtgcctagatatgtctataaaccaaaaaatctttaacagacttatatggagttgatgtttatttgttacggcagcaaggaaagaaagcaaattgaatgtccagctaggctaacagataagtaaaatgcaatctatgcattccatggaatacaagttaggtttacataaaaacagaatggttcactcaagaagtgttaagagaacaaagaaatgacttattttttatgtttttgttttgttttgttttgtttttaagagacagactctgactctgtagttcagactggggtaaagtggcatgatcatagctcacagcgtgctgccttgaactcctgggctcaagtaatcttccccctcaggctcacaagtagttggcactacaggtgcatgctgccacatttggctaatgttttaatttttttgtagagatagggtcttgctatgttgcccaggatggtcttgaactactggcctcaggtgatcctcttgcctcagtttcccaaagtgttgggattacatgcgtgagccattgtgcctggtaaaacaacttatttatgacataatatttttgtgtatatcatatatgggaacatatatttcaagaatacatagagctctgaatgaatgtgtgaaagtagaatattaaattctttagtgtagatacctatggtgcaaagaataagagtgttggtaaggaacaaagggaaaaatagggctctgcatgcacttgatgagagtgtgtcatgagctaagaaatgtgattaattcagtgttgtgcacttgaagtcagaagaaaaaagaaaagacaatatgtactgtataaatgaaattaattatttatatataattatatcaaaacattactgatattctcatgtttgaaagtaataaccatctgtaatcatttgacttaaaatgagacctttatttttcatgaattgttagcaaatatttgttctacgattatatgtcctactatattttagtatgtccagaatcgtgtccacgttgctcttttctatatcccagcaacctaaaacattactgctggaccatgatggattttcagtaaaggtttgatgaataaataaataaaactgccttggttatccaaaaatcatgaagggaagcctacttaactattattaagtacttaatgtgctataggtaaataacatgtattctcatttaatcaacaaaacactatggggtagcctttctcatttgcattttatagatgataaaacttgggttcagataatttaaataacttttttaagcttataagtggtggacttaggattttaactcaggttattatgattctagtgcactctgttaaggctctggaaacaggcgagtaatcacaagacattgctaaattctagtagaaagcaactaaactctttttctcatttattttcgtctgcaaattttgtccatagtgtatgtctagaattaaaaagagaaatatggaaaaaagcacacaggtaatgaacttcatctgtctaataggaattttctccctttattttattatttatttgtttgtttttttaatttggaaggagaactttgtgtcttataaagggttgcagcctgtgcagtggtctttctgacaggctaggaagcatatttatccttacaactggcattagcagacgtgcaaaccagagaggtccagcagcaggcaagctgagacttaagttagaactggatagattataaattgatgtagcagaatcaacatataaacatacttcatagctgtcttttttattgcatctattttcaattacagtatagctataagatcatacttatttttcttaaagcttcttagcatttatccaacaatactatatatggagaagttgattcaagagatcaattatgtggctgtataatgaagtttactattgaaaatgcttttttaataaagacgatttatctgtagagctggcatagattttattgaagtcatttttctccttattgagtggaggataaatgttctttaatgaattctgtcaccaggaacagaccaagttcattaacagcacgacacactattaacttactatccagagctgtggcttgggagattgatgccagagaatgcttccatcaccctgtcttctgtagtcctaactaattctcagacctgctggtcggaaaggattgtttcagcctcgcttacaatagcaggttcttacttctttacagtgagtgtcatgctttccctggactacaacatcaacatctctggccccacagctgtttcccttttatcttcctataagtcagagaaacagatgccctttgtccctgagaggttcagtctgttcttttctggctggcatagctaaattatactaagtttgggccaaaatgaagctggcagttaaaccaagcttataatgtagaggaaacaaattaatgtgctgatgattcatcaaaacctttgtcatggaggttgagccattgtcagatatttgcctgtttccagagtccttaagagtccactgcccagcacagattgaaatgaaccttgggctctcccctacagctgtttgatttctctgtgatcttcaaactatctctccaggactatcatctaggcagggacacagatagcctcaggaaataaatgttctcaggcccacttctctggacactgtcaccttttttgttccaagctacattttcttgtgttcagatgagacgtttctcttgataaccatggatgcaggtaactgtatgcagatggatgtgagacgcgagggtctgccttacttctaagcggaaaaaaatatgtgccctcattatgtgattccaggaggaccacaaaaaactcctgtcccccttcaagcagcactagacattctatcagatttgttaaatgcctaatactttttattccattaaaaggtaataggcacatgaggctttttggacacatatgtttcgcagaccctttcatgctgtgcctcacccatatgctctccctccccacctcagtcagagtacagcctccaactgcctgctgtgagcactggtctgtcttgcctgagggctttctcaggcccccagaaccggctctgtggctgggttggcagaacggaagtgccactaacactgatccaggagcaccctaaccagtgaatgaatagatacctccactctctttgagccattctcctacactggctcccagggctgccctggtgggattgcacatcagtggcccatagaggtagctagcttgatattttccccttcattgactgcctttccttcctggactgaatttgcatcccccttacagatgtttatttcccctgccaaagaaatgaatggcactggaatcattgtctcaggagtttgctttcagaggattctaagtacaaaaggcaaggagagaaaacataagaatcttggatcttaggctgggtgcggtggctcatacttgtaatcctagcactttgggaggccgaggcgggcagattgcctgaggttgggagttcgagaccaacctgaccaacatggagaaaccccgtctctactaaaaatacaaacttagctgggcatagtgatgcatgcctgtaatcccagctactcaggaggctgaggcaggagaatcgcttgaacccgggtggcagaggttgttgtgagccgagattgcgccattgcactccagtctgggcaacaagagcaaaactcatctcaaaaaaaaaaaaaaaaaaaaaaatcttggatcttaaacaagggaggggaactaccattagaaaaagaaggcaacgttttaaaaaacaagtacctatgtcttaggtgctaaggaccttgaaaggcattttcatatacatgtcttcatttaactcaatttaatctaatctagttcggtttggtacattcttatccctattttataggtgggtaaactaaagctctacaaaatgaacttgtctaaattcatgtagcttgtaagggatgtagagctttggttcatactgagattgtgtgactccaagttcgctatttcttctgtaacaccatgtttgcctgctactctgcctcacaattttgggtagtgcgaaaataaaagcatgggtctatggcagaaactgatgcaaagctaagaggagaagctgacgatgcacacatacacatgtctttagcttaaggacaatctgtgaacacattggagcttaagtggccccatcttagccttcctcaatcatctcacagatgcagcactgctgcagagggcctgctaagccaggcaggtggagttccaggtgtctcaggatgagtgtaagcccttagtgtgacagagtgcagtggttcttatatagttgtgtctggctatgatacttatcacatggcgccatggaggacatggactttgaaaatcagcagccctgtggtccaattcacatcttccccacctggccctctccaacaacactccaataatgacccacctctcttccttggctaaatgtgctctctcagtgcctttgcacactggtgccctttgcctggagttccttcttgcttcctttctatctagagagtttctcctgtatcttgaagtcccagtcaagcaccaccttcttgggaaccttccctgatttaggcattctggtggagtactttgtttttgccttgctcggagggtattatcatttctttcagatctcaaaaggacttctggaaaccaggtacagttagtgacatggtggaactgggggagtatttaatgtgctggtttgcctcagaggacatggtctgtgagaaggctgttgattggatatctaaaggtgtgaagtgtgaaaagggatggaaaagactggcatatgcctctatatccttctggtagttccatgggcaaggtctaagctcttgagggatgatgatattgaagacagagttggcgttctcagacagctctgagaactgggaagtggtatcacaacaggcaatgtagattgaggaagaagaaggcaacgtgtgtgaggaatccttgaaagtacctagaaacaacagggcgagtccctaagaaagtcaggctagagggtttgaaatttggggcatttctatgactggaacctactgtttcctgtgggctggggagatcagggatgcctgacttttagctcctggagagcagtgaacttatcttttttgacaagattatcaatatcttgaaataattatagattcacagtatgttgcaaagaaatgcacaggaaagtctcatgcacccttcctccactctttaccaacattagtgtcatgcacaactgtaatacaatataaaaaccaagaaatggacactgctacaatctgtagagcttattcaggtttcagcagttatacatgcatgtatgtgtgtgtatatatagggctatacaactttatcacatgtttagcctcatgtaaacactactacaatcaagacacttaattgtaccatcatcacatgactctgtcatgtgactgacatctttatagtcaccacttctatcccttccactatgatccctaacccctggcaactacaaacccattctccagctccataattatgttatttcatgaatgttccataaataaaatcactaagaatcaatcctttgagattggctattttcatttggcataatttccttgaggttcatccaggttattccatgcagtggttcattcctttttattgctgagttgtattctatgctattgtgtaccaaagggaccttgtcccacccagcacatagctggagctcagtgtcagctatgtaaaagaataactgactctacaaacaacttgctgtgtcaaacgtcttctgcaggtggggaaagttgaagctggttatttccataacatttaaaacaggtaattgttttgaccttctgattgaaatccactgccatgaatccccttaaatgaccagtcacctcatttgaatgatgaagaagtagatcaaataagaccaaatgatacaacaactgcatttgcatgctgccatgatcaggccaaattttaaattggtgatatagttgaaaacttcagtttttaatgtcttgattacactgcaagattttcaccccagcaatggagtttaacaaaaaatttgaaatcccaggaaatgaaattgcattaatgatggactttatgtataaaaacctgatgagaggatctcagaacatcttctccctaacttgcacttctaataatattagtatcttccatttctattgcacttgaaaattataaaaggtagcttcatacatactgttgtgcttagtattgaattaatactgtgaggaaggtggggagcacagggtggtgctggtggtgggtgttattgtcatttccctggacacataagagaacagaaccacagaggtgtcatcttatttgtccaggactgcacaactacttaattcataagcctggttagaactctgatcttcattctactttcaccccatttcttatggataaataaacactttttagaaaaggagaaatctgtgcttttttatttggagactatttccatcatttgacctttacaatcccaatgtcaaaatatcccatatgtgtatttctgtagtaatcacttgctgaaagtcatgtttgtataaaacaaaatctctatctgaattgtttttccccaaacaaatcttagagatacttagaataaactgctgtatattattacacatgattgcagtaatttattttacctgggggcaaaatcctagctatttagtaagtcttataaaaatctccagatggcttaattataccagtttagaaactaagggtataaaaataaaatggataaataagcataatttagaaacatattgagatgaaatataaaagttaaaaagaaagtttttaaaaataagatttacccattcatgataaaaactctcaacaaactaggaatagagaggaactttctcaacttgaaaagaacatgtacagaaatcctagaattggcatgatgttaaagagaaagagaacatttcctctagggaacaaggaaaaaaatttagctcttactacttctgttcaacattgtaccaaaagtcctaactactgcagtaaggtaaaaacaagaaataaaatgcatacaaagtggggaaaaagaaaaaaaagctttattcatacatatgattatgtgtgcagaatatctcaaagaatcaacaagaaaccctcctggaataaatcagtgattatagcaaggtccccgaacaaaaggttaatatataaaagccaattgctttccttttactagcaataaacaaatggatttgaaatttaaaaaaaatagtatcacataaaattgcaccagtgaaacttaagtataaatctgacaaaatatgtgtgggttctatatgtgaaaaactacaaaactctttgaaaaaatcaaaataaatgtagagatatccccatttattgatttagaagacttaatattaagatgttaattctttcaaacttaatctataaagttaacacaatatcagtcaaaattccaggaagctgttttgtagatattgacaaactgattctagagctcttataaaaaagcaaaaatctacaatcagttacacaatactgaagaagaacaaagttagagaactgaaactatctgatttcaaaaattaatgtaaagttaaagaaatcatgacagtgtagtattggtaaattaatagacacataaatcattaaaactaaattcagagtccagaagcagacccaaagaaacatgttcaactgatctttgacaaaggaacacagacaattcaatggaggaaaggtagtcttttcaccaaatgataatagaccaattggatctccatatgcaaaaaagaagaacctagacacagacccagagaccttattacttaaaaaaaaatttaactgaaaatggatcattgaccttaatgcaaaactacaaaacttctagaataagcataggaggcaatccaggtgaccttggatttggttctcagtttttagtacaacccccaaagcacaatctatgagagaaaaaccaataagttgaactttattaaaaaatgagaattttggcttcatgagttgggaattaatttttggttgtcaaataattaacttttagtccagatgagttttcaaatatatataaacaaaaaaagaggaaaattttcaaggcatagagacttagtgatatggtttggctctgggtccccacccaaatctcatgtcaaattgtaatacccagtgttggggagggacgtggtgggaagtgtttggatcatgggggcggatttcccccttgctgttcttgtgatagtgagtgagttcttacaagatctggttgtttaaaagtgtgtagcacttcaccctttgctctctctctcttgctcctccatggtaacacatgcttgcttcccctttgccttctgctgtgattgtaagtttcctgaggcctcccagccatgcttcctgtacagcctgtggaactgtaagtcaattaaacctcttttcttcacaaattacccaatgtcaggtagttctttacagcagtgtgaaaacggacgaatacagttaccaatagagatagtagcgtcttgtgcccatttcattgtgttgtagtaagtcatgatatataaagtccacaagaatgtgaggttgaaaataaattttaatatttcatggcattttttttttctaggacaagggaaaacattgatatttattggcatgtgttctgtgtcagacattgtactagacacatacataacagtatgaggaaatctttttctttcctacttttagccatgaggttaatacatgctcacactgattccatccctcactccatacagaaataatagaaggatgttatgcaagacatgcaaactaagaacttgatttaaaaattgaaaaaaccatttaattttaaatgtccttctgatgttgtatagaaccacatggcacacgtaggtgtgtggatgtgctatagtgaatcccatttttaaaaaaatttccaagaggcctgagaagtgagtgataactcacagagagtggaagaatagaaaggaacatgcaacaggggaatggaccatttaggatcagtttgagaagagccctttttcccaaaggggaaagttactcctgaggatgaagaaccctgggatttgggttatatagatattattttatttatttttattaataactttgtcatataagtattatttaaccatcttgtagataatgaaatgagtctcagagaggttaaatactttgctcacgataacacaactagtagtaaataacagaggaaggatttaatccttgtctaactccacagccaatggacagtacagtatagtgatcaagtaggtagattccagtgtcaaattactttgattctctttctgtgattttcacttattagctgtttaaccttggataatttattcaacatatctgtgcctcaatgctcacatctggaaaatagtgatatgatctcatcagattgctgtgagacttaaatgagataattaatgtcaagattttaatacattacaaggtgtataaaacagatcatatatatcaactggaattattttaacatggctttgcttctgtcataagcagcaaacaatatttgaagatgttacttggatttatagaaattaaaaaaaatctattcaagggtaactctagtacagctaaaaccgataaaacaaacaagagtagaaagacatctaacacatgaaatctgtagctaccactgcataatgtagaaacctaccttaagtcaatggtctatatttctagagtaaatataaattacatggatgtttaaaaaatctatttaacaatttaagtctttggatatccataaggaaatgattgactaatgctattttaaaaggcttgtatgaaagaagtctacaagcatttggtagtctgtaccagaacagcccatctaaacaacccctctaattgatatgttctttctactatctaagaaaatacttcctggtcaaaatgtaatttctttcatatctgtctcctctgatgagacttcaacctcaatacatatgaattggggccaaaatatatacaagacactacattagttatttaagcttacattcttgtcaagagtgtcttttagtgagtattttatcataaaaagtgagaagtgccataagagaattgcaggtaaaacactgtaggtgtttggaggcagaaaatattgcttccagcaggaggatggggaaaagctttagagaagaggtggcattttattggtgccttgatacgagagtagattcagacatgcagagataatggggaaagcaatctagaggggaataaaaacaggaaaatataaagaaaggaccatgcagttcagtaagttaggagtgtatctgaaagagattagaaggaaatgaaccaaaaaatgtttggttgaaatgaggttgtggggatctcaaaaaacagtctggggagtttgaattttacacacaggctaaagggtacaattaaatgtgtttaagaatagtagacttttccctgtcctttgaaaaataactctggtagctatttccagaatgggctggaagacagagaaaataagtgaggccgcaaattaggtattgtggaaatccacagagaggtctgaatcgaggtgctgatggtgaagaggacgtaactgctatgagttgtggcagttgaatcagcaggattgagccctgtttagatgagtgtccaggaacagaaaggagtttagtaaatctgaaagctgtatcactaagagggtgctgggactcctcaataaaaacagaagtattagaagattcaggattgacagaaatactgaaatcattgtgggacttaataagtttgaatttatcttatagaacacccaagtaggaacatgtccagtaagatgttgtaaagggagaatggtctatcagagacagaaaataactaccatatgcagggtttgttatgagccttgggtttcttctaccatgcttgtgactacctagtatctccaggtttgccccatgagtttgttagtggtttcttcataaaccatctatccctgtatgaccttcatttcacttgtgttagaccatttacattcatttactgaattagaacaataggtatgggacctcacaaattttctttttctataatttcaccttatagattggggaaactaaagaccaatgtaattaactatcttctaaatgttattagatactaatgaagaaccttctcaccactcccttccagtgtccaagttctgctgtgtcataagacagttcttcccatccctgtgtcacaggaactcctaacctcaagaaaagaaaataggaaacaaagatagtttgatcatgctggtgaagccacatagaaaaaggaatgtttttacaatgttagtgggagtgtaaattaattcaaccgttgtgtaagacagtgtggctattcctcaaagacctagaagcagaaatacaatttgacccaacaatcccattactaggtacatactcaaaggaacagaaatcattctgttataaagatacatgcttgcatatgttcattgcagcactatacacaatagaaaaggcatggaagcagcctaaatgcccatcaatgatagattggataaacaaaatatggtacgtatacaccatggaatactatgcagccacaaaaaaaagaatgagagcatgtcctttgcaggaatatggatggagttggaagtcattttccttaacaaactaatgcaagaactgaaaaccaaacaccacatgttctcacttatgagtgggtgctgaatgatgagaacacgtggacacatgggggaacaacacacactgtggtctgttggggggcatgggcttaatacttgggtggtggaatgatctgtgcagcaaaccaccacggcacatgtttacctctgtaacaaacctgcacatctggcacatgtaccagtgtacttaaaagttgaagaaaataaaagcaatgcttagaagagactccaatgatagagaaggacgattcttggaaagaggtcccagatggcttgctcaagcagttttgtgtatttgtcccacatgaaggtgaaaagagtgctggaagcttcaagatactcaagaagctaagagagtgagtgcagtttttctttctgattatatattaagtccccaatgcacagtgatatcacaaggcaattaattcagacatgggtccctctatttgtgttttgtttttaaatgacatgcgtgaaaaacataattcatctaagttgaagagatttttttaatgttacttgtgcctcttactttattttatttttttcgtaagttattggggtacaggtggtatttagttacatgagtaagttctttagtggtgatttgtaagattttggtgcacccatcacccgagcagtatacactgcattatatttgtattcttttatccctcactcccctcccattcttccacccaagttcctacaatccattatatcatttttatgctgaagggatcttttttgagaagcaattttctgtaagtccctgggctgggtttggaaaatttggaagaaaccaaacactgacttatggttgtatctgagacacagatttcaaggacataaagtactcaaacaataaattatgttatatctaatttaaaatcaaagttcaaaattactttagcttgggaaaaatgctcaaaccatacataacatgaagtgcacaggtgaaatatgtcttctgcatctctaatgacagtgatgtcaatgaaactatgaaactctggcttttggttaataaccattttgtttgtggtactaatgactatgaattagtaggtaatgaacaagaactgaagtattgaatttgtataattattatagtttaccaggcaatgatctttaaaataataagctaaaagataatttcatgcccaaatataaattcttaaatgtcaccatatagacacagtggtgaatgattagtatgtgaagaaaacacagaatgtatacctgaatataaatttaggtcttgatggcaccacacagcctgaatgaagaaggactatgacacagaaaaccgggcagagttgcagagcaagtgatgagactggtgaggagaatgtggcaagatgccaaatgacacttctattcattcatagaaaactgtgacacagaatttcagagctattccactacagctacatctaaagttgtctgttgtttttccctctgcccggtgtcaaagctgagcttattgtgaggaagggagtgtgtgtgtgtgtgtgtgtgtgtgtgtgtgtgtgtatgcataagcacctgtgtaagggatattataattattgcaaacaagaatcctgtaactgctggatacttgtcttagtaacatgtatgtccccaggcctcactagcctactggcaaggaagaaaataaatcagcaatttgtatccaaatggtgctggttcttagctcttcttagttcaagcaggttggtaaagtgtcctcctctggctggtattttggctcatctccaaggctgttgagtgcaataaaatctttgtgcactgggcattgctgtttcctctccagcccttccactacagagaagcactaccttgtctgcggtgctgccccctgctatgccttaaggctgaaaagtcatacatgaaaacagaattcaattcccttccatcaccacagtccaggagcctcaatatgggacagggaaaggggaaaattttcctccccactgaactcagacttgtacccttgcaccccatgttgcctctatctctcccattttaccctaggcctggcatgaccaagaccttctgatcaaaggcccttttcctcagagctcaaacaattcaaacaaatatacagttatagaggccttcagggtcataggcactcataaacttaatcgtggttactcccctctgccttcttaaatatttctccctgagatctcacatcagaaagatggcagctgttcacttaggcttttgagggagtctagcattgggttttgctctgttagaccaaaccgtgtgatatggttttgttgtatccccacccacatctcatcttgaattgtagtccccataatcccatgtatcatgggaaggacctggtgggaggtaattgaatcatggaggtggttacctccatgctgttctcatgatagtgagtcagatatctcatgatatctgatggttttataagggatttttcccattttgcttggctcttctccttgctgccaccatgtgaagaagggcatgtttgcttccccttctgccatgattttaagtttcctgaggcctccctggtcatgctgaactgtgagtcaattaaacctctttccttcataaattacccagtctcaggtatttccttattagcagtgtgagaacggactaatacagtaaattgggactgcagagagtggagtgctgctgtaaagatacccaaaaatgtgaaagtgactttggaactgggtaacagacagaggtgggaaccatttgaagggctcagaatataggaaatgtgggaaagtttggaactttctagagacttggagggctcagaagacaggaagacatgggaaagtttgaaattttgtagagacatgttgaatggctttgaccagaattgtgatagtgatatggacaataaagtccaggccaaggtagtctcagatggagatgaggaacttgttaggaactggagtaaaggtcactcttgtatgcaaagagactagcggcattttgcccctgccctagagatctgtgtaactttgaacttgagagatatgatttaaggtatctggcagaagaaatttctaagcagcaaagtgttcaacaggaagaagagcataaaaatttgaaaaatttgcagtctaatgatgtgatagaaaagaaaaacttatattctgggaagaaattcaagccagtagtagaagtttgcatgagtaacaaggagccaaatgctaattgccaaggcaatggggaaaatgtctccagggcatgtcagagaccttcatggcagcccctcccatcacaggcccagaggcctaggagggaaaaatggtttcctggggcaggtacaggtgcccacccaccctgtgaccactgtgtgcagcctcaggccttggtgccccacatcccagcccctccagccttggctacaaggggccaaggtacagtttgggtcatggcttcagagggtgtgagccccaagccttggcaggtgccatgtggtgttcagcctgcaggtgcacagaagtcaagaactgaggtttgggaacttctgcctagatttcagagggtttataggaatgcctgtatgtccagtcagaagtttgctggaggggctggggccctcatggagaacctccgtgagggcagtgcagaagggaaatgtgggttgaatcccccacacagagtccccattgaggcactgcctagtggatctgtgagaagagggccaccattcttcagaccccagaatggtagagccaccaacagcttacactgtgcacctggaaaagttgcagacactcaatgccagcctgtgaaaggagctggcgggggggctgtaccctgcaaagctacaggggcggagctgcccaagaccatgggaggctacctcttgcatcagtgtgacctggatgtgtgtgagacatggagtcaaaggggatcattttgtaactttaaggtttaatgattgccctattggattttggacttgcatggggcctgtagcccctttgttttgaacaatttcttctatttggaatgggtgtattgacccaatacctgtactcccatggtatctaggaagtaactaacttgcttttgattttacaggctcataggcagaagggacttgccttgtctcagatgagactttggacctggacttttgagttaatgctggaatgagctaagactttggggaactgttgggaaggcatgattgtgttttgaaatgtgaggacatgagatttgggaggggccaagggtgaaatgatattgtttggctgtgtcctcacccaaatctcatcttgaattgtagttcccgtaatccccatgtgtcatgggagggactcagtgggaggtaattgaatcatagggggagttaccaccatgctgttctcatgatagtaagctctcaaaagatctgatggctttataagtggcatttcccctttttctcagcacttctccttgctgctgccatgtgaagaaggacatatttggttcccctctgccacgattgtaagtttcttgagtcctcgccagtcatgctgagacatgagtcaattaaatctctttcctttacaaattatccagtgtcaggtatatctttattagcagtgtgagaatggactaatacaccatgggtcttagtttgatcccagggatagagagcatactgtgtgtactatcatttttccttaatcaagccactcttttctgtaatgttattgtttgttgtggagataaaggcagagggacatacccaacagtcagacaaagccctgtgttttcagcctctgtgttgagatatgtacatttcctgaggcattgtactaatcctgtttccaaaggaaacaaaagcatcaggataacatggtcttgcctcccagatgacgcagaataatttatagtttcaattaaattgcttccaaacctgttgtactgtcaacctgttgcagtgaatgcaaattaaataacccatatttctattttaactgaaaatattttctagtaaggctggaaaccatgcatgatgtgaagctgtggctagaatagctgttttctccatgtgagaattaacatctggttaattattatacctagttattatgctaggtatgcttctgtggcttgagaattgttagtgcagttaactttgagtaaaatttaaattaattagccaaaggagtggcaaaacaagctgaaatccataatttgaattttagttagtagtcccattttctcccaacaccttttaatttgaattgtgacaaatagcacacctgagatttgaatttccctctctcattctttgtctacctggctatagtcaaggaacaattattcatctgttcatccattaatccattcatccatctgcccatccatcgaccccccgatccagtgttcaccatgtgttatttgggcctaaccatgggcagcaaaagggaattaaggaatgccagccgcataggcggaagctgagtagttttgtcagttcttggattgtggggtaaaatgcattcatgtccttttattaatagctatgtggcttgggtcccctagccttttcagtctcaatgtagctgttactgacagcactaataagctgtcagtctgtttttgccatgtgttaggaagcaagcaccactgagaatgccatctttaccaggaatttcagaaagtactgagaggtttatcagtcacggagaagaaggaatatgaagtgggaagatgacctagaggtttggttagtgagtaaggagtaacttttaccccgatgaaccatattaaggaggtaggaagggtctctgcctttcttaaagtttagatatctgaatccttttaatagataagcttccatcagggagagtagaaacactttctccgtattaaaaatgctatatagttttattaagttgtctgacttctttctttgcttgtaaataatgcctaacatattcgaaactactgaaaaataaggtgcttcacataaatcacttttccagataattgaaagttgctttctaaaacactaaagctgattaggcttggataacattttcttaaaaacaattccagcatttctgttcataagagctcttaagagttcttaagagtccactagtgaatgaaacattttgcttagaagacagaagttcaggtctccattcctcacatcaatttgcatatactattgcatataatagcatctatgtatcttggaaaaaagagatggggaagacaagaaaaggagaagggaggagggaatggcatggtatctgttgccctctcacctccttgaattaatttactataaactagaagctggactgtggtgcccacagtatacttataaaaaccagaaactggcacaaccattttcaagaaagaatttgtaatattccagacccaatgtaactctagttaggaaccaggtggcaaaatatagcaaagagtttagaagagatcgttctctctgtgactggcagaaacagaacttgacagtccatgaccttggcattagtgatggttccaaaattcttatgtggaacagcttactggtggcagtcccgttgggaggagatgctggaacacttattttatttcgaagatgattttgtgttcacacacattttaatttagattgtatgcttatttgtcagtaggttctaggagagtattgctggaaattgtgggagaaggaggggtctaaagcccaagcaagccatcctttgataccatctttcttgtcatggtcttggtgtaaacagaaatggctcaactgtagcagagagtctcttaaaagaagcgccagggaaatggactttgtggtcatttatacatggaagtaaaagcaggaaaaaagcaatatggtggacactggggcagggtgagttcttcctttagcactggagattcataactgtcattgggcatgactgtaactgtgagtctgttggtggtgtcaggtaacattggcagtacattaaacatgatctcatcttaccagatctaagaaccatcactagcctatactgtttactgtagtttgtactgcagaaatgccctttgaaagtatggaggtatgtagggcattttgccttactctaaatgggcccaaacttaatgaggaagttccatttggaaacttctggttgactattcatttccatgagcacaaacttactacttctccttcttgacattttatttattgaattatttgtgtttattgtgtatttatttgaggtcaaggagtttgtcttattgatctttgtgtatctgtgtgtctggcacaaagcttttactataagaggtactctgtaactattacataacaaaatacaatgatgattgtgatcttggaatattggtgacctcattttccagaccaggattctgtttatgttgttttcaatctctctgattataacacctcttatgccttgcaaccaccccattctcaccccaaccaagtaacatcctactgctttgattcctcttgaactttacccagcgcctcagacttctaataagaaatttgcccttcacttcaccactctgcctttcaggaggaatcacctcctttttccctgttaatttttcctacaggattgcatttagtttatccttgcttgctctagaattagaatatgctatttataataaacaaatcaaacaaatccagatgagtagaatgaacagatatataaatgcagaaaaatgtaagactatgtatagaagacaatgagtcgcttaatatggctggaactaaaaatgcaggaaggagtgaaagaatagaagtttggaaagctaaccgggaactgaaatagggagttgggggttataatgtagataattaggagccattttaaatattatagaaaaggagaggtctgaatgaaaatattaattccgtacattaaattgagtagttaaatttgcttcagttaaatgagtatttttatattgttgagatgatatcaggagaagatatttaagtagacagaggtcttatggtaaaagtagttcgtgctcttgggacatgagcaatttaaaaccaagtatgtgttttcttagatataaatataatggctataatatacacagttggaagtattctctccagagcagcccagccagaattctttaaaagacttaggcatttgaacatctctaccatttttaagaatgattttccctttcctaaatcccaggaaactacacagtggtccttaatataaacaccagaaagtgcccttctatggtaaagtttatcacgtgtactcctagagggtcttttgcagtggcatcttcccataatgattcttcagttcatttaactcacacccggagctggatacttaacaaaagccccatcattttctgtatagttttagactgcaattccttgaaaatattgctagatcacaataatcaaacctcattctctaatctcagaaatgatggctagcctaccctctccagcattttgattacatttattctctaattcatgttctgtgttataggaagtaaaatgataagttaaatgcactttaattggcagaaaccaggatcattaattttcctttcataggatttctttccaagaactatttgcttacaaaatcaaatgggactagagtctggtattcacagaggaaaaccaagtgctcttgtcttcttttgttcagtcctccttttagcattgaagcagaatcctagagaggagtgttaaggaagatggatgttgacaagaagggagaggggcttagggagagttactgtatgagacaaaataatctagctctaagataattctaataataattagaagtttgtttatgagtatattttgaaactgttaaaaatatgaagcaaaatcttatacaattaatttagagtgaagtcattttcttaattaaaactgggctaagtggttagtttgcgctcattgtcattagccaggaaattcacactagtcagttccgcacaattacagctgcctctttagcattttctgggtgttcaagtctcactttttccttccatcaaaatttaaattctttgctcttctttggaaaatcagtgactgaaatacaagaacagaatatttgattgcactggttgctgtccccataatacaattcaagtctttgagaagcgacaacttatttcaatacaattttatcagattagcataatcaaggctgaaatggcgcataaaatacaggtgaagatagagcagcatgattagcagctgcaggtcagttcttttttcctgtgaccttaaatcaaatggtcaccatgatgaaagaaaattaagagaagttttccagggacaaagttgagaaggtgtctgaacatttgttgaggaaagttgtttcatatagaatgttattatgaaagtgaaatgagtcaaaatgagatatcatttctcacacgcttttataagaacaaatgtaaaagttttctttcaaaaaagaactgggtgttaggtttcagcatcagtcttataatgaggctctggactgtacataaaactgttctcctaggacattctactataatccaaaatggatgttcaaagccacaacatcaggcttcaaattcttgtttcaaaggcaaaattatggaataacagtataaattagtcttagtattttctttgtagttgtacatttaaggaaaaatattaccagataaccaaaatgtaaggccaatcatgaatgaaattaaagaatttcaacttttctttctggttacttcagaagtttagacttttaacacggagagaataaaataaatctcaatgtttataaataatctagccaactcaaatccttaaacctctatgaggcaattaataagatgacattaattgcacttaataattttacacaggagacaggcgtttatccttataaattaattttataaccttggattttgccattggccagtgtaagttaacattgttatagttaacaagttaagtttacttgttatagtatagttaagttatatatatacttatatatatacttactatatatatataagttacatatatacttattctctctatataagttatatatatacttactatactatagtatagtatagttaagttaacaagttttagtatgatatggttaggctttgtgtccccacccaaatctcatcttgaattctaatcctcataatctccatgtgtctagggagagacgtggtgaggagtgattggatcctgggggcagtttaccccatgctgttcccgtgatagtgagtgacttctcatgagatctgatggttttataagaggctcttcccacttcactgcataccctttctctcctgctgccttgtgaagaaggacatatttgcttccccttctgccattattgtaagtttcctgaggccttcccagccatgtggaacttgagtcaattaaatcttctttctttataaattatgcagccttgggcagttctttatagcagtgtgaaaatggactaatactttgtaataaagatcacttgttgaatacttaccatgtgtcaggcactttgcaagccattttacttaaattatttaatttttcccacaagcctgtgaggtagactttattataattttcacttcataaatgagaaatcaatgctcagaaatgttaaataacttgcatgggtctgacagttaatgacagtactggtgttcagattcaagtctctctgactccaggtcccctttgcctttttgcaagatctcttatactacacaagggagcaatgccaacgatagaaatttacaggagcattttgtcccatcattttccattttcctcagtggtatgagagaatgaactcaggtaccagagcattctgaaattaaccttcagctgggtgctcattaaaatagtttccctgatcagtttcttcttaaaaaatactctgtgtcctttaggcctatttcactgtataataaatgagacaggggaatgtctctcactaatacttatggcaagatcaagtcttactctatagggtgagtcatgtcaaagttttactttttgccattgatgcatttggaagaacacgaacacgtgacccctgatttatgtaagaagggtaggaaaagtgaacaagtggatattgagcatatactacactgatgatagtccattttgaggagttgaaaacaggttcagaaaagtttaatgacttcaccaaggctgcctaccaagtaggtgaagggttagtatttgaacttagggctgtctaactccttgactcatcttttcttccctattttccactgttctacactatgtaataattcactgcttgatttgtggcaatctctgttctctatcttcctgatagactttgctatgagttagataatagtcaagcaccttagttgcccctcttctcccctcacctggcccacctccccaccccggcattgaccccaaagtgcaatgccctggtcacttggcaagcggctgggcctggtgaaggcctaggggcgggccggagctccagccaggtccctgaaaagaagcggctgctccccgacttccaggccttagttggggtgggggggtccagctcctgggcctggggtcttctccccgcccccacccccttgtcctgggtgggcccctgcctgcctctctctgccttttccttgggtgtccctcctcaagccctgtggcactggcttgggtggcagggcccacttgtttcagggaccccaagaggtgccccctggctcctgggactgtgtgtgtgggtctggtgggtgatggggggaagaagggccaggcagagggtgcaagggaggaaacccctcaccaggagagccaaagacaaggttgtgccttaccccaggagccacccctgtgccctccttgccctgctgttcaccccctaccccttcccctgggcagcctgctgctttttccttatcttcctcccctgccctgcgctaagctgcatggtttccctcactctgggcagccaggaaggaatctgaatggagaatcaccaaccaccagagaaaaaagaccatggggccctcccctgccaactccccttccctggctgcccactcacccacacctctgtcactcgggacaggttgcccgccctgtccacgtgaagtgccaacacccttcccacccaggaccgagcccccacccctccctgagcccccaagtgagtttgcacatttaactactgtaatgagaagagcggcgttggcaagtgtgaaccatgaaaatataagtgaaactgatgaggagaataaactaaatgccttttttaaaaaaaaaaaaaaagaaagaaaaaaagaaaaaatagaaagctactgaatctttctaaaagcccccaattcaagatattatgaaattactaacatagaggtcaaatggatcacacttgataaataatgtgttgtctcaacaagtatgttggaaggagaaaaatttgactttatgcaacattacacattttccacagtggaattcaaccatttagtatagacatcttagtacagatattttgcagctacaaaaaacaaatttgtgtattttcaaaaatcccaggcaacaatgagaaacttttattattaagttgagctgttcatgggttgggtatcaatccagaaaaaggcaaaaaaaaaaaaaaaaaaattacccagtaacaaattttttgtttgttttgttatttatttatttatttaattctctgaggtttgattaaaagaaagctgaaatctgcccttacttgaatgctggtggcaatttgctcagctcagctctcctttggatcaggggccttgggttagctaaccgcctgggaattgggcccagatgcacacagcacgtaggtgctaatccacatgaaacttgaggcactgaaaggggcagctgtgtctgatgtaatttatcatacctgtgatgctattgtccttaaggtatcctatgacctgggaccttctctcaggagagctcctgggcaaatattcttccaatgagattatacctgaggcttgcccagcactcaagtagaaggctagctgaggcttacccctgacatcatgaatagctgtgactcatcattttaaattgaggccttgaatacggtccaccagtatggatttgtagatatctacagggcatgtttccaaaacaggaggagttgatgcagagggaaacaataaacaaaaacctagaatgaattataaaagtttgctgaacctcaactcaaataccaaacattattattttattttctatggaactgagaaataaaacaaagcttattttattttattttattatttaaactgcagtgaaccactttgaacctgtcactgattcactgaactggaaccagactagaatatcaaaatattttctaaatcacacatgagtcaactgaatattatttagttaagagttcctggcttgttcactgtcagaactaaaattcaagttgatgatttctccctgccgtatatctgggtgtgggtagagacactataacagaggctttggtagtagaatagggagagagaatacctactaaattaatgcttcaaacatttcttttagctaattttgttaatcaaacaaactctgacactgagattcaatataaatcacgtaagtgtggccctatggtgattgaagcggtatctgaggtcccaagtccaggcagttggatactgctgcccctctagggaatgtcagcacaccatcagacacagaatagccccacactaaataacactgtgcaggatttgagttctgtggctttaatcatttttttgtgtgtaggtgattccttgggctttatttctctcctgaatgttaatccatatctatttgctattcacttagactacttactggtgtcccaaacttgacgtgtctaatgttgaatagttctatgttccttcaaacaaactactcttgtattgactatttgtgttaatgtcattctcctggttaactgggcttgaaacttagttaactcctttaatctcttctcatattcaatccctcccaaaaaaaatcagtgtcccactttgttatggtccaattaaaggatcctacgtttgtgtcagacttggtttgtgatgctgtactcagatttcaggtgggcagtgaagtcagcaggggcgcctggataagcagacaccaccagatgctatgggggaggctacttaacaaagctgaagcagcaggtagagaggttttcaggaatcacagcaagatcaaggttcagaactggggcaactcaagagggcactgtgaatggtgattggttcaaccttgcctgtggtgactctcatctgggttgtctttaagataactctggccttgggtagtttgagagtcaggatcttcctttggctttaccatttatcaactatatgaccttgagcaaacaactttctgagactcaacattatcaaaggtaaaatatggataatagttccttcccttctttgactttgtggttaaaattaaacaaaatggtcatgaaacaggcaccatacattttaatgtgctctatgcatgtggtggtgttaggcagtaagatctgtgtactcagcttttcatttgtccattcattaattcaaatatttatcaaacacccactgtgtccaggcactctgctaggcctgtgatatagtgttaaacacattctcaacctcttacagatagattctgccctcacagaatacatgagaaggcatgttttaaacaacttattacatgactagtaatagttttcagatatactccacttcctatatgccaatcttgttctcagcattcatctcatttagtattcctgacaatcctataagagaagcaacaatatcttattttataaatgaagaaatttagccccagagagcttaaacaacttgcttgagggatttcacagctagtaagtggcaaaggcaagatcataacccaattagtctgtctctagattctatgcttaacctaataatcactacatcaaattacctcccttacttgagccagagcatccctctaggtaggtaagagcagtcacttccaaattccatagttaactaacctttctgatcttgagttcccttctctggaaaataggggataatactaatgtctacttatgtgtttttttattttttattttttattttggataaaaggagataatccttgtaaagaaaacttaacagagtaatttatctcacaaatgcatagtaaatattattttttagctattgattataataagtgcaatggaaaaaaactgcaaggtgctgcgagggagtaaaacaggaaaacctagtctagactggcttagaggggcatgaaaactgtcctggaaaaatatttaagcagagacccaaagaaataatgaacaaagatatcagaaagagaagggtggaggaagcagatatttaagcagaaacccaaagaaataatgaacaaagatgtcagagagataaaatatttaagcagagacccaaagaaataatgaacaaagatgtcagagagagaagggtggaggaatccctagttgggcaactagattagttccttctagaaacagagaaaaggccagaatagctaaaatggagagaataagaggagcaggaattagggggttggttggagaggcagaagaggaactttcccatctgttcctcccttgttatctgttccactgctatcatgtgaattcaggctctattgttttgggcctaaattatttcaatgactttgtaattattcttcctgtttgtactctcttgcgtcttctattcattgtgcatattcccggcaaattaaggtcctaaagcacccctttgaccatggcattgccttactaaaaaactttcaaaagtttgccattgcctatgaaaataaattccaaactctttagccaagcatacagtgataatttcaatttggcttcaaactgctttgggtcttatatctcaaaacttcctttacatacccaaaactcttaactaattttgctctgtccttctctgcctagaatgcatccttctttcccctttctatccagtcttagcattggcaagtcctgtttatctttcacatttgtatcaaatgttatcttattgccaggagttagatctgcatccttaaaatcttacacctttttggttgtcatttgctatggtctgaatgttagtgtttccccaaaatacattatgttgaaatcctaacgtgtaaaatgatggtatgaagaggtgggaacctggtaagtggttaggtcatgagtgcttagtgttcttattaaggagacctcatagaattagctcattcttttcatcatgcaagagcacagtgagaaggtaccgtctatgaaccagggagcaagtcctcaccagacactgaatctgctagcaccttggtcttggacttctcagcctcaagaattgtaatagataaatttttgctgtgtatatccctctcattctatggcattttgttacagaagcttaatggacaaaaatatctttcctgtatataactttttctctaaaaaataatttaaaattttttccatttaaaatctgcatataaaaattattcatagttttattagcttatccagctattagcattttggcatttttttctagttgtatgtatgaatattgagaacttaatttttatatacttttcattataatcgtatgttcataacaagtccttaaaaatattactttgagggctgcctaatattcaagcataggaacatatcataatatatataaacattcccctgtgggagcctcagtttctttttccatagaataagtcaataagaatgcctatcttccaccattattgtgaagattaatgagaaacatattaaagaacttacaaaaggaactaagacatagtagatgctcagtaagtaataatcattgttcctttttgtcttgctgaaaaatttccctatgatttatgtgctctcagatgaaagatggagtgtataggggtaagaatgaggaagctcttatatgagggacttctctttgcctactaaaaacaaagattattctgcccacaagaaacaaaaggcttccatttctctcacaagactcagtaaaaattatccaaaacatgtaaatttttatttttggcaatttcgtgggtcaaggaaaaggttggaagcaaaatgtggtttaaagatgatggaaatgaaattcattttactttctgtggtccttatttccatatataatcatggattgactttagacttttttggtttaattgtcgcaagcagaaatatctttgggcctcggttttttatactctaataaatctttataataaaatgagttagaggtagtcttattttatccaattactccaaatttgattgcaagtccaagagcattttaatcctcttggtatttatagtctgtaaatctttgataatttcatgttgcagccatcttttactcaaagttacgtgtttagtaactttgctctgagtatttctttaggtttttatttccttgatcaaaactgagcaggctgcttgagacacttctagtctctaaagttcaatttccatgtgacttctgacatttattcttagaggagatgaacagttgcttattttaaatatatctgccatacctgcagctaaggaaagatagtatataaggccctccagtctcactctccttcccctactagactgtaaattcttcaaagccagaggtcatataatgctctactctgtatcctcagaacctaaactgtgtctgatacatggcagctgctcagtaaatgttggctgaaagaattaacgatgactgctgtttcctcactgtattagagaaaactttttaggacacgggctttgggatcaaacagagctgggttttaaaccatcactggctgtgtgttcctggacaggtgatttgtattccctagtcccaatttttttatcttacagtgaaaaaataattcttacctaaggactaaaggaaataatatgtgtaagtgggcttggcacatagaacatacaccataaaatgtatctttccttcctttttgagatatcccaattcacattactttttaaattctcttagcctctcctctatctgaggctaaattcacaagagaataaactatgtaagtaaaaggctataaaaagcagtagaaagatggaaaaatgggaagggcattgagaattttttaaacttctttatggctttcggtaactttcattttccaaaaataggtttctgtttgccaatcagatagattaccttccctttacctcctctcttctcacttttgagttgtaagtgaaaaggaggcataaagagagtgaaagaaagtgtcagaactccctatgcttgacccctgaatgcaagaacgaagctcttgctatgtatctggtctttctttctgttgaaatagggtgaagacagagaaggattagggcaggatgattcagcacgcaggctctgtgggcagatggcttatgaggataaaataaaaaattcatgtaaatgaaacattggcaaggtatctggcacactgtgagccgtaaataatgccaatatttaggacaataatagatgatgatgataatgaaaatgttaatggtaataactagaaggaaatccacacagaaacaaataaaaagttgtattatttttgctgttatttatttttgtaataatgtggaaaagtaagaatttgagcttgtggaaccataatttgatattggttgaagttcttttcccctcatttttgcttatatactgcctataggaaataagataaaatgtattatttttacttaaagatactatctataaaaatgattctaagtttattaaaaatctatctatctgcatatgatttttgtctataggcatatctacaatgaaatatgccagaaatgtgttttcttaatgtgaaggacgattacttttgagtgttgggttttttttttttttttttttttagacagagtcttgctctgtcacccaggctggagtgcagtggcgtgatcttggctcgctgcaatctctgcctcctgggtttaagcgattctcctgcctcaggctccagagtagctgggactacaggtacccaccaccacactcagctaattttttttgtgtttttagtagagacggggtttcatcgtgttggccaggatgatcttgatctcctgaccttgtgatccgcctgccttggcctcccaaagtgctgggattacaggcatgagccaccgcgcctcgctgggtgttgggttttcttttgtgttattttgatactttcacctttgtgtttttatttttttatttttatttttatttttttgagatggagtcttctctgccgcccaatctgcaacctccacctcccgggttcaagcgattctcctgcctcagcctcctgagtagctgggactacaggtgcctgccaccacgcccggctaatgttttgtatttttagtagagattcggtttcaccatgttagccaggatggtctcgatctcctgacctcacgatctgcctgcctcggcctcccaaagtgctgggattacaggcgtgagccaccacgcctggactgtgtttttaaaaacatttaatttttttagatggtaacatttcttttgaataataataatattttaaaacaagctaacaatcataattagaagcaaatatttcaacattctagtaataattaattctgagtggtaggaatttgagcaattgttacttgtttctatgttcttttaaaaataaaaaacacacgcaacaaaaatcatcttaaagagcactaaaatctaggaaaaaaacaaaaataaaacctctgtatctcctccgcccataccacatttccccagtgagatagatggatgtctatgtagtcctaaaatgtctacagggaagaaaatggagttatccctctggtcattgattccagcctggtcaagtaggaaaggaatgggttggagataatatacctagattccactttccatttttacaaatgatttggtatgaatctgtaggcatatcatggaagtttactccctttttgtttttccatctacgaaatgggattataaaaccaaccccacaggaggcagggcaagatggtgagatagaagcttccactgattgttcctccgacaaggacaccaagttaacaactatccacacagaaaaaaacaccttcataagaaccaaaagtcaggtgagcactcatagtacctggttttaactttgtgtcactgaaagaggcattgcagaaaagaaaaaaacagttctgaattgtagatgtcgcccctcctccaccccaggcagcagcagcttggtgcagagagtgtctctggatgctgggggagggagaacacagcaatttcgaggcattgaatacagtactatcctgttagaccagaagagaaccagacaaaactcttccaacacccacccaaggagggagtgtttaaaccagccctagccagagcaccatttctgatcccagtggcatgaacttcagtgcctgaaaaccttgccactgagggctacagcactctatatctccaagtaaacttgaaaggaagtctaggacgtaaggactgcaactcttacgtgagtcctaatgacaaactaggctcagagatggtggactctgggggcacccgacttactaagacatcagctggggctgccaagggattgctggcatcatccctcccctcacttcaggctgcatagctcacaaatccaaaagagagcccttctttctgcttgtggagaggaaagggaagagtggggaagacttagttttgcatcttggataccaactcagccacagcaagataaggcaccagtcagagtcgtgaagttcccattccaggccctagcccccagatgacatttctagacacctgggtcagaagagaacccactgccttgaaggaaaggaaccagtcctggcagcattcatcacctgccaactgaagaagccttgggccctgaataacaagcaatgatactcaggtactgtatcaaggcccttgggtaagcctctgagacttgtcttcaggctccagcacaaccacagtgaggcagagcatcaagtgggcttttgggttccccagttccaggattttactcttgtatggcatttctggacctgccctaggccagcggggagcccattgccctgacaggtgagtcccaggccaggcagcactcatcgcaagctgacttaagagcccttgagcctaaagggaacattggctggtagtctggcagttctccttgtggcctgggatggtgatggctacagggtgaggctcctttgcctttggaaaggggagggaagagtaggaacaagtgcgtctgtgatttgactgccagctcagcctcaatacaatagtacagcaggtagacttctaatatttttgactctggtccctgactcctggatagcatctctggacccacttggggcctgggggaattcaccatcctgaagggaaggacagaggactggctggctttgccacctgctgactgtagagccccagagacttgagtgaacataggcagtagccagggaatggttacagcaggccatgggcgagatgcagtattgtgctgtttcagatctgatccagtgcagtcattgtagtgctggcccacaggggtgtgtgtgtcactccactttcagctaaggtgactcagaacagagagagaaagagactctgtttgctttggagaaagtaaggggagaaacaggagtttctgtcaggtaatccagataattctcctaaatcttgtccaagaccatcaaggcagcacttctatgagtctgcaagaaccacagcattactcgtcttgtggtgccccctaaagtagacatggcttacatcacaacacccaagtcctttcaaatatctgaaaagccttttcaagaaggacaactacaaataagcccagatggtgaagactacaataaatacctaacactttatgcacagacaccaaaaaacatctactatcatcaataccatccatgaaaacatgaactcaccaaatgaactaaataagtcaccagggaccaatggtggagaaacagttatgtgacctctcagacacagaattcaaaatagctgtgttgaggaaactcaaagaaattccagataacacagagaaggaattcagaattttgtaagtgatatggtttggctgtgtccccacccaaatctcaccttgacttgtagctcccacaattcccatatcttgtgggaaggacctggtgagagataattgaatcatgggggcaggtcttttccatgctgttctcatgatagtgaataagtctcatgagatatgatggttttataaaggggagtttccctgcacaagtcctattctcttgtctgccaccatgaagacatgactttcaccttctgccatgattatgaggcctccccagccatgtggaactgtgagtccattaaatctcatatatatatacatatatatatatacatacatatatatatacacatacatatatatacatacatatatatatatatatatatatatatatatatatatatatatatatataaaattagcccagtcttaggtatgtctttatcagcagtgtgaaaacaggctaatactataagataaatttaacaaagagacagaaataattaaaaggaatcaagcagaaattctagagttgaaaaatgctatcggcatactaatgaatgcactagattcttttaatagcaggacagatcaagcagaagaaagaattcgtgagcctgaagaaagactatttgaaaatacaacagtcagaggagaaaaaagaaaaacatagaaatgaagcacacctacaggatcaagaaaatagcctcaaaagggcaaatctaagagttattgtcctcaaagagggggtggaaagcttattcaaacggataataacagagaacatcccaaacctagagaaagatatcagtatccacgtacaagatggttatagaaccaagcagatttaacccaaagaagactacctcaaggcatttaataatcaaactttaaaggtcaaggataaagaaaggattataaaagcatcaagaagacagaaacaaataacatataatggagctccaatacctctgacagcagacttttccatggaaactttacagtgcaggagagagtggcatgacatatttaaactgctgaactttacccttgagtagcgtatctggtgaaaatatccttcatcatgaaggagaaataaagactttcccagacaaacaaaaggggaggaatttcatcaataccaaacctgtcccacaggaaatgctaaagggaatacttcaatcagaaataaaaggatattaatgagcaataaatactcacctgaaggtacaaaccttactggtaatagtaagtgcagagaaaaacacagaatattaatacactgtaaccgtgtgtaaaggacagtggcacaatcttggctcacggcaacctctgcctcctgggtcaagagattctcctgcctcagcctcccaagtagtggggattaaaggcgcccaccaccatgccccactaatttttgtatttttagtagagatggggttttgccatgttggccatgtgggtcgtgaactcttgacctcatgtaatactcttaccttggccacccaaagtgccgggattacaggcatgagccactgctctcagcctaacaactctttgtcattacagtgagatataattagaaataataaaatgttaaaaagtggaaggacaaagtcatggtgagtttttattagtgttctttttgtttgttttttgtttatgcaaacagtattaagttattatcaggttaaaataatgggttataatataatatttgcaagcctcatggtaacctcaaaccaaaaaaacacacaatagatacacaaaaaatataaagtaagaagcaaaatcatactatcagagaaaatcaccttcactagaggaaaacaagaagaaaagaaagaaggaaaaggagatcataaaacaaccagaaaacaaataacaaaatgacaggattaagtccttacttatcaataataatattaaatgtaaaatggactaaactctctaatcaaaagacatagactggctgaacagatgaaaaaacaagacccattgattcactgcctacaggaaatactacatctatgaagacaaacatagactgaaaataaaaggttggaaaaaagatattttataccaataaaaacaaaaaagagcaggagtcactatgcttctttcagccaaaatagatttcagaacaaaaattataagagacaaggaaggtcactatataatgataaaggggttaattcagcaagaagatataacaatttttaatatatatgcacccaacactgcagcacccagatatagaaaggaaatgtaattaaagagaaataggccccaatataataatagctggggacttcaacaccccacttgcagcattggatcttcctgacagaagaatcaacaaaaaaaatcagactaaatttgcactgtagaccaaatggatctaatagatatttacagaacatttcttccaacatctgcagaactcacaatcttttcctcagaacatagatcattctgaaggatagactatgaattaggtcaccaaacaagtcttacaacattacaaaaattaaaataatgtcaataatcttctctgaccacaatgaaactaaactagaaattaataacaagaaaaattttggaaactatacaaatacgtgaaaatgaaacaatatattcttgagtgattagtgggttgatgaataaattaagaaggaagttgaaaaatttcttaaacaaataataacggaaacacagcatgccaaaacctatgggatacagcaaagacaatactaagagggaagtttatagctatcagtgtctacatcaaaaaagagaagaaacttcaaatctacaatctaacaatgcatcttaaagaactagtaaagcaagagcaagtcaatcccataattagtataaaaataaataaaatgaagaaaatataaaagatcaatgcaataaaaagggtttttgtttgtttgtttgtttgttttttgtgagacagagtctcgctctgtctcccaggctggagtgcagtggtgcgatctgagctcactgcaagctccacctcctgggttcacaccattctcctgcctcagcctcccgaatagctgggactacaggcacctgccaccacgtccagctaatatttttgtatttttagtagagacggggtttcatcatgttggccaggatggtcttgatctcctgaccttgtgacctgcccgcttcggcctcctaaagtgctgggattacaggcgtgagccactgcacctggcctggggttttttttgaaaagttaaacaaagttgaccaacctttagccggacaaactaagaaaaaaagagagaggttccaaataaatacaatgagaaatacaaaagaaggtattacaactgatactgcaaaaattcaaaggattactagtggctactatgagcaactatatgcccgtaaactgaaaaatctggaataaatggacaaatctctagatacatacaacctaccaatattgaaccaaaacatgaacagaccaataataagtaacaagatcaaagctgtaataaaaagtctcccagtaaagaaaagcctgggacctgatggcttcactgctgaattctaccaaatattgaatgaagaataaataccaattctactcaaactattcacaaaaatagaggaggagcgaatacttccaaatttattctatgaggctagtattaccctgataccaaaaccagaaaaaaacacctcaacatcacttcatgataaaaaccgtcaggaagactaggtatagaaggaacgtatctcaacataataaaagccatatacaacaaacccacagctagtatcatattaagtggggaaaaactgaaagcctttcctctaagatctggaacacgacaaggattctattcaaaatagtactggagatcctagctagagcagtcagacaagagaaagatataatgggcatcctgactggaaaaataagtcaaattattcttgtttgctgatgagatgatctaagatttggaaaaactttgagactccacaagaaaactattagaactgataaattcagtaaagttgcaggatacagagtcaacatacagaaatcagtagtatttctatatgccaacagtgaacaatgtgaaaaagaaattaaaaagtaatcccatttaaaatagccacacataaaattatatatctaggaattaacataaccaaagaagtgaatgatctctataatgaaaactgtaaaacgctgattaaggaaattgaagaggacatcaaaaaatggaaaaatatttcatgttcatgtattgaaagaatcaatattgttaaaatgtccatgctacccaaaacaatctacagattcaaaataccaatatttttcacagaaattagaaaaaactatgctaaaatttatatggagtcacaaaagatccagaatagccaaagctatcctaagcaaaaaactggaggaatcacattacctgacctcaaagtatactacagagctacagtaaacaaaacagcatggtactggcataaaaacagacacatagaccaatggaacaacatagagaacccagaaacaaatccacacacctacagtgaactcatttttgacaaaggtgtaaagaatatacactggaaaaaagatagtctcttcaataaatggtgctagaaaactggatattcacatgcagaagattgaaactagaactttgtctcttaccatacagaaaaatcaaaccaggctgggcatggtgactcacacctgtaatcccagcactttgggaggccaaggtatgtggattgcttgatcccaggagcttgaaaccagcctgagcaacgtggcaaaactcagtctctaccaaaaaatatgaaaattagctgggcatggtggtgcatgcctgtagtcccagatactcatgggggtgaggtgggaggactgcttgagcctgggaggcagaggttgcagtgagccaagatggcaccactgcactccaagctggatgacagagggacaatctgccaaaaaaaaaaaaatcgaaatagactaaagacttatatctaagatctcacactatgaaatgactacaagtaaacattggagaaaatttccaggacatttatctgggcaaaggtttcttgaacaataccctacaagcacaggcaaccaaagtaaaaaatggacaaatcggatcacatcaaattaaaaagcttctgcacagcaagggttgtaatcaacaaagtgaagagacaactgacagaatgggaaaaaaaaacacctcagacaagggattaataatcagaatacataaggagctcaaacgactctataggaaaaaatctaataaacttatcaaaaaatgggcacaagatttgaatagacatttctcaaaagaagtcataaaaaagggcaaacaggaatatgtaaaggtgctcaacatcactgatcatcagagaaatgcaaaactataatgacatatcatgtcaccacagttaaaatggtttgtagccaaaaaacaggcaataacaaatgctggcgaggatgtggagaaaagggaactgttgtacattgtttgtgggaatgtaaattagtaaaaacagtatggggaacaatttggaggttcctcaaaaaaactgaaaattgagctgccatacgatccagcaatcccactgctgggcatgtacccaaaagaaaggaaatcagtatattgaagagatagttgcactcctgtgtttgtcgcagcatggtttacaatagctaagatttggaagcaacctaagtgtccatcaacagataaacaggtaaagaaaaatgtggtatacgtacacaatggagtactatttaaccataaaaaaggatgcgatacagtcatttgtagcaacatagaactggaggcacagaaagacaaactgcatattctcacttatttgtgggatctaaaaatcagaacaattgaactcatggacccagagagtagaagagtggttcccaggagctgggaagggtagttgggggctgagggggcagtggaaataggtacaaaaaatagaaagaataaataagacctactattcaatagcacaatagggtgattattgtcaatgataacttaattgtacattttaaaatagagtgtaattggattgtttgtaactcaatggataaatactttgatggatggatagcccattctctattattgtgcttatttcatgctgcatgcctctatcaaaacatctcatgtactcaataaatatatgcacctactatgtacccacaaaaattaaaaaaaggataaattaaaaatacaatcaaccctatgtatattttaggacagttttaatgagagaattcagagccaatttgagcacttcaattttaactccatgtcctgcaggaataaatgattattgccagcctatgggtaaaattataaaatgctcttgcatccttgtttactttccttcatgggttaaaaatcccacaaagtccagtttttctccaaagcattcatagtgtctgttgctttactttagaagtttgaatttaattttctgattttgtctattttgctcttacctctttcaaagtctctctatcctgtgactataattttacttcctctcatgtatatttctgtgcttgtttaggatgattcaaaatataaactcacatttttaagctcttttactccctttgtgtgctctgtgtctcctaaacattaaaattttacttaaggaagaatcttagaactactagagaaatggtgttcattcttgctagctgagtaggaacatggatcccataaaaattgatctgttcttttcattaaaacctataaagaaaatctcattttaaatgactgtattaacaagataacagagcatagaaggaaattacttatgttagatactcagtagctgacccaagaaattatgaatgctttcttaaagctttgtctttagtatttgctaataagccagttagcaaacctgaaacacaaacttgtatgtgtttatgcacacatacacacacacacacacacacacacgcatgcacaatgaatttggagggactaatgctaattaaattgacaattgcatttactttgatcactaccttggcaatcctgtatataaactctcagataagatacaatgcctacattacagagactgagaaacacaactctgtagtcctgaaatctgggcagtctagaacaagaagttaacaggttgttgtaatcagaggtttgaagaggtttgcaggcattttaaaaacaaaaacatggattttaaatgaccactgacatactccatccacaatcctgcctgtcttttgatttcttaatttattatcaacttagcctttccacatgtttcagaatctttagggctccgtcaaaatatctttcttctaggagatctaaccctttgccactgcactgtatacctgccccgatgttttttacacccgaatcaccattaagtttctatattcagttctttgtgttgtcttaacctctctttaagaggaatatgctccagtggaaataacactcgtcctaaatctgaccttggacctggtcctgttttagtctattcaggctgctataataaactaccataagctgggttgcttataaacagcagaaatttatttctcacagttctgaaggctgggaagtcctagatcaaagtgctggcagattcaatgtctagtgagggactacttattggttcatagatggctgtctttttgctgtgtcttcacatgatggaaggggagagagagctttctggtatctcatcttgtatttcccgagattgaagctttctctatagctcaaatcccatttgtaagggctctgcccttgtgacttactctcctaccaaagccccttacctcttaataccatcatattagggatgaggattttaacttatgaatttggtgggggggatgcaaacattcaatctatattattcagcttctgcccccacccccaaatcatgtccttcttacatgcaaaatacattaaagggatcatcatagccccagagatgggtgagactcaaggtatgattcatccagagacaaattgctctccagctgtgagcttgtgaaaccaaacaaattatgtacttccaaaattcaaagatggctcagacaaaggaaagaaatttccacaaaaaaaaaaaaaaaagaaataggaaagaagaaaggcataacacattcaaaataagtccaggctacaagggaaacttcatgaggtcttacagctgcagaataatcctctttggcttgtggctctgccctctaggtccactagttggggaggtacctctctatggacccacagctttgggcagaacctgtctaaccagttgaaactcaggcaatggctccactttttgtaactgaagaggcatctctgatgatatttgaattgcttttggggttcttcttcccttgtcttcaatagtgcacatttgcagctgaataggtcctatactataaaacgtatctataagattggtcctgtcctataagacgtaagaagtctgacagcctcccttcattccttcctatctccttccccttcagttcaaactggtggtattccttctggggtggctgattaaatctacagtttatgcccacacaaatcttatcaaatggtcactaggccacacccttagtgttccaaacattttttctcaatttttgcaatatggatggctgcaaattttccaaatctttaagtttagatcctttttgcctaacaattctattgttatgtcattttccctcttagattttactgtaagaagccagggggcaccaagctgtacttttaacactttgcttgggaattatttcagctaaatatcaaagcttgcaagttctatcttccacaaagcactagaacataaacactattcagccaaattatttgccactttataaaaaagatcacctttcctccagtttccaataaaatattcctcatttctgtctgacttttgctgtttatatgtctaccaatattctgttcatgatacttagctattccataggaagactgaggctttctatgctgcttttctttctgagcctgtaccagaatcacctttaaaggtctattcatggaaatgcaaacttttcctagcatgtacatacaaactctttcagcctccaccctttatcctgttttaagatacgttttaaggtatttgttacagcagcacgttcacttcttgggaccaattttctgtcttagtcagtttgggctgctataagagaattccacagactaagtagcttttataaacaacagaaatttatttctccacagctttagaggctgggaagtcctagatcaaagcactgatagatttagtgtctggtcatcttctggttgtgtcctcatgtgatgaaagagggtgagagagctcttcagagctcttttataagggctttaatcccattcatgaggtcttggtcctcacaacctaatcaccaaccaaaggtcttgcttcctaataccataatatttcaaaatatgaattttaggggaacacaaacattcagtctgtagcaggtcctaaaaaaactacttgaccttaggccagacataaatctttggggacttctttttatagatcagtaaaacaaatggggcaaattgaatattgtctaagctttcatcagttttatgattctgttggtcataagctattatatcacagttatgagtataatgtgtcatgttttcagaattcttaggctagccaggaacttacagattgcctaatcaaattgaataattttacttactgggaaactgattgatttaaatgatttactttgtgtcaaataagttagccagcagcaggaccagattctatgctttctcatacaaggcaagtaacttcagaatgagtatcattagtcactaataaatcagatgaatgatttggcaagggaagtgctagcaggtattggtgaaaatgagatttttctggattttcataattttaaaaaccaaatcttgtaattccaaacttgtaaattccatttatatttctttagttcatttaaaaatattcataaaccatttaaaatcagacttgaatgtttgcactaaaaccatagggtaattttaggttatgaggagaaaatgatgtggatttcagacattttgaaatgctgttggctgcatgctataaaatattcatggttctgggttacactgtgtgcttttttttttttttaaaccacttcaattgcttctttcagcatgttttttgtattgaattttactctgtgaaactttgtttgtagcattattttccatattttggaattaattttgtaatttctcttgatcatatctgactttgtccatcaggacttcatataactcactccactccagttgcatgtcagttctgtggtttaatttcctttctcacctgcaaacagtgcttatttagcaaggaacagcattcccatctgctttgttccaaaggggtgagagtactggggggaggtgggcagggaatgaggacacactgagtatgaggtgatgaaagactaagatcagaaacaggatgccctttagagaaagaggtgagcagagccatgttggggtagcctgctgtgtctctgggaaacggctgccacagttgccttggggtggttctgtgtctcctcagtgtgagaactcttgctccagggctttgaactgtgtcactgatactcttccttttagaccagtatatgtgcaatgtcagtttcacttaccagccttcatggttgctttcccctagacatgaaattttcaaatgtccctgaacacagaatgaaggtgcttaaacttgagaataagcagtagaatttccaattcccaacagaccctccactgcctagaatacagtatcatcacgtcagtactgcatctggttaccctgcttatcattcaactaacatgctctccctatggtctcaactctcccatgttcctgaagacaatggatgtctgtgaccctctcttgttggtcctctctgcagttgtagagcatcatctcctcctggaaatgttctcttctattctgttcatttcttgagcacttctgattgcctctcctgaccttttgggtcttccttttttccttcctttgcccatttcttccttccttcctttgcccatttctcaaatgacccatttcttttttcaaaaatttgttctagggcttctctttttatctacatgttctctctgggctatttctacagctttaatctctatctccataccttcccagatccctgacctgtgtctctgtccatttttctatttcttttagctccttaataacatatatttaactacctgctttgtgtaaatctgatatatacatttgaaataacttacacttgattattacattctacttatgagacttataagcaccaccctcaggacccaaatgccatttttctgtcccatctcttcctcattttttccctgccccagggagtaacataatccttctgactacacacttcaaagacctcatcacctgccatatccaattagtcactgagaactctcagttctacaccttgatcacagtccatcacctctcccacgttactcatccaggctgtcactatctcttactataatggccacctgttttggaagatgtgcttcccaccccgtccaatctctaactccaatatattctctacattagtggttctcagtatgtggtccccagaccagctgcatctgtgtcatctgggaacttgttcaaattgcaaattcaccagcactataacatcagaaacgctgggggtaggctcagctgtctgtcctaccctcccgatggctttggtgtttgtaaaatatgagaacctcaccaacgtcaacccactcacttcatacttgtcctactaagctacagtcctttactcaccctgcctcctctctccagctgcaggaccctcgtacctgctgctgctcccattcttcctttccacctggctggctcctccttgtccctctggctttgcttacatatcactcctcccccccacccccgaacctcccagtacccagagctgtagtagggcttgtcctaagtgtcccacaggactctgcagtaatggctatttttttattgaccccctttattgtaattgctgattccttgtctgtcacattttctaggaactctctgaggatttggaccgtgtttattctatttcctaaagctttatttcactgaagctattaactaaatcagaattattcaggcatatagtaggtaaatcaccaaaaaaaatcgatatatatatttttttgtggggagggggatgaatgattctggtttctgccctatatccctctgggttcatgctgctctataggcataggagatagttagttaccctagattggcgagatagttaccctagattggcaatctcttctaattctccaaagtcatactttcccctatattccaggtctctgccataccagctaagtcatctgagtggtgatattagggtattatcctggatctatccttcttatacctctctcctctatcatgtcaaggcagtcaataaacctgttgaggaaaaatcatgcagaagcctgttattaattatagagagatctaataattcagtctggcagaaaaccctttaatttacctgctctcttccaattctttgccaaggctcctcaaaatggtcagacaattcctggccaggtatttgcataatggcttttcttctgttgcctttgttcctttgtggccccagctaattgcctgagagtgccactgttagttttcaactctttctgatagaaaccctgtgtactaacatggaaatcttaggtaatctgctttttcaaagcacaatgcagaatttattggcggtggtgtaactttaagaatatccgagaagccaccaaggcctctaggtaaaatagaatgaggaacttttctgtacacttcctttaccctgtgactcaaaaggagggcccctcctgaggaaaggccaggaaagtaatgcaatgtttaatttttctatacttcttgtagaagtgttctttctgagtcagctgtggacagggatattcactgacctcaagattatgctatccaaagaggtttgtgttattttcgtacaactgaaaaacccctcacggggccacattcattaaaaagaccagtggtagttgtggggaggttctaaagaccttaacaaaatcaccttcatttttaaaatttttatttatttatttatttttattatacttaagttctggggtacatgtgcagagcgtgcaggtttattgcataggtatacatgtgccatggtggtttgctgcacccatcaacctgtcatctgcattaggtatttgtcctaatgctatccctccccttcccccccaaccccctgacaggcccccatatgtaatgtttccctcactgtgcccatatgttctcattgttcaactcccacatttgagtgagaacatgcggtgtctggttttctgtttctgtgttagtttgctgaaaatgatggtttctagcttcatccatgtccctgcaaaggacatgaactcatccttttatatggctgcatagtattccgtggtgtatatgttccacattttctttatctagtctatcattgatgctggacaggatatggagaaataggaatgcttttacactgttggagtgtaaattagttcaaccattgtggaaggcagtgtggtgattcctcaaggatctagaactagaaataccatttgacccagcaatctcattactgggtatatacccaaagggttataaatcattctactataaagacacatgcacgcatgtttattgcagcactattcacactagcaaagacttggaaccaacaaaatcacctcattaacctctctgagagatgtctgcccttgcccttcattcctaccatctctgtcctgaagtccccatcctccctttcctgtctctccaaagcagcagatccctccctaccctttatgaatcaagtgcttatgtagaattctgttttataaaatagataaagctgctttttatgtggatacatttattttccaatgtatagcttttacttattaaaagtcaatgtattccttaaaaaattaaaaacagagttattgtatgatccagcaattctacttctggttatctattcaaggtaattgaagggtcttaaagagatatttgcacacgcatgttcgtagcagcattattcaaaatagccaagacatgaaagcaacccaaatgcttgttgatggacaaatgaataaacaaaatgtggcatatatatacacaatggaatattcagccttaaaaaggaagaaaattctgacatttgatacaacatgaataaatcttgaggacattatgctaaataaaataagctagtcacaactgggcccagtggctcatacctgtaatcctagcactttgggaggccgaggtgggtggatcacttgaggtcaggagttcaagaccaacctggccaacatgatgaaaccccttctctactaaaaatacaaaaattagctgggcatggtggcacacacctgtaatcccagctacttgggaggctgaggcaggagaatcgtttaaacccaggaagtggagattgtagtgagccaagatcatgccacttgactccagcctgggctgggtgaaagagtgagactccatctcaataaaaaggctagtcaccaaaagagaaatactgcagaatatgtcttgtatgaggtatctagattagtcaaattcatagaaagagaaaagtagaatggtggttcccaggggctggcagaggagagggaaacgagttgtgtgtttcatgggtatgaagtttcagttttgtaagaggaaaaggttttggaaattagttgcacgacaatgtgaatgtgcttaatactattgaactgtatgcataaaatgaataatgaatacacataaaaataacattttatgtgtatattaccacttttttaaagaaagtaaatgcacaaggtaaaaaaaagtcatgtgtaaggatgagtgtgcagaacacaaaacacctgaaatctggaattgtgtgttgcgatttgtcatcaacatttaatgtgtattgttttgatagcacatacttttaaaaaattctgtagcctgatgactttttctttttcctgcttttttagtagcttgccatataattccaagctattcatcagttaagatttcaggagcatctttattgaattaaattggaaacataaattcagccatccctgatgtattaaaatttgatctatatcacattgaatttttgtcaattattctttttaatagtaattaagcaaatattttaaaaagcaaattgaaagcaagtgttttacaacctttgcagaaactccataaaaccttagagctttggtgaaccacagtttgaaaatcactgctataatacactatgttaatcttctacttggttttcacctttctcgatccactctccacacatctgctggacttgtctttgtaaaacacgaaactgaccttgacatatctttgcttaaacatcctctgcataactccatctctgtagcatggtggtgatccctagctatctgtgagtagcactgaaaattccaacctcgagtctatccccaaaccaaataaatcaaatattttgggttgggttctgagtatatttcaaaaactcccgaagtgtagtgtgcagcaagaatgaagaacgactgacttagaggagagtgcatacacctcttaatatgacacataagagcttcaagatttgatctttccccagtcatgcttaacttcaacatggccccacacatggaccaaatgaggtccctggtcacgtgagcactctaaccctttcctgcttgctcaggttgctccccctgcatctggccttttttgttataacccctgagagtccatcttgacaacacagctcaaacatcaccagttccatgctggttccttctttcctttgtccctccttccccctttcttctaaccaatgaataaactctactgtaatcatagctttctttctaaaaaacaaatatctctctgtttggttcattattgatgtgaattactgggaaaagtttccttaccagaatgagtacataaatgaatgagtgaatgagtgaacaaataaataaataagcagaatacctattagcttgctaagaaatctggtcactctatctctatataacaattcgtattctctagtgctttacagacctttattgtctataatttgcatcgcagaaaagtggcgctatgtcgctatctcttgactggattcaaacctggagttctctacaaatcccaagctcatcccaccaaacacttttatatacggaactactccccagtttagagagtttagaggttaagatggaggggttatagcaaaatggtcaggtacctgactgagcttatgtcgcaagttttgaggctggttttaaactctaattagaaacttgaagtctgtatttcttgtttttttttttgttttgtttttttgtcctgcattttcctgaattctttatcatcaaactgttttctaacagtttaaaaatctgagttcttattaaggctccatgtttcacttttccagccatttcttcctcccaccccaattttttaacttttgagatatttaagagccaacacaaaagaagaagttgtagccaaggagattatcaacagggctttttactatcataactcggtcagagaggaaaagatgaaaataaccatctaaatatcttgcctataagcttgccaaacacaacccacggtagtttggaaaatgaatggtgaggagcacatcatttgagtatatttgtgtgaaattactgacattgtgatacttgagcacctccagtatttctgcttcaggagtcttaatgcagttcatggtgaatgatgtgtttgttgtatcactgcgtcagtaaattgaaatgacagtgtgactttgttcccattcatgctttgcatgccaattttatcccaagtgaaaccttctctttgattattcaatgggcctagctgtgcaaactcagtgttgtgcacatttcatgaggaatgaagctagggagaagcaagtggcttttacatgcctgcacacttataagtgagctttacttttcccagtggctgtgtcctatgggtcactttctccttcataatgatgatatccgaaataaactttaaactagacattaatgtaatggttattgagctgtacattgtgtatctttgtacctattaacatcacaatcaacatagcattccagagtgccccacaatcataattcattaacaaggcaatgattttcaactggctgaggagctcctttatgtgataaaaacccattatagaaaagaggcataagaatgtcagggtgtgaattaaatttctccccatgatgcctgtttaagtcaggtagctcgagactgtgcattactaaccctgttcttttatgagtctcctcagcatgcatggcatctgcgtggagaagagcagcaggcacacctgtgaaggctgaacctcaggatggaaactccacccaccctgttctctcttctccagccatatgccacatagaaaccttaaatatgaagcagacaatggattggatgtattaactgaaagaggttctccaataaagtatatcttttagttttggtggagatttatgggtcctgtttgagagacagatttagtgtctggtacaaaattgaatctcttgccttttagaaacatagaagtttctttcaatcaggctgttgtaaagatatctcattcattcctgaacttcactaattgtatcagggtttggcaattcctgggttgggggcgggggttggtgggaatgtggggctagaagatgggagaggaccatggaaaaacttgttgactcttttaaggcagaaagaagaagcaaattaatctcatccagaggatgaagtagactacagtttggctcatgtttgatattgtcttatggaaagtagcaaagggtcatgatgaggggaggtggtagtgtaattagggaaagcttagactttggatttatatgttcattgagttcatatcccaactcttccaattattagtagctttgtgatcataggaaagaatgttttagtttttctgagttctctcatttttaaaatagaaaaataatgcctttctaatatgattgttgtccagcttagataacatgagcaaaggccaagtgtatataaaagtataaaatcaatgatatatgttcttattctgaactatcattattgaggataggttattgaaattgaaaatagatcatctgcaactggatgcatgggaatgtgtgagtaggactcagaaacttagttaacaaaaggaaggcgtctaagggattaagattgaagagcaagataaaatgttaatgtgttggcatctatgggaacacatctcaaatcaaaggtggcaagagctaagtgggtgatggggttgagtggaaggtgcctctcaagctgagtccagacacattcttggggtcatcattctcctccccttcagtgcctcttcggaaagctcaagatcccctgcctgagggtgtctagtgattaaacccagatccacacacagagcatctgacctactgaatggtgcccagtaaagaccatttatttccttagtcttcaatctgaaatgtaaaaaagacctatactacttgtcatcctgcgccattcattggtttggcacctctattagtccgttctcatgctgctaataaagacatacccgagactgggtaatttataaaggaaagaggtttaattgactcacagctcagcatggctggggaggcctcaggaaacttacaattatggtggaagggaaaagcaaacacatcctttttcacatggcagcaggaaggagaatgaatgcccagctaatggggaagccccttataaaaacaaccagatctcgttagcactaactcactaccatgagaacaagatgggggaactgccccccatgattcaattatcaccacctggtccctcccacaacacatggggattatgggaactgcaattcaagataagatttgggtggagacacagccaaaccatatcagcagctaaggatgagcaggacctcgggcttttcagaaaggtggcaagttgaagaggagcagtcacttggactaccaggattcaaaccatgatgacccattcatcagctcaagtaaatcacttcacctcctgagccttagtttctcaaaatttaaatcacggataataacactgacctgcctagtatttggatgtcatgaggttcaaagtcaaacagagataatggatgataaagcacactggaaactgttagccatcatgtgaggatgtgacaaatttttaatatgctgaaatacctcttttagcagtgatagccatctaacagttgacagcctcatcgtattgatgtattgattttttttttttttttgcaaatactgtatatgccactaaggcacggaataataagacgttagtaattcaatattcaaacagataattgtatgcccatgtctatattagcctcataaataatttcattagtagtgtgtcattggaaagaagaattgcaaacagatttttcataagagaatatggtgaagaatgaaatctctctaatgatactcatatgaaactttagtattgttgtgtaagttgggatctcagtattattcattcatttattcatttcacatttttagtgctttttatgtgttaacattcctcttttttatctatactcacttataaataatgcttatgtgttgacaacttctgagttaatttatgtagttgcagcctcccccttgaattccagactaaaacatccagttgtctacaaggcatcctgacttgagtgtctaataagcatctcaattcaacatttccaggattgaacttctaatttgctcctattctctgcaaacatgctctttctattctatctcagtaaatggctactccaattttccaattcctttgaccccaaacatgggggtcatctttgatttcttcattctgtcacacctacatcaattcaccagcaaatcctattgcttctagtttcaaaacacatccagaatctggcaacttcccaccatcttcactgcttccacactaatttcttgctcaggttaatgtaatttcttcgtaattggtctctctgcttttgctcttctcacgcttctcactctcacagacattctcaccatggaagccagagtgagcctttaaaatacaaaacagatcataccaattatttgctagaatccttccagtgacattccatattactcaaagcataaggtcctacatgatctgcctcattttctgtctaccacctaatctcctaatagtcttcccttcactcactttactcttgcctcagtgctgtcttcctgatattcctcaaatatgccaggcacacttgggtaggtaaggagggagggagggaagagggcataccagaagaacaaaatagcattttcaaagtgatggctctcaaagaacttgcctgcttggaatttcagtccctctggggtcatgcagacatgattagagataaaagcttagtcaggtaatgaatgatctggtatgccgtggccaagaggttggactttatacaataggtaaagagtagccaataaagagtttcaagtagaaggctgacataatcagacttgcattttaagaatctaaggtggagatgtattgaaaggagaaggatgacctgttggaaggacattgcaacacgggaaagagacacaaaagcccaatctaaggccggggaattggtagtagatagagacgggaggtgattaggtcattccaggaagtggaacatgccatattatggacattaaataactattggtcaacaaaataagcatcggtcaaaatcaatagaataaaactttgtcaccagttagttttcagagtagattgtagtggggagaattcagctcaaggactccaaaaccactttgaaatcagtttacaaaatttaacttatccaatgaaaaagtggactcataaaagtcaaatcatgtcttttgatgcagtattctctggctagactctttggcatgtttaattgtggatttcaagatgcatttcatttgattagtccctgtagaaggaactgagtcaggtgatatatgacttcttactggtttgcttattttattagacacttatttcatttctggtacttcatttctggtatcattttccattttacacgtcataaatatatacataaatattttaaaagtttctgttaatccaggttgaatatgtgccatataattgataatagctctaaaagtacctaggtaataaactgctctggcctccaagcttaagttaacttaaaactcgagaatggcatgttagttggcaggacccatagagattatctacaacaccccactccccaacaccagagcccccttccctctgctcgtactttattttttaaaaaaagaaattgaggggtaaaagaacttgtcaaactttatacctttagtggccaaaacatttggaatattaaatggtgttttctgggaccacgttaaagcaaaagagtcacacgaaaaaagaaaacgacttcagtgtgcattagaagctccagagagtatgctaacaaactgggcccttctcacagaaattctgattccatagaaaccttcactttaaaaaaatacctcactgcagtgatgctaacgtagatggtctatgtgccatactttaagaatgactctcgtaaaacaaaataagcaggcgcaaaccaggagtttaccaaaacgtatagacctaccagaactttaaaaagacaatagtataacccagattacaggttaacagatactacttctctatcaacatctctttttatggaaaacacacatagcacacataggctgtcatagagcctttgtggctgtccaacatagcataataattgcaaatacaattatcccttttcagccatttgtgtatcaagccctcctgatttttatgcattacacatacgcatcattccttaagagagtgtgagataaccataagtattaaatgatgtctttgtcctcaatggacctctggcttaggaaaacagatgtggttgctctcttgtgggaggcagaagctcatctgtattaccttcgcgttccacctgcactcttacattcccatagtctgaaataacgcagtcaaactatgcctttcaggaatgctttgtttgagggctaagggtgagagatcacacattatgtagcctgaacatgatttacaactgctagtgtgattaagataatcagatcagaccatccataaatattgccagtaatagcaaagaagaaaatcctatggaaagcaatatatgctacagacatgaagggaaagtactcttttgccctcccatagaaagatacaaacttgaactgggttattataaaaattcacattgggctaaaaccgacactaggaatcatcttattcagtaattttcaccaaaaagaaaaaacattggtggcagaatactgttttcaaacaaagttttatatagaaccctaaaaaaaaataaaggcagagctgctctcaatgaagccaggggagtagggaaaagctgggcctgatcttttcaacctgtggactgaccgacctgatattctacatcagaatcccaggggttcacaggaaagcactatgaccaaagacgttaagggatttgactatagcaagaagggctggagtcttcaagttaaacttaggagcctagggaccagcgcttattctctgaaggccaagctgcctctcactccttgatacagatgccagattataaaaacacaccatcagcaatggaggtcccaatggcatctatagcctctttatagtcatgtgacagtctggctgagtacccccttcttcaatgtgggtttctttggggaagattgatttaaagcaatgagagacggggagtgctccctcctcctgagaaggcttggggacaagcaggagagaagtttttaagaaaatggaaaccatgagttcctcgtttatgcatgttttgaatcttactgtgtagagcacttggttctagaaaaagacagaatgagccccgaagaagggaaaagcgatgaaaacctagtgatctgtgcaaagaaagacaaggaatgtgaaacagtcagctctttcttttggcagactcacgtatatgctgattcctctaatgagtatttattaatcttaaccattgagtattgattatgtacagggatgtttgaggttttttttccattggagtcctcagatctatggactaactatgagagggtgagaattactttaaataaagacctaccaaaatgtggcttatgaaatattagcttcctctccgttgcagattacaccattttgttttacaagtttcctgggccaaattctgaagtaacttgctttcagtcactaatctgggctttgttttttagtggatcatggatcatgcaacataataaaaaacattgaaatgaaattagtagacttgctttctctttcattcaaataggaggaaatgtttgggggaaaaagaatttaccagtcctgcaccaaaatcgtaattgcagtgggatcctaactctaccttaaaaagtgattaaagtattatataaaagtagagttgtggagggcctgggcactggcatgatacactcagtcatgaccagtcatgatgtactcttagtttgaatagtgttttctccaactacaagctgtatggctcaaggcaagttacttaactgttctgtgcattaatttcaaccacagataagagatactagtagtgcctactttgtagcattgatgaggattaaacaagataatgcatacagctcttggagaagtatctggaatatacaaagtgcccaataaatgtcagctattattatttccaagtggtaggacaatgagtgattttttcccttaattttttaaaaaagttaatgcaattatgttatatgttacattatgacagaaactaaagtcataaatacaaaacaaaaagtaaaaatttttgaaatttgaaaatgttgaaaggctctcttttttttcctctaaatccaatgtcaactaagatgaggttcaatttttgagaggaatagtgtgtatatgaaggggagaaaaatggataaaaaatgtacagataaaattgttctacccaatctttttgcaaaaacccgttctccctccttttttctcaatgaatatttgtcactatgaccttccagcactaaataagagagagaaggaaggaggataagaggaagaagatgaataaaaatggttagatgcaatttttctggttaaaccttcccaaatctcaatggaataacattttagtctcataccaaaccttacctctcactgtcatacttctgggccagtaattttaagtgtattgttatggatatagatctgacttgatttcgtcttacacagtaggatgttaaaagaaaattcccagctcagggtgaacaatttaaaatgttacgactttctttaggggattgcaaaagagagttttgagatctcacttttacctggtcttgccacttcagtgaattaacccacaagtatttattgaatggttaattactctgcgtccaaagttttaaaactttgtctaggacaggtcactacccttccaaatggcctcacacaatctcttttcaaatgtgagggaaccctggatgggatcaggctgaaataaatctattgtcaaggagtttgagaccagcgtaggcaacacagcaagggcctggtttctacaaaaatattttaaaatttgtcaggtgtggtggcacacacttgtagtcctagctacttgggaggctgaggctggaggattgcttcagcccaggagttcgagggtacagtgggctatgattgcactactgcattatagcttgggtgaaagatcaagaccttatctcaaaaacaaacaaacaacaacaaaaaaaacacaacctccccctccccccaaggaaaaaaccaaaaccatggtgtgagtccctgtgatctgctggttatttctgagacaccataattgggaattaggaagtggggtgtggagacagatctcattgaattagcacaggctgtggtatttgcacgtgagctcaggcagaaccaaacgtgctaacaaaattcagtgattttacaatgcacctagtgtttctgccagaaatttgggctctgcaagccttgtgttttctaattggagggcttggaagggggaagctgagctgttagaacgctggggtaaaaacccattacatttatttgataaggattgtatgttttaggtaattttctatttagataaacctgcccttctatttagtgaagagtcttttttaaggccatagaagatggtttaaaaaagcaaccctactaagtatttagtgtttgagttaagcctgaagggtatcagttcattcacataggctctgttaaaccacttaatagctgtgtgacctgaacagtcattagctgttgagcactttctctgcgacaggtccttgctccttgtttcatatccattatctcataaattacttacaatagtcctttgaatggcccctcttattttcttcatgaggagcctgaggcttagagtactgtggtaattgcccaaggttttgtaagtggtgtaatgatgctgggtagctgggttcagtgtcttcaaacggaagtcgtaatagctacctcccagagtggctgtcaggaatacacgtatatgtatacatgtttatatacaatatgtgatatccactcatatatacatatgatattatgaatatagataaaaattaaattaaaaattatatatatacccacacacatatatgcatgtatgtgtgtgtctggtacatgagaaacatttgataagtagcattatatcaacagagatcacctttctacaatgagaaacttgcttctgtagaggaatatatagacacgacacaggtgagaagtaaatgaagaagatttcatttgaggcttgctaacactctcttaaggcagagttttaattactttctaccatctccctgcttaaagttccctgaaaattgttaatctcccactagttgaatgaattatacactaataggactcttttgcttccacctcaggtaatggtgacagagcttttaacctctgattggaatgaggccttttttttgcatgggacctctctctgatagactatgagcttcttaaaggcagggtccatctggttaatgaagtccttgacaaggtgcctgatgttgtacaggtgctctgttacctgccatctcttagtaggtcagaaagagcctctgataaaaagattactatgcagccataaaaaatgatgagttcatgtcctttgtagggacatggatgaagccggaaaccatcattcttagcagactgtcgcaaggacagaaaaccaaacaccgcatgttctcactcataggtgggaattgaacagtgagaacacatggacacaggaaggggaacatcacacaccggggcctgttgtggggtggggggagggggggagggatagcattaggagatatacctaatgttaaatgatgagttaatgggtgcagcacaccaacatggtacatgtatacatatgtaacaaacctgcacgttgtgcacatgtgccctaaaacttaacgtataaaaaaaaaaaaaagattactggctcacgcctgtaatcccagcactttgggaggccgaggtgggcggatcacctgagatcatgagtttgagaccagcctgaccaacatggtgaaaccccatctctactaaaaatacaaaaaaaaaaaaaaaccacccaaaaaattagccgggtgtggcggcacatgcctgtaatgccaactaccctggaggctgaggcaggagaatcacttgaacccgggaggcggaggttgcagtgagccaagatggcaccattgcactccagcctgggcaacaagagggaaaccctgtctcaaaaaaaagaaaaaattactggaaaagataatctcctgagttctgtttattgggggacaaaggtccttggactctaggggtccttcttccaccctctgtttcccaacacttcccaggccttaggtcagcctgggataatccatttctgctggaaaatttattagggattatctagtaaaaatgaataaatgaagatatcttaaaaagatttttcctagtagattggaaaatgtagtataaaagctgaagaagttaggagccatttaataacaaaagaggaatagataaatagaccacccagagagcagaatagagttcaaaccatgtcctcttcaccaattactatgttcacaccataaatgtgccattttgaatcagtaaaggaagaagagactattttattacatatatttggagaaaaataaaagtatattcctttttggtatccaaaaggtggttttaatccacattttagtccaggtggattaaaaaatctaaacataaaaaacaatattgtactacaaaaagtataagagaatagttttataatcttgacatcaaaccgagaaaccacaagagaaaagattggcattttgggccgggcatagtggttcacgcctgtaatcccagcactttgggaggcccaggcgggcagatcacccgaggtcaggagttcgagacgagcctgaccaacacggtgaaaccctgtctctactaaaaatacaaaaattagccaggcgtggtggcacatgcctgtaatcccaactactcaggaggctgaggcaggagaatcacttgaacccgggaggcggaggttgcagtgagccgagatcatgccactgcactccagcctggtgacagagcgagacgctgtctcaaaaaaaaaaaaaaaaaaaaaaaaagaaagaaaaaaaaaagaaaagaaaattgctttctccccacctccttctattcttctgaaaaaaaattatgacaggctgttttcaaaaagtaaattttaaaggcacaagatttattttatgctaaaatataatgctgactaaaagagctcatctttagacttcctgacgtgcttgatttgttaccacaattacttgtttctttttttttcctgtccagtggcatatcacaaaacttctttttaatttggctctctgctggtgtttgcagctggaaattatttccacctcctgcttaggtcaagggaaagtcaaagatggaaggaatcttagaattcatctagtcaaatcctccatcctaaacttgaattccctccacaaaatcccctcttgacacatccatgggcttatcccagttgccccagcctatgtaaacgaggcaaagagcaagagacagggtagagaaacagcaagaggggagcagtggctgtttctgcaccttacaatcttactaagttttctataccactttaccatacagaaaaaatactcaattaaagattgttttatcaaaggccttaccttctgttgtaccacacacactaactaataaacttacatggcagtgtgcgaacattaatgagaatgaatcactcctaaattatcagctcacattatcatataaatgatcacttttattttctctcccaatagtgctataatctctaataaaacagtttatacatgttgtaagtgagactactgtgccctagaaaactagcattatattgctttgttaataaaaatgcaaaactactcaggcagcttttatcagatgcctaagtctctggatcaagcccaagtcagcccaccgtacatctggaagaaaagcaagtcagactgaaccctgaacacagtgttacaggaagtatcccaggcttggtatattcaaatacccagataagattgctgatcatggaatctgtttccagccctgtctctctccccttcccaaccctaaaaatttcttttattagaatttgggggtctagtagcaaaagtaagtggaaaacaatgatcctacctttgatgcattgtggccacgatatggaccatgaaaaagaagttctctagtctagtgaaagggatggttaatataataacttggacttaaatgaagcctattggctctgtaggaacacaaaagaaatgaccctgtgggggtaaaacagacctttataaatttcatcatgcatcatgtgggacaaaagagccactgaaattcgagtttgtacaaatgtattatgatgatgctgttcttaacaagttctgccaaagtctgaaaaacataagcgtttctagagtcgctatttgccaggagaataatctgctttctgtttgcagaaatccaagtgaaggaaagaggattctgtccagagagttttaatttgacccaaaaccttaatcagatgacttttctgtagatccttctcttagtctgtcaagaagagcgctgctgctgaagccaaaaatattggcagataaactccttacaagaaagaacattgtagataggtgcacacaaacacaatatgtaaacaatggctatgcctcagatggtttctgtttgttttttgagggtgatggagggaggttattgcaatcttttggcagtgaaaaaatagcaggtgtgataatcaactcacctttctatcaagagagtgaatttaaatgggtgtcgcttacataatattaatatagtagaaatttgactacttagtccaaaataaagaaatagggatgaattttcatacaaactttttcttttttttttggtttctttattccattttattatttattaagactgttaacaaaaaataggctttatttttcctctgaacttaaaaactataaatttacttgggtcactaacagtgctctcagtctgagagaaaataacataataacaacaataatgaacaaagcacttagcatgtgccaggcactgttctaggtgcttttacctattcagtcattacttttcacaacagctctgtgaggtaagtactatttcatacaaactttttcttttggagagggagggagggagggagggagacagcacctgcgggagactgggcaggatctctcctatgaagtcagaacaactattgcctgtggcaaagtacccagcactgtctcccactaagcctcactaatttatcttagtctgtacatgtaagaatcctctaatacaccaaccttggaccagtttctcattctcgttcagggttttgtaaggtgagcagcaagctgctttggaggcactaaacttgtgtgttggctgggatataaaagccatacccagatgcatgagctatccgtttcatcatctttttaaagcagacgtgttagccctgccagctaggacaaccccttggctagctgccttttgtcttctgtacatctcctttgccagtgcccttggagaagttagacattacaaaacatgacaaaaataacaccatttctggttaaataaatgatttcaacctaagttttcctaaccagggaagatagcttagtgtggagtttcacagacctccggttaattcttccacctgctactgcatcactttcaggccatgagaacaggtaattataacactatggagtgcagtgaacagcttgctattggaagtcaaagaaaggaaccattaactctggccgtttccttcttttctgaccttagcatttctgagtacatttatgtgcattatctcctttcttcttcaaaacatctctgtgaagagcgtaaggtattattcccacttttagaaataaaaatttcggagcctcagaaaagttaagtaacttgccaggattacacagctagtagattttagctgtgaaaaggaaatttttattctgcttttaaattctatcttcttgaggacatcattgtaaaagatccagtcaatgagaaacagttattgtttttatattttgtaactcagtcaaatttgaaataaatagctcaaagttcttaactatttacaattacagaatatcacctccaactactgaattaaaggtttttgatgaatcccagccaaaaagagacggaaacttgccattattaggttccctttttatatttgtataacttaattttgatttaaataagaaaataagatttaaccaatgattagtataatctgatgtaattgctcatcttactttgtggaatgcaaataacaaatagatcatactttaaacagccaaatatcctataagtatattagcaatttttatagtaacttttttatttctgaaacatgcatcttaatacgtattaacaaatctaggtagccatttcatccatcaagtaaataatgtatactttaagactgttcacttgaagtcctaagacatagattatattgaactcaaagcacattatttctgtttcctcttataaccaaatgaacatatagaaaattattccatttttaaagagaaccaatatcattggattcttattttatgccagaagttttacatataatattgtctttccttcttcagttttaccattgagaagttgattctcagaaaagttaaataatttgctcgtggtcatgcaatagttcagtggtaaaaatagtatttaatccaaggccttttctctgcattgtgcagattcacagtgacattattattttttcatataaatgggcatataaacaaaatcatatgcaaagtcttcctatttctagaaggcctaagaaagatatagacaatagatacagaaaaataattattctggagggaaagctcaatgtaaattaacttttaaaaaaaattagtgatagatgtgagaagaggtcaatcaaaaaagtgaccttttgaatgacttgccctgtatttgtaaaactagacaacccattatcttgtaattacatgacatgtcttaaggaaataaattaaaatatttgttatgctccttatctgatttttttctatttttctatactctaagttctgggatacatttgcagaatgtgcatgtttgttacataggtatatgtgtgccatggtggtttgctgtacccatcaacctgtcacctacattaggtatttctcctaaggctatccctcccctaactcccaccccgccacaggccctggtgtgtgatgttctctccctgtgtcaacgtgttctcattattcagctcccacatatgagtgagaacatgcggtgtttggttttctgttcctgtgttagtttgctgagagtgatagtttccagcttcatccatgtcccagcaaaggacatgaactcatcctttttttatggttgcatagtattcaatggtgtatatgtgccacattttctttatccagtctatcattgatgggcatttgggttgctagcaagtctttgctattgtggacagtgctgcaataaacatacatgtgcatgtgtcttaatattggaatgatttataatcctttggatatatacccagtaatggggttgctgggtcaaatggtatttctggttctagatccttgactaactgccacactgtcttccacaatggttgaactaatatacactcctaccaacagtgtattcctatttctccacatcctctccagcatctgttgtttcctgcctttttaatgattgccattctaactggcatgagatggtatctcattgtggttttgatttgcatttctctaatgatcactgatgatgagctttttttcatatgtttgttggctgcataagtgtcttattttgagaagtgtctgtttatattctttgcccacttttttgatggcgttgttcttttttcttgcaaatttgtttaagctccttgtagattctagatattagggctttgtcagatgtatagattgtaaaaattttctcccattctgtaggttgcctgaccactctgatgatagtttcttttgctgtgcagaagctctttagtttaattagatcccatttgtctattttggcttttgttgccattgcttttggtgttttagtcacgaagactttgcctaagcctatgtcctgaatggtattgcctaggttttcttctagggtttttatggttttaggtcttatgtttaagactttaatccatcttgagttaatttttgtataacgtgtaaggaagggatccagtttcagttttctgcatatggctagccagttttcccaacatcatttattaaatagggaatcttttccccatagcttgtttttgtcacgtctgtcaaagaccagatggttgtagatgtgtgatgttatttctgaggcctctgttttgttccattggtctatctctctgttttggtaccagtaccatgctgttttgtttactgtagccttgtagtatagtttgaagtcagatagtgtgatgcctccagctttgttcttttgctaagggttgtcttggctatacgggctcttttttgattccatatgaactttaaggtagttttttctaattctgtgaagaaagtcagtggtagtttgatggggatagcattgaatctataaattattttgggcattatggccattttaactatattgattcttcctatccatgagcatggaatgtttttctatttgtttgtgtcctctcttatttccttgagcagtgctttgtagttgtccttgaagaggtccttcacatcccttgtaatttggattcctaggtattttattctctttgtagcaattgtgaatgggagttcactcatgatttggctccctgtttgtctattattggcgtatagaaatgcttgtgatttttgcatactgattttgtctcctgagactttgctgaagttgcttatcagcttaagcagattttgggctgagatgatggcgttttctaaatacacaatcatgtcaccttcaaacagagacaatttgacttcctctcttcctatttgaataccttttatttctttctcttgcctgattgccctggccagaacttccaatactatgttgaataggagtggagagagggcatccttgtcttgtgctggttttcaaagggaatgcttccagcttttgcccattcagtatgatattggctgtgggtttgtcataaatagctcttattattttgatacattgtatcaatacctagtttattgagtttttagcatgaagggctgttgaattttattgaaggccttttctgcatctattgagataatcatgtggtttctgtcattggttctggttatgtgttggattaagtttattgatttgcatatgttgaaccaaccttgcatcccagggatgaagccaactggattgtggtggataagctttttgatgtgctgatggattcggtttgccagtattttactgaggattttcacatcaatgttcatcaggcctgatattggcctgaaattttctttttttgttttgtgtctgccaggtttttgtatcaggatgatgctggtctcataaaatgagttagggaggagtccctctttttctattgtttggaatagtttcagaacgaatggtaccaaattctcttttacctctgatagaattcggctgtgaattcatctggtcctgggcttttttggttggtaggcgattaattactgcctcaatttcagaacttgttattggtatattcagagatttgacttcttcctggtttagccttgggagggtatatgtgtccaggagtttatctatttgttctagattttctagtttatttgcatagaggtgtttatagtgttctctgatggtagtttgtatttctatggtataagaggtgatatcccctttatcattttttattgtgtctatttgattcttctctcatttcttctttattagcctggagagtggtctatctattttgttaatcttttcaaataaaccagctcatggattctttgattttttgaagggtttttcatgtctctatctccttcagttctgctctgatcttagttatttcttgtcttctgctagcttttgaatttgtttgctcttgcttctctagttcttttaattgtcattttagggtcttgattttagatctttcctgctttctcctgtgggcatttagtgctataaatttccctctaaacactgctttagctgtgtcccagagattcttgtatgttgtgtctttgttctcattagtttcaaagaacttacttatttttgccataatttcatttttacctaatagtcatttaggagcaggttgttcagtttccatgtagttgtgtggttttgagtgagtttcttaatcctgagttctaatttgattgcattgtagtctgagagactgttatgatttctgttcttttgcatttgctgaggagtgttttacttccaattatgtggtcaattttagaataagcatgttgcggttcttagaagaatgtatattctgttgatttggggtggagagttctgttgatgtctattaggtctgcttggtccatagctgaggtcaagtcctgaatatccttgttaatttcccatctcattgatctgtctaatattgacggtggggtgttaaagtctcccattattattgtgtggaagtcttagtctctttgtaggtctctaagaacttgctttatgaatctgtttgctcctgtattgggtgcatatatatttaggatagttagctcttctcattacattgatctctttacctttatgtaatgctcttgtcttttttgatctttgttagtttaaagtctgttttatcagagactaggattgcaaactctgcttctttttgctttccatttggttagtaaatattcctccatctctttattttgagcctttgtgtgtctttgcacattgattggtctcctgaatacagcagactgatgggtcttgattttttatccaatttgccagtctgtgtcttttaactggggcatttagcctgtttacatttgaggttaacattgttatgtgtgaatttgatcctgtcattatgatgctagctggttattttgactgtcagttgatgcagtttctttatagtgtcaatggtctttacaatttggtatgtttttgcagtggctggtactagtttttcctctccatatttagtgcatccttcgggaattcttgtaaggcaggcctgatggtgacaaaatctttcagcatttgcttgtctgtaaactaattgatttctcctttgcttatgaagcttagtttggcaggatatgaaattctgggttgaaaattcttttctgtaagagtgttgaatattggcccccactctattctggcttgcagggtttctgcagagagatctgctgttagtttgatgggcttctctttgtcggtaacccaacctttctctctggctgcccttaacattttctccttcattttaaccttggtgaatctgacaattacgtgtcttggggttgctcttctcaaggagtatctttgtggtgttctctgtatttcctgagtttgaatgttggcctgccttgctaggttggggaagttctcctggataatatcctgaagaatgttttccaacttggttccattctccctgtcactttcaggtacaccaatcaaatgtaggattggtcttttcacataatcccatatttcttggaggctttgttctttccttttcattcttttttctctagtcttgtcttcatactttatttcatcaagttgatcttcaatctctgatatcctttcttctgcttaatcgattcggctattgatatttgtgtatgcttcatgaagttcttgtgctgtttttcagctccatcttctctaaacttgtgtttgtgttcttctctaaactggttattctagttagcaattcctctaaccttttttcaaggttcttagcttccttgtattgggttagaacgtgctcctttagctcggaggagtttgttattacccaccttctgaagcctacttctgtcaattcatcaaactcattctctgtccacttttgttcccttgctggtgaggagttgtgatcctttggaggagaagagacgttctggtttttggaattttcagaattgttgagctggtttttcctcatctttatggatttatctacctttggttttgatattggtgaccttcggatggggttttggtgtggatgtcctttttgttgatgttgatgctattcctttctgtttgttagttttccttctaacagtcaggcccctcttctgcaggtctactgtaatctgctgaaggtccactccagaccctgtttgcctggagtggacgcaagcggaggctgcagaagagcaaatattgctccttgttccttcctttggaagctttgtcccagagaggcacccaccagatgccagctggagctctccagtgtgaggtgcctgttgacacctcatttgtgggaggtgtcaacctgctgggaggtgtctcccagtcaggaggcaccggggtcagggacccacttgaggaggcagtctgtcccttagcagagctcgagcactgagctgggagatcctccgctctcttcagagctggcagtcaggaatatttaagtctgctgaggctgcacccacagctgccccttcccccaggtgctctgtcccagggaaacgggagttttaggtataagcccctgtctggggctgctgcctttctttcagagatgccctgcccagggaggatgaatctagacaggcagtctggctacagcggctttgccaaggtgtggtgggctctgccctgtttgaacttccgggtggctttgtttacactgtgaggggaaaattgcctactcaagccttggtaatggtggatgcccctccccctaccaagcttgagcctcccaggtcgacttcagactgctgtgctggcagcaagaatttcaagccaggggatcttagcttgctgggctccatgggggtgggatctgctgagctagaccacttggctccctggcttcagccccctttccaggagagtgaacagttttgtcttgctggttttccaggcaccactggggtatgaaaaaaaattcctgcagcttgctcggtgtctgcccaaacgtctgcccagctttctgcttgaaaccccggtccctggtggtataggcacccaagggaatgtcctggtctgcaggttgcaaagaccatgggaaaagagcagtatctgggccgagtgcctagttcttggcacagtccctcacagcttcccttggctaggggagggagttccccagcctcttgtgcttcctgggtgaggcaacgccccaccctgcttctgcttgccctccgtgggctgcacccactatctaaccagtcccaatgagatgagccgggtacctcagttgcaaatgcagaaatcacccgccttctgcattgatcttgctggaagctgcagaccagagctgttcctattcagccatcttaccagccacccccttatctgattttgtataagcttagagtgatataggaaaggtggcaggactgaaaatataacctctaaaactgggacaaacttctgacttaaaaatcatatttctgtgagatccagctgtagaaattgcaatgtacttaggctaaataaatggtgaaatgaagagattttgattttaaacagtgttcacagtgttaccaacagggatgacataaatatatggacataaaaattttttccctataaagttcaagcttggtaattttctctccctcacacatcataagtatgtattgcaagcatttttttattactcacaatttctaaaaagtgagattggtggatgcctacctggcatgggactcactgttcttccctttactgtagtttatactggtaatgattatgatcctgtgtatctatataaagtcctttggttcacaaatgcttttatatcttttatttcatattagttgtatcctgtcaataatcctgtggagtagaaatcacagcaaaattaccgtcagttctgactatcactagatggtatctttattttctttgatttgtgcttctacatgtttggaagttgattcgtcacagctcacaattgttagtatacatattttaaacttggtatgttaatattgaccctggttgggaggaggattggaatgatgctaataaacttagcagtcttggtatattttacttgtggtgatgtgacataaccccctaccccagaacccaactcaccctgctctctattcactgagtccccttccttctgtaactacccagcccaaaccagtatctcatctctttcctcactcccattctcgttagatattttattatttccatagtatttatcacagttgaatttatcttgtttattttctcacttttattatggcctcttacaactagaatggaagcatcacaaagatacagattttatttgtttatttatttatagacagagtcttgttctgttgcccaggcttgagtgcagtggcgtgatcttggctcactgcaacctctgtctcctgggttcaagtgattctcctgccttagcctcccgagtagctgggattacaggtatgcaccaccatgcctggctagtttttgcatttttagtagagacggggtttcagcatgttggccaggctggtcttgaactcctgacctcaggtgatccacctgcctcagcatcccaaagtgctggaattacaggcataagccaccacgcctggcccagatttattaatttatttaaattgtgtacattgtatcatccagcacatagagcaacaggtgtgtgaatgaaggataaaatctagatggtcaggccttgaaccacacaacacttccaccctgattaaagctgactgggcaacagctgggcactcgactcaagggcagccgatccttaagttagacagggatgtctgacacggactggatgagaaaagataagccaaacaggcagattccctcccttaggaatttgcagcaaaagccataaagagaatcaacattacatggtggctgtggaagtaaaaacatgaatagaaagcagttgtaagctgcaatgagtccaacagggatagagacaagttgaacatgaagaaatacttaaaaggcaaagagataagatatgtccggaaggaataaggctcacttagttctgaagccccaggaggagccaggttaaaatggtagagtcagagcgtgaagagtcacagcctgctgcctgtgtgttcagtgcagcctgatctccaaacaagcttctgcttccctcatttcctccatgggaacctgcactacctaacatctccttgtttggggcaagaggtgtgtttccttggtttccgtgttcttagaggacctctgttcttatatctaaaagagactaattcaactgtccttcttggtgtcgaatttagagtgccacatgtttggctctattcttggaaaaaataatctaacattagaacataattttataatttacagagtgctttaatgtatattatgccatttgcttctcacagcaacctcgctctgtgaagtttctttatttcctctacgtgggaaatttctctcttacacacttcttgatcattttcatctctcctttcacaggcatcacagctttatttgagtgaatgccttacatttttctattaaacactaaacgtgtagaaagcagtttatctctcatattgcttagtgccatgtctcatacaacattgctgctaaataaaagcctttttttttttttttttttttttgagacagggtctcactctgttacccaggctggaatgcagtggcacaatcatggttcacttcagctttgaccttctgggctcaaacaatcctcccacctcagcctcccaagttgctgagttgaggcatgcaccaccacacctggctagttttttttttttttttatgttttgtagagatgaggtctccccacattgtccaggctggacttgaactcctgagctcaagcaatcctcctgccttggtttctcaaattgctgggattataggcatgagcccccactgtacacagccaaatcaaatctttggtcaaatacggaactggctttaagactgaacgtaaaacaattccagaaactctggttgcacttattaatatctatactactgatttagaccttaattcataaacttttggagttgttacttagaatatttctggccaggtgtggtggctcatgcctgtaatcccagcactttgggatgctgaagcaggtggatcacctgaggtcaggaattcgagactagcctggtcaacatggtgaaacaccatgtctactaaaaatacaaaaatttgctgggtgtggtggtgggcgcctgtaatcccagctactcgggaggctgaggcaagagaatcttggaacccgggaggcgaaagttgcagtaagctgagattgtgccactgtcctctaacctgggtgacagattctgtctaaaaaaaaaaaaattcttcctcaaatgtatttacattttcacattttgttcataatagtttctggagaacctactacaatatttactgtatgaattcgtaaataaatgaaaaaacctacttaaaacgtgtccagttataacattagtaaacagttttagattcatttattttagttattccaagcatttgcttaggtttttattctttaaagtcataacttcctagactatgacttgattaggttatttatatttgctgattgcttttcttcctatgtaagtggtgttctgaggactgagtctggatgaataatgtcattatccatggaatccacatttccctcaaagatgctaggatttccctttgttttatcttgctgttttatttttaaagatgcagaagtaaagtggggagaagtaaatcaacaaccaaaatgcacaaaattgcaagtctttttcaaaggtagtagagatagcactggaattttgcagaagattaatacatttcctttgttattactactagatatcatgttctaaacaactatatttttatatactaaggtcatatgttggagattcttgataatctttcatcatcagtattagctgagagtagcatatagataaaaacagacaagatagcacttgttctttggatgattcttcccttgagaaaaatcagtgattttctgtttccttagctactctgttaaataggtagtcatgcattctatgtatggatataattgtatagctttgttgagccagttaagtaagcaagtggcatgattctgccagaaagtctcttctctctatactaaactgtcatactcactcacacaaaaaatgcgcattgaccaaccacccttcttttgtatatgctgtgcagctacccctggaaatgtttccatttgcttggagaaatgattgtgtaacattcatttgaaatattcagaatggcagaattttaaattcaaaaaataaatcttacacttgtacagtaatttacagagtgggaaacaaagacacatgcacacgtgtgtttattgcagcactatttacaatagcaaacacttggaaccaacccaaaagcccatcagtgataagctggataaagaaaatttggcacatgtatatcatagaatactatgcagccgtaaaaaggaatgacttcatgtcctttgcagggacatggatgggctggaaaccatcattctcagcaaactaacacaggaacagaaagccaaacaccgcatgttctcattcgtaattgggagttgaacaatgaaaacacgtggacacagggagggcaacatcacacaccggggcctgtcaggggtttgggggcaaggggagggagagcattaggacaaatacctaatgcatgtggggcttaaaacctagatgacaggttgataggtgcagcaaaccaccatggcacgtgtatacctatgtagcaaacctgcatgttctgcacatgtatcccagaacttaaagtaaaataaatacataaacaaatacataaataagtgaaacagaaaaaagtatatatatatatatatatatatatatatatatatatatccataaggaaaaggcagatccacagattttgccttacctacaaatattccttctattttatttatttattcaccatatatttatgtaacacattattagatcttgatcaaaaggggaaatgtgaaagttgtcagtttcaaaacagagtcacttgtggtaaaagaacaacaacaacaacaaaacacttttgtcaaatagagccagggaaagccgtgaagcttgattaaaaaaaaaatcacaaaagactctgctacacatccacataggtatatagagcaactaaaaagtagaaagaataaaattgtaataaattagagattatatttaaagtacacatagtaattcagtgttttaaaagtttatagttaatttgtggaagaaaatattagcctctgtgacatcgtggaaacagtacaaaatgtttacatcagaatgtggctagccttgctttcttgggaaaaccactttaagtctgaaacacagtttcccaatcccaaagtgatgaacatataatagctatttcaaagcattgttgaatggttgcatcctatgaggcaaaacagataaaactttggtgtaaattgttaagtaagatagcatatctttgtggtcaaagctccttttcttcttaccagagttcattaattatattacctattacccccatttttgtgagaataaaaattgctgcatatcatattttcttgacagtcatttctttgtaaggttttgctcttttagctggtgccttctgctccttttttcacttgttctttgctccagaatcaagtgttcagggttttttctctccacaatagctagtgacaattatgtgaaaagaactgaggactaaaagtctttgttatactgagttattaacaaaggaaacatttactttaccaagagcaaaaaaaaaaaaaaaaaaaaaaaaaggtatcattacctttggtcaatgttcagaagggactggaaatattttaattataatgaccttctattgcagttgggttcattttaatgaggtaagtttctagtcttcttgaaatattttcacgttttgtctaatgacctcctaatttctcagactaaattaaaaaaattgtgggggacttttttgattgcagggtgttgtgaatgatttaaaaaaatgtataaaacatagtcctccttgagagggttatgatttgtctcccagcataattaaaaatacatgaaaactaggaaaccactttcaatgggtgagagactggtttcaagatagtgatgacttgtaaggcactacaaagatattggggaatattgaaaacaaactacttcattctgaagattaaaagaaataacatgcataggagaaagagccaatgctaccagattagatgtcattactaacaaaagaaaagaaaaacagacatggctacattccaaataatcttgctccgtgccaggagtagagaaataatattgcaatgaatactataggagttgcgtttcaagataataacacagttttaaaatttcatcttcagcccctttcctttataaatcagggaaaaaaaggcatgcaataaacagatataagttgaaggaggcatagatgcagaagctattgctggaagcagttctacattaccccttgaaaatcactgaattttgagacagaagggctgacttttaactctttcagaaggttgaaggcaattaaattcattatcctaaatatttacatttatataattctttacagtttacaaagtggttttgcagaagttatccctttaaattaaagaggcagatgatgttcaatacaccaggctgtgaggaaaacatgtttttctactcagaatgtttaaatcctgaggcagtccggcggttgtaaacaactgactacagtactatggaggctcaaggagggaagcaaccaaggatgtaaaagtaatttatggaagaagctgtaggtggcatctattattttgtttcttctacatccttttcatttggaaattgcctctttctcttactgtgatttggatgaggctatgaatcaaagggtagtgcgcccctctacaccgcagatgtggttacatgaaccgaggtggtaaattagaatgtgctatgtttctaaccattgtgattagccaccatgatcgtgtggggccaatcagatttaagcagggtctcttcacttgaagtcctcttttaaggtaattatttggatgtttgaagagattgcctctctgtcctactgagggcaaagtctatgtagttctgaagcttctggtggctatttattcctaatacatggggaaaaacttctggaaaatgtagccaacccaaaagaaaaagagccaagaaataaagagagaacatttttgagcagctatgctaagccagtcaactcctgatatttttacttatataagccaatatgattcatatttggttggatgtatttgaaatgtgtttctgtcatttatatccaaaacagttctgaataatacagagactgaactcttttaaaccaaggtcctagttcagtctatctatccatctatctatctatctatctatctatctatctatctatctatctatcatctatctatctatctatctatcatctatctatctattatctatctatctatctatctatctatctatctatctatctatcatctatctatctatcatctatctatctatcatcttaaagatttctctacacattccaggtaggataaatgcatttattagttcaataagtattccttgagtgtcttctaagcactggaaaagtgctggttatgatgtatttctctccctttccttttaccattcctcttaagagctttgaagtactgtgactattaagctgattgactatccccatgattatagcatgaatgtcatcagaaggttttgtgctctttccaagcggaattccttcctctgacattatgagtgttcaagatatcactggcatttatgaatgtgtaatctggagggatccagattttgtctgtggtttcaaaaagggaaacaggaaagtatcatgaaagaaacatagcaggaacatacatccaagctggtgtagttacactcacagtggtgtagtggctggcccagcttcaacaattagtcaacaggctttaaagtctgagacgtttatgaacttgctttgactcagataaaaaggagaaagggaaactactttttctttctgtctgtgattacatatcttcttatctgtgtctgagtatatattaaattataaaccaagtctaactgcagtgtcatatggaaattaggctttccatatgttaattttctagataactaaaaattacctctttacatgacagcattgttttataacattaaaatatttgaaagggacctttaatcacacatttctatgttttcttaagcaaaatatgttaataataatgtagttacctaagtggattccatgtggtggaccctgtgttagccacatacattcaacatttcatttagacctagtgtactgtgaggaagagatggaatctttatttaagggagcagtaaactgagaatcatggttaagcaacttaaccaagatcacaaaaccacagggtggtagagctgggatttgaactcagatatgtctgactccacagctgctatttttaacagtgtcatcattaagaacataaagtgtgtgtttcgcaaagattaagtgatgctctctctggctacaaatagtctaaactatttgtcctggcgcaaatgtcctggcgcatgctgctctttaagttatgtttgtcttttataattttctttatattttttctttattgttagaatgctagctgtaactctttgctattgtaagcaggcctgactatagcaaaatgtgtcctccatttcagctgattgcttcttatctgctttaaggctaaataagtttgttagtgatttcaggttctctgtgtagccatacagaggcaataatgatgataataatatagtgatcatttattgaataccttctctaagccactagttgtattacatatgtgtctacttaatctccacatttagacatttctatttgttgctcaggacttcctccccaactgttttctatgtctcaggtaattttcaaacagatgatattggctgataaatgataccatgcttaagtgagctatttagacacacacacacactctcacacgctctcacacatgtgtactctcatctacatgtacattcagaaactcagattacttccattgatctttctgcttctggtcagatattggcaagtataaagatcagaatgagaaaacctagaatggtgatatgcaaagtataccttcaatagagtcacgatacgctcatttgaaaataatcgaactacttccattaagtaccagaaggtttgaagacatcttattaatctgtgtaattattcatcataatgcatcctcagtacctacagctacaaaagataggacatttatctttaaatgaatgcttctcaattatgccaacatcaatgtgttttgctgtaatatttcctgggtagccattaggtggttaattcatacaatatgaacgtacattgttaagcacagcgctacttggtaacttttgcaaagtgtgcactgtaaatgtatccttagtaaaatcaatttttgctgaaatgtccccacttgagcaacattcatatggagtttcctggatttgtacacatttatctaaatttaaagtaagggatagtttttttttatgtttgcttgatttaaaaaattaaattaatatgttattcctctctgacattgggttcaaaacaaaaaacagagaaactggttttcttgaaggagacaggatgtaatggctaggtagactaacatttcttttgacttggttttggagaaagtttttgaatggcttgtgtgttatagtccatatgagttttctctgagctaacattgccaagtaggagtgtgtgtgtatgtgtgtgtgcacatgtgcaagtgtgcgtgtgtgtttgagtgacacggccagatactgccactcaagtgctgagaccaatgaactttacagatgtgattcaatttatatttagacctacctctaaaagtatctaatagaaaattaatacctttagtaaactgcacattctaaacatggttttaccttatttattaataggccggaaaaagttggactaatattatacctgagaaagttatagactaccatagaccttagcagatcagccttgagcattttcatctgaaacatctaagtgttattacttagacgttttaggagaaatgcatgtaagagaagaaaagaccttaaaggacatctggttcaaccatctttgggtgcttcagtttattctcatgatattccccttgccagtaagaatctgccctgattcaaagagataagttactatcatttagtttgtctaccttcaatattcttggaactttggacatatttctgaattttttatattcgtgttttactctctgttaccttgtttccaggttctagatttcattaataattataatcagtgttattaaatattgtagtgtttctaaaaatccagctcttcttccttgtatgagatttatattgtgaggatgtgattgatcagaatcttgattttcagcaggatactatatgagaaaagccagaggggatgctgaagatttaaatttggagatataaatgcattggtagagaatctgaaagtcaatgatagctatgtgtacctagccatgtcttctgggggtaattcaatcgaatagttagacctgctctaaagaacgacactcttagaaaaacaaactcatgtgacacaacactttctttgtatccatcttcatatctagagatacatattaattcttggcaaaagaatgagtttgtggctgctgccatggccttcatccatgctttaattgattttccttggacaatttttcctattctctcacataattctgctgtgtatcattttccactctagacagtgtaacgtcatttcagaagaagaggaatcccaaaatgtaaacttagaagtcaatactgaagcaggaactatgatgagtctcgactgctggtggctgcttgtatgactttgggttcattattcctttccatcttttttaatggaatggtacttttctgtttgagatagtttaaataatacagaacagcagaaggtaggatgtggtctcttctgctctagcccttcgtctcattctctagatgtaactactgttaatcacgtggcatgtagtgttccagatcgttcactatatccatacagatgtatatatactttattaataaaaagttaatttttctacttatgatatttttgtatttttgatttttatactaagaaatattactaaaatattcttccgaatgaatttaatttcatatactttaatatttttattaccttcaaagtattctagaatatagatgtatcataagtttgtttcaccaaataactgttaggttgcctccaaaattttaatattacaaataatgctgcaatgaggaaaattgcacataatatctttgcacacatgaaaaagtatttctgaggaataaatggctaaaaattttgttgctgaggtaataattttgcttcttaaagtttttgatagatttggatgaattaccctccaaaacatttgtattgatttgtaatccatcaagttaatgagagatgggcaagttttttaaactgagctctagttttcttgtgcagaaatgggaataaattacctttttttctcaagattaatatggggattcgataaggcaatgcatgtaaatcacctagcactgtgcctgctagaagtggggtgtttgataaatctttattcccatctgtttactttccaactactctactttatacaaagcaacaacatgcaattgttagataggtctgatttttcctctcaatttttccagttggattaagtgccctgttctcagacctatgatattcagacctacataagcactgaatttcttgtctcagtcagagtttgttctagtcactattgttatatattaatcattgtccttctgtgacatatggtacccaccataatcagaatctcaattttttttttttttgagatggagtctcgctctgtcgcccaggctggagtgcactggcacgacctcgactcactgcaacctccgcctcccgggttgaagcgattctcctgcctcagcctcttgagtagctgggatgataggtgcatgccaccacacctggctaatttttttatttttagtagagatgggctttcaccatgttggtcaagctggtctcgaactcctgacctcgtgatccacctgccttgcctcccaaagtgctgggattacaagcatgagccaccacacctggccagaatctcaatgttttaaaaatactttgcagatgtcttctcagtcttcttgttgtgactcttcatttccatgttttggggattttaagacatggatttctattttgaatgattcaacattaaagtgtccactttgactcagtctcacaaaacgtcataaaggtggctctgagagattgcagatcctaaattctgaagctcctcatcactacgcctatgctctctgctcctttgttgaaggactctgggggacgctctggtatttcctttccaaagtacccacacttcctggacaccacccttactttctaggattgcatatgccttccccatacttcatttttcctgggtacttaatttatgacttcaattgattctcatctcaaagcagggatgagtcctgtctgagaagtgaaatgtgatgcaagaccattcagtaaaggagacacgtctttgacttcaagtatctgttgcacatgaaattgagtccaggtttataagctaccttcgagaaccatctaggcctggaccctggtagtctccaagtctgggtgggcttttcatttatcagaatactgtctcataaccatctcatgaatgtttgcgctccagctacccaccacagaaacaactcgtttaagctttggacaactctgactgtgaagacaacttcattttatttaatagataatgcttactctgtgcagatactactttaggtgctttacaaatatttactcatttaatccttaacggctgcccagtttttttctggtttagcccctaaagagaagctaaaatatctgtaatacctcatctgtatagcaaccttcaaatacttggaaggcaaccaccaggctcacaagggtctacactttttcaaattaaaggatcccagttcactcagttgttccacatgctgcacagttgtgagttatttcgtatcctgaccactctcctttgaatgtccttttattttgtaatgactcagagattctggctcacagatgtgttttgcttgacacaatatctattttatttgttttgtttttacatccaaaagtaaaaacaaaaggaatttgactatctttctgctgggcacaccctctccagcttcaaggtttcatcagtgcttactgtctttgtcccgctttcactcaacttggtccccaaaggtgtctatgtttaagacccctgctaaagtgtcatattcagaactgaacctagatgcaatctagccagtcacattctgatcgaggagggccttcatgctatgatgatagcaatactgcaaattcagatttgtgtatttcagcacatttccttacaatgcatttttaacccatgagtcagcctctgaaactggatttaatcactttaccttcaaaataaagaatccacttgcaccaaggcattactgaagagtgtatagtttattgacagtttagaattggaggaaaaagagagggtttgtagaacacagcatttccctccaagtttcttttcttagccttatagctcttgggtcttcttctctactttcttatctgctttttcaccgctaccacttagctgtaatggttcctgcttcccttcccagaatcctgtctctggggcttctcaatctctttcccttaattacgcagtcttggcccagctgtgccaaacctagtggtcacacttgtcattcccttggctaacaacagaccctccacttactaagacctatttcatagaagtcagtgagtgattgcataaccaaaacatattgtttttgtatcacaataaaatcaattgtgttagagctaagcaacatatctgacaggaaggtcacattcattaatgaagataacacagctaattatagaaaggtaggcaaagaacccagcactgggggttccagatctgtatatatagcattgctttatatacaatattactagaaactgtatttgttcacgagctgtcactaattgtaagtacagtaagtcttggtgatattttagattttatttcatgtacaccaaagtggataactgaattttaaataagcccaattaaaattgagaaagttctagaaaatggctcagattgctctaattccctgtatgaatcttgccatgtctttcatcatgtcttggctggtttggtgtcctgtaatggtgacagttttgtttttccttttcttagtcttattttgtcactcttccttcaccttgcacatacactatagttgctgcatatcagattatagctaaaaggctgctgtatttctttcccttctgagttttggcataaagtatgttttgaatctcctgatacagggaattttgcaaaaggtaaaaaattgtgaagtgagcatttccaactacgctaacattggaatctaatgcagcactattacagaatgatgggattttagagttggaaggaccttatcactcatctcatctgatcctcccctacatttaaccatgaggagatttaggcgtgaaaaggtcagtcttttactgagagtcgtagagccatttagtttcagaaccaagaatagaactcagctgtcctaaccctagtctagttgcgcaactccacacagctttcatgtaaaagcaaataaacaaaatggcctatttctcagcattgttttgtttttattgatagcaaaggggatcatgtgctacttacagtaatctctaaaaattttataataatccttgcattatcctgttaaactgttgctgtagctctgtgcttaatagattgaaatctattattcataatgccatcttgttcctgttcaaataacattatccttatgactaaaattttatggagccatacttgatttcttagtggagtgagatgatacatcattagagaaaagagttttcatttgtgaatacgattcaatagatatttttcaagcaccactctgagtgtggcattattgttggcacttttttggatgcagaggcaacatatggcatgccttttagcctcagataactgatactctgctgtgtgcttctgagtgtccagaagcatctgaagcaaaacagtgctgcgcctaaggagatggtatagggtggtggctcaggtcacgctgggtttgcatcctggttctgttgtttagcagctgtgttatcttgggcaagcaactgtagtcaagccttagtgtccacatctggggacaaaaatgcactaacttcatatagttatttcaaaaattctgataaaagacaagacagaaatcatttggcacatccccaacacgtagtgctcaaaaatgttagctaatgtttaaaatctttatcaccttaagtcagtgaactctctatcaaagaacagtgtagagcaaagccaattatctcgctacatttaggaaaagaaaactttggctttggatagatttcattgattggctgactactggttgattgatctaggtgtgcttgtgcttgtgcggctcagtggagtgcatttgcccatgcagtaatctcaagcttggaaaaagaattctaaggataaagttgggaatagcaatcgcttcagtggggtgatatctttaatttaattttgcattatttgttttcatgagaaataccctccagatagaagtctccctccctttgattgtcagtttttattagtcacctcagattcttagacaaaggcctcctgattggatgtcaattacttgggttctcatcctttcttatctctaactcactctgttgttgctaataaattagcccctcagaggaaacatttgagccaaatggtacaaactatcttggaaaacttgaagtattttgtttggtgatctaaaataatcaaatgaactgactaattacttgccaattattttctttcttgtggttcttaatttatatatatataaaaagtaatttatatatattagtaatttatatattcattttccctgtttaataaaaaagatatgtataatatataataaatatgctgtgtattcataaaagagtatataaatatacatatattgttttaatatatattttatacatatttgtattatatattttatatatatataatttttattaaacagggaaaactaaatatgggcaaggaaaatgaccttaatacatctgtatagtctgaaaaaataaattatggctaatttaaaatgaaaggtttcttaaacaattttgcagtcaggctattaataatcattttcgcaaagtggacaacatataccaggaatattagagattcatgaattgctgtcagtttgaatttgtatatatttcctcatcactaaaaatactgtgatctagtatgcagaggaaaaaagggtcctggaaaataatagtgttgttaaatgtttttgtaagacaatttctaggtgtgaaaagttaattagtgatataaaatacatatttggataattaataccagtgaagactagacacttgttgcctaaaacaatgaagatactttttttatagagtcatctagatgcttatatccattttccaactcagtttgcgtgtctagacagagcttcttttaaaaaattgttcaaatacaagaaaattctcatagtaaaatacttgagaatttgaaaggctgagaaaaaatcatgattccaatgtattatattaaagttgaaatctgagacttgtgaattaacatcacgcaatgttttaaaatatgagaaaatatgcactagaatcaagaataaccctaaatccaactaagaaaagaaaaatcacttccctgtgaaaaaaaccattctcacaagtcctcatgtccctccactcctgactttatagtcatacagatagttccaaagccagcaaatattgcattttctacacttttccatcatgtaatcattttacaaaacatccaaaccagtacagctcttttaaattgtagcctctcctctctttgtgtatcaccaattctttttattaattcatggggatgaatgcaaaataaatacagttctttgggtgagtccagcttacccacagcgcgtgctgccctctcacaccactcgccgctttgttgctctttctctcagttctttccaacatgcccctgggtctcatgagacgacccaagagcgtactgcatacttggataggattaagaaaagaaagaaaacagaacggtgcccagcagcatttataccaaggtgcagtgcccttcctggcacacaatgtgagaagagagcagtcaaccatgcaaggtaaacagcaaccagcctagtgcaactaactaaaggtagtgaaaagcccactgaagcacagagctgagtttagaatatttacaccaacgctcctctattttactgataaggaacctgaaattgagccataaatttatttatgattttaaaaaaacctggaactatgatccgtgaaatattctttatagtttgttttgaactattttagaaatgttggtggagggatgacaaaaattaaaatacagacagaaatgagagaggcttaattctgaaagaagtgttctagcttattcatcttgttttacagatttaaaaaaccccaggcccagagaattgcagctcctatccttgtattgtagccatgcagaggagacccactgatcttgttactacacacacagctcctttttaattacttaaaataagtcctgtgacagcttgcaggatctatcctgctgattctgtaggattgcaagttttccttttgcctttcattggatttcaaacaatgtattgagtgtggcaactgaattattacagtcagttatctgtgtattgtatgggcaatttaaaattgacttgggttaaaatgggaaacttcacactagtcataagaaactcttcagagatgcagcaattcaatctggttcacataataacagcaataaagaagaaattgcacatagtttttttttctctcttgcaaagagctaaaaccaatttacagattttcttattaatcctcccaaaagaacgacagccattttgctaaccaggaacctcacagcagaggtcaggaggccaagtgtgtgcaggagctgaaggcactggtgtggggctccaaggtttcgtttcaatgtctcttggtgttgctaacttgctgtttgatggtggtcaaatcacagaatgtctctgaaccctagtttactcataatttaaatggtgggtgagataatctccaagataccatcaaggatgaattctcactgatttcacagagatctcaatgcactgcttagatttccttattcttgatacctttacttaaagccttcactaaagctctattaacgttactattcttctatctgttccccaattataatatttctttttctctttttcataagagtaacaagaaacacagtaatgccctttctttgtaaaggcatggccaacgaataagggtagagagaataaagcagtaattggacagttaccttgtttatctctgtggaaatcttaatagttattcggaatgctttaaatttctttaatggcccagtcttacttttgcaccctcaatgtaagcatctcaccttctactttctcagttcgaagccattcatcaggagtcctttcaaagtctttctaaatgtttccgctcttaattcatccttttcttactccgccaccccggtactatactaccctcatctcagaggaaaaagagagcctttgtcatcccaaaataaccatctatagtggtcttaatccaatgtccagttcttctaagtaagtgactctcatacctagatacagatttgaatcacctgggaaaactagtaaataatcctgatcagaatcaggaccaggtgttagtattataataagggtcctaagtgagttttatgttaagaaagggttgataaccagtgctgtggaggtcttgattgattaattaatccttgtttattcttcagctttaatccattttactggctccttccctcaaacctgcaaatgtgtttaggctattattatcctaataaaacaccttcccttgtccctcaagctacgattctatgcatcctcctctctcccactttatcttctcaatggttctgctccttgttagccctgaaacagctttctatgcagtcacctcatggcatacacagtcccttatgcttcatgctactcaggctctctttagggcctgacattcccaatcacccttgccactgtaaaattcgctcttcctttggcctctgtgattctgcattctcctggtttccttcccagttgcacaaagtttcctttaaaagtatgtgtcggcagggcgaggtggcttacacctgtaatcccagcactttgggaggccgaggtgggtggatcacgaggtcagcagttcaagaccactctgaccaacatggtgaaaccccatctctactaaaaatacaaaaaaattagctgggcgtggtggcaggcgcctgtaatcccagctacttgggaggctgaggcaggagaattgcttgaaaccggaaggcggaggttgcagcaagccaagattgtgccattgcactctagcctggtcaataagagcaaaactccatctcagaaaaacaacaacaaaaaaacccaactatgtgttctatgagtctccaaagcatagctgcttcttactgttctacactagttgccattaaattattgatttattctctaccctaaaatgattgcttaagtttaaatgaccacatccatgaaaatgactctggaatctgcatctcttccctgagttgtaaattatacttcaccaggatatatcctcatctggatgttcttcctccacctcaaactcaacctgagtttatcatcttctactgatttcaccccttctctgtgacgtcctgctgaacttcagtcagcactgtccttccagttttctgggcttctaaattctggttatctttcactcttctttttcctatttactctccatatcctatgcatcccaagttgtgtctgttttgcttttgaaattttgaggtgtctatttccttcttatttctaattcttattcgagcctttgtttaagacacagatcaaatatgcagccttccatgatggcatccccaactcctgatcaaaattagctttcccctctttggtgatcccaaagtgctttgtgagtctagtataacagtgagcacattctactttctaatatagcaccatatgtatagtctccaccacttaggttagaccctcaatgtcagagatgatatgctttcttggatgtagttagtatcaaggatgagggacttacaatctatctgagtaaacaaaaatacctccccattctttctcaccctgggcctcctccccacaaactgcaatacagtggaaatggctattcaccataaagtgaataatgacaatagggctttgtaaacatagcccatgcttttataacaacggctagttttgattgctcacccatcatatgagcacatgtgttatatatgtcatttcattcaaacttcccaaaagacctgcaagataaatattatgagcacccattttatagatgtagaaactgatgctcaaaacattaagtaacttgcccaagatgacacagctagtaatgagaggacaaggtccaaatcccaggtgtgaaagcccacgctcttaacttcatgtgattccattagactaaattgggtgttgtgtcatacaacaggagctggcggcacagggaagaaaattttttgcttggggaaggtttgtggacaatgaagagttattttattgagaaagagtaagatgttctgttcagtctttcttttgactctcattgttcttggaacttcccagttgcagagtccacctgagcagcaggtagcatgggggcttaccatgtgtgagaggacactcttctaacataccagctcctctgatctgtcagaccaccatttctatcacctctcttttcatcctgaaggcatcaactttaagtaattctaatttaaatgacaagaacattggtcttggtcatatgttcttatcagctacctgctaaggaaggattagtttgacagccttgtgaagtcctctctagacaacctctatccataataaagtcacttgcagagagcagagacccatgtccttacaaaagacccatatgcttttgaaaaccaagacattgctttcttttgaatagtaatcagtactaatttgcaagcaacttgagagtaagggaacatgtcttccagtctgtttatcaaccctagtttcttactagcctactgacttctgagtgtaaattatacttatttcatagaaataatgcaaacttgagttctttatttttgagaggaaggaaaagcataagtgcttttttttctgaaaggggcctgagaattgattgttaaaaagaattgaattaaattaatttgcaagttgggtcacttgttctacatcagaaagaaagaaaggaattgacatttctaataaggttctaggtgacactggtaagagaaacaaatatttttttctttaaacaatacatgtttatgaactctctaaatatcactgtgatttgaagttcaattctgtaacaccagatgacaataggcatggttctttggtaccaattgtagtttcgagatttgactccaataaatatttcaggcttgaattcttattaaaagttgattcaaatttatctacaaccatatcctctgaaggttattattttacctgcatagtggtttgaaattttattgcgatggggataaagtatataactctggaatcaggattggatcaactgaatttgaattaggccttaacacttgttaactgtaactttgaagaagttgaaggtcttttctgtgcctcattttcctcatctgagaaacagatattaaaaaaaaaacctacctcatagctttatcatcagcatgagatgagataatcatgtaagcataacacctgacacataataggtaatcaataaatgttagctattaataattttaatagtttttgttaaaacaatctggctgtggtatatttcttttcaatggttttgtctaattatttgcatttttcttttctctgcttaccttcattccttcttttatttttaggaaaaccgatatgaacaatcctccagtactatagaatctctggctgggtgcggtggctcaaacctgtaatcccagcactttgggagaccaagacaggcagatcccttgaggttgggagtttgagaacagcctggccaacatggtgaaaccccatctctactaaaaatacaaaaattatctgggtgtgatagcatgcgcgcccataatctctgctccctgggagtgatgaggcaagagaatcacttgaaaccaggagacgaaatgaaggttgccgtgagctgaggtggtgccactgcactccagcctgggccacagagggagactgtcaaaaaaaaaaaaaaaaggaatctctctgaagctgatcagagaatgctcagtgctgagtgacattcctcagccaaaaactctctttctgtgtctgggtcacaattcccatcatttcttgcatttgagtggtttgtccatgccttttaattttgttttcagtgggcattgttaaaagtctgtgttggccaattttcagttcatttttcaaaagttggaatcaaatcttataaacatatccagattaagactagccacaaaccaggatttcaggttcttttctagcatggtgccagattgtacttaggtaggataataagggaaatctgtttccttcctcacattttatgtatctgtcataaatcttaactgactttagatgaactgcaatttagaagttcaagtttcaggtgaaggttcgggtgaaatttcattttaatgttttattaaaattgattttcttttgtgattatgaatgaatgcaatatcactgcagaggaagcatgttgacaagcagtgacaaaaatccagctaagataacaacatagggcagttgttttctgcttatctttattgtagaactaccagtaagaaacgcttaggtgttattaggccttcgaaacacgagtaacatcaaactctgcactagttagcaaagaagagagaaatctaagcatcattatgggggctgtcagaagtgactatggtatttattcacaaatctagtggactactgaggcttaaaatatgtgacttattaggacattgcttttgaatactaattataataattttagaataatagattgtttgaattcctataatttagagaaaagcaaaagcaaggatacttattatatttgcttgagttaaaacagttacaaatatatatttaacaaactaatagagatggaaagaactatggtctaaattctacctagtttgggaaaaggtgattttatagaaaagcagccccatgcatcatattaatgagctcaaggctgattttggggaaatgagacagaaaggaaataaagcttatagtaccattgatatacagttatggaaattattaggtaaataaaatagaggcataatagtattttgtctgaaatgggttgtcaaactgaattgtcttaggatggtggcaaaagaatagaatattttgggggggggtttaattcaaaaaataaaactgcagaaaaatagagaaacaatttgatatgttaagaaaagaataggaaatctgttatgaaacattttccttctttgctggactcttctttctctttcgcaactcctcagtgtgggagtttgtggtgggagtgctgttacatcattcttccacagtcgacatttagaatcgtatctgtaaaccttggtcagcgtctggatggggaccagccatgcattaccttgtgcatatacaaagggaattctaagatagattttgatccacaggaaagcagattgcctgggttagctgccccagacgtttgtgtgtgagtcatatgctttcttctgggttccggagctctgggtgtggcagctctgggttccggagctctgggtcctcttaggacctcacagtccagacctgcacacctggggcttgtgcacactggtacctagggagaaagtgtgtcaaatggccagcaggtgtcaaatgggatatctgaaggtctgtcagtctggcaggcttcagcttgaatattggctttgccatctacaagttgtgtaccttgggcaagctgatcatgctttctgagcgagagatttctcaagtgcacgatagggattttaggactcttctgaactttaaatgacagaatgcaggtaaaatgcctagtacaatccttgcacttaataagggctcacaagctataactgatattattgtgtaaactgtctgccatctacaaaatgctcaataaatgttgtgcaacattgtggatatttttaaggacttgttagcagtggcccccttagaataaacaactatttctccaaggattttccctccaaatcctctctgaaaatgcacatgtcttagtgaagaaggttcgaaaggccgaagtgatgggttcatagttaggtcaggcagtgtggcctgcagtttacattagaagagctggtggaaagcctggctctgccattacttgtcatgggacttgggataggactttcaatgctttttaacttcagtttttctgtcctaaatggggatggtgatgctcaccacacagagttgtgagaataataggagataagtttagagtgaattcaatgtgtaatctacaaaataggataagatactagttcatcaactactaaaaagccctcacagccagcctctgggaagaaaaagcatctgtactgttccttcatcctcaccggccctttgtcaactgccctcactcttactttccttttggggaaaattttttcttggaaagaaaaatctgcatcctcaccacttgctcagtcctttaatgtcattgcaacctgattttggtgcttatcctctttgtggaaaatggtctcccgctttttcattgaattcagagccaaaatccaaaatccaaaatccaaagctcttcctttgaattctctgtaatatttgacatgattacccactctcatcttaataataaaaacaggagtcatttattgaaatgctactatgtgctgcactgtgctagccacgtggcatacatgatttcatttaacttatacaaaagcccttgtgtggccggtattcagatcccattttacagaggaggaaactgaggcaccgagatgctaacttctcaatatcacataattgccacactagtggcaaaaaagagattggaaccctgctaatactgatgttccttcttagagctttgttcttttcttagcttctgttcgtaatattttttctgtctattaaaatatccaaagcactgtgtaactttgtatggcatttctctcactatctcactcctaactcctgggaacttgacctacctcttgaataatgtataatcctcaaggacctcttttattataatgccttcgtggggcaaatctttttttttttttttttttttttttgagacggagtctcgctctgtcgcccaggctggagtgcagtggcgctatcttggctcactgcaagttctgcctcccgggttcatgccattctcctgcctcagcctcccgagtagctgggactacaggtgcccgccaccatgcccgtctaattttttttttttttgtatttttagtagaaatggggtttcaccatgttagccaggacagtctcgatctcctgacctcatgatccgcccgcctcggcctcccaaagtgctgggattacaggcgtgagccactgtgcctggccgggcaaatcattttttaacaaaggaaatattagacaaagaatctctccttggggttgcaaagtctgaagattaaagtaagaatctgagaatgacatcaattccttagttaatttacttatatagccaacataacactgaccttatcaaggtaagagtttcctttaagttaactggtcaagaggtatttttcttttcataaataatgcaaggggatagaaagatagctgaagagaaaaaaaaatatgcatacttttttataagttacatttggaaactattgttattctgattaacgacaaagaattccagccagggtagagtgtaatgtgatttagataaactctaggtaaagtaacaatgcacaggagagaaatttgagcaagtttgcatgatgctcagatggaccgtaaacaagagacaatgagtgttgttacttttcttgttgacctttatttaacagaactctctcattagaaaagagcttgctttagcttattgttaaaactgctgtgtgctcacctgctttgaaaaaggaacaggcagcctgacatggtggttcacgcctataatcccagcactctgggaggctgaggcaggcggatcacctgaggtcaggcattcaagaccagcctggctaacatagtgaaacctcatctctactaaaaatacaaaaaaaaaaaaaaaaaaaaaaaagctgggcattgtggtgtgtgcctgtaatcccagctacttgggaggctgaggcaggagaatcgcttgaacccaggaggcagagactgcagtgagccaagattgtgccattgcactccagcctggatgacagagtgagactgcatctcaagaaaaaaaaaaaaaaaagaaaataaaagaaaaaggaagaggcaaggtaagccccgaggcagattgtttcccttcttttctctcttctctctatttcagagtctctctaattcttctctctcttcatgctaatagggttagcattactatattcatttatatattcagtgggcaatatttgtaaagtggatgtaaagcatagtatacaacattattttaaagaaaagcgtactaaaatatagagaaccaccaggtataatgaaatttccattttgttagtgaaaataaaatattagccatttcatattgcttatctttttataagatacctctacttatactgaccaaaattctataaagtaagtgacataatctcacttaataagggaactcaattatttgcccaaggacatgcactagatggattttgaactctggtcaactttctttctattcatcaattcatcttttcataaaatatagttcctgtcttcaattttgtaagtagaagtaaaaaaggaaaacttatttatacatataattatgttacaagcaagtaccaaaaggtagaatctgctgaaggagttcaaagattggagaggctccttctagcttggagtgaaaggaatagaaaaggaagaggaaaaatgtgaaaggattaaggggaggctctatttaagaggaaccattgagaattggtagattttgggaggtggaaatgagaggggaaagagaccttttctggaggtttgaaatgcatggggctcagggacagagatataaagacatgataggcatgcttgagatatggcaagtagtatagtttagttgtaacaggatgagagaagggaggtaaggattaggctagaaattcacctggccatcaaaaattggagggtcttgacatccagtcctagaagacttgatttgcttggttaagtgagagccaatggctgtgatgagggaagttccatgatcaaggtcatgcttggaaactattcatttgcatgatctaggcagaagaaacccagggcagaaagagattgcaagatctatctatagtatttggtaaatttccaggccttacccaaaaagattctgattaaatatgggccacatgaagtgatgtttttacaaagctccccagataattcttgtgcaggtgattcaataactaccactttgaaaaatatgagggtagagttgaggaggttatttagcaaactatcttaataaccaaagtgttccaataaagggactttatttgtctgtgaagagaaaagtgacagaaacaaaagatattttgaaagaagaatcagtaggccaattagatctatcgttggaagaggattcaaagacaattattggctttaatagctggaagatttgtggtacaatgaacagaaacatgagacagtatagatttattaggtctgataagagtttaattttgccaagtgaattttgaagtctaaagatgacagccacagggaaatgtcaacataggtagtagacaacacaggacttgggttggaagagcaaggttgcagctggagagatggcttcggttttaagtgtggatagatgatatttccaattactgaaaaaagctctaaagtgtaagagaagataaagaacccaggaaaggagaaaagataaaaagaactataaagtaggagagaacctgggaagttaaatagttaaacataattcaagtcaagtaaagagaggatttcaagaatatacatgtacacatacacacatacatacatacacatacacacacatatatgaaatagaggcagtgagcatacactataattttaaaatgttttatgatgaaagggaactgtagtccttttccagtgttccataatctcaccatctatccagttgtttaaccagaaatatagcgttatctttgacatcgtctctttctctatccacatctcaaatatagtccatgaacaactctatgaagtgattttctgtcttagttcattttatgctgctataacagaatacctgagactgagtaatttatacagaacagagatttatttcttacacacctggaggctgggaagttcaaggtcaaggggccaatggtggaaagcggaagagcaagagagcacacacacataagagagaagtgaaggaggaaaagggggcccaactcgtccatttattagggacccacttccacaataactaacccactccagcgaaaatggcattaatccattctggagggcagagcactcatgacctgctcacctaaaggtcccaccttttaacactgttgcattggggattaagtttctgtcacgtgaacattgggaatgtattcaaacatagcactttccagacacatattcttctggccatctttccgccatctcacagctgcctgggctaggctagcatcatttggattactacagtagactttcatctggcttcttggcatccactcttgttcttctccattttgatcacaacactgcagtcatagatacctttggaaagtgcaattaccttgtcagccccctgcttaataccttggatggctttccattcctcttagaatgatgagcaaactcattcgtgtgacctgtaaggtcttacttagcatggctcttttctaccttttagccttatttccaaatacatgctgctgactcttgctctccagacacattgacactctgtcagggcacagtccccacttactccctgtaacaggctataatttaaagggtagtaggatggagaatgaatttttaaaacgtgtagacaccttaggacgttcataggttgtggtgaagtaagtagcttcctttttatcttgtttattaattttcttattacttctcactagaatacaagctgcaataaatgtacttaaacaccatcatgtgcctgaaatcaaaattacaactttatatgcttatatgaaaaaagatagctttcttcatttaggcatgtaaatcagagcacatttgttttctttataccagtttttttcactttcagttcagcaaacactaaatccacgtgtcaatggggaaatagacctagaagactgagaagcagattgttatagacattctctagccagttttctttgtaccagttctattgttatattttctatatctacaaaaattttctcatatttgggtatatgttatctaaaccttccttctcctttgtacataaactttatttctctgtcaacttttcttttgattcattccaacagagaaatgagtcctgtgctgttctatttttatgttttcaaagcaaacagttaccttgagttatctacacagagagcctcacatggctgttcccaagcaccacacagataaaaccaccatgaagcaaagttaaaccagtgaatgatcatcttcacagagagggagaaatgggaccaatcctgtcaaaatgcgatgaaaatgtggcctctaaaattaggtattattttcttctggatgtcaggtttcttttcccccttctaatttcctcatttgaaatatagtaggaaacaaacaaacaatccagagacaaccaatagttccagaatttctacagaaatagaatccctctgtaggagttttagttcaatttgatgggactatacattcttcatatagtctaaaattttcagatgtttatgcaaaaccaaactcaagacattcaagaattatctcacgagcaagatttaccaactgcttctctatccttctcataaagtgccttatgcagcatgtccggaatgattctctgcatctgatgcaaagcaagaaagattctagatttgcatttgaattgctggctatttttaactttctcagagttttactttgagagatattttacctttgtggatgagttatggagtcaggtgcttgacctttaccagctttccagtgaaaaatccaatgaggaaaagacttcaaacgtcttacaaaaccaaactcattatttatgaagtcctgaactatgtcagtgacattcccagacacacatagtgtagtaagggctttatttcgagaaattcccaaattgaatcctctttagtaagaatcctatgtggactaattttgtaaatgatttccaatcatagaaatgcctgtgagtgataggattctacaaacaaacgggcagcatcagaactcacaagctgctctttccttccccttctataagagccctctctacaccatggtgtgcaaaggggattctgtggaattaaaacttgtgtggtttctggaaccctaaatccccagtcaagcagtctggtaaataaagataaggcatttacttgatttccctaatatggctttacctcaggggacagggtaaggaggagggcatatattaatcaagaggttgtttttaaaaaacctattgtatatacttaatatagttctagtcacctgagatttataaaaaacatcgttgctgctttcaatgagtttgcaacctaattatctggctaaaaattagactttaaaattttagttgcatattttactacttgcctattttttttctcatcagatagatttgttgaaaactgaaaatgagctctgatgtccagaatcttttggagttttaattttacactcaggaaaacaccaagatgacaaggaatctacatgtgggactcagctgacattttccctatttagtataatgctggcaaatgtaagccaaagccctcctgtccagtattataagtatcttctctttctttcctaagaagtcagcagacttgacatttgactgcttattcatttcctcccctctccagagctgaaattctcacccaggatcatctgtcacccgggctttgatgaggagggggtttaggcatttgctgtctgaactgtcaaactcaaagtcagctttgaatggaaggtcccaccatgtgctttagaaaaatagggtagtggctgtgggcagacagcagagaggaagggagagagaaacattctgaaagagcatctgatgtgggcctgggaatataaagagaagaggtgagaggacaggtgaatgagagtttagtgagcccatggcagatccagggcttaattattataaaataattccctgcagcactgtatttctgaggtgtatgatttttttgaccatgtgggcatttaccctttttaggtcaaactggacactaagaaatatactatagatatgattgatttgttctttcaagaaacacttattgagcattaactactgccatgaactgtgctaggcattgaaagtactgtgatgacgatgacctagtccttaacctttcagagacttacagtttaaggaggggtggaaggaggcagataagtgaaccaaatatcacagcataatgtattaaggaccgtggtagaattatgcacagagtattcttgcaacaaaaaggagaaacatattgtgaagattaagaaaaaaatccaatcttaaaaatctgtgacatttttatgacagtgacacatacacacttttggagagatatactagtgtcgggaccagttgcacttacagaggaagatatgagaaattacaaaatattaaagaacacatcccccaaaattcaaccattagttaccaagcttcaggaatcggaaatttgagaagttatttggtacagaatgaagctcagaattgaccaaagaaaaggaaagtttaacctatgtagtagatcaggatttgagagtttcccaatagtttaattggaggtagtgacatttttattgagcaattaaatgaaacaccctttggattcaaaaattaatgctaaatctagagtaactgatgaggttaattcccaatttcatgcacgttgtgcactgaagtcatttgtatgatcatgcattcacctggtcagtttctcagggtttcagtcagcgcagccacagacagagtgaagacactggacatgttgaagctgaagtctgacaaggtactgggttgaagttctgtcccaggtatgtgaattataaaattaggtttggtatctcagagaggcagacattttctttgatttttccagaattgcttctttcattttgggcctaataagcagtgagcaaatgtcatacatttcaggaaaattggtttctggttctggtcaaatgactcttaaatgacatctattgaatgaatttggagacatgacatgccaagaagtaaaaactaaaggggacctttaaaccaaatcttgcagtattataatacatgcaattaaagtttatagtttcatcttagatgataatagtttaatacaaataggtcataggcagtatgcactaatttgtgccaagcatggtgctaacacctgggcacaggttatttcatttaatccttgtgaccccatgaataatataccattactacctacattccttctgaggaaagggagactcaggcaagacgcagaactgggattcaaaccaagatattcagggctgtgaaactggttttctaatactccattatacagcgtgtctagaaagggctttcttaatttgtaaatttgcattaattcagattgtttcctgggagtttgagtgtacttttgtttagggaaggagtacatgagacatctgtattgttcaaatatgaaagaaaattctattctttagattcttcctttaaaaaaattctcctaaccaccagtagccttcagtcatcaaatacattaaagacagttaatctaacattctatttatcaggagtctttacagctgaatagagagtaaattttgatagcatagtagctctttgaccttgagcaatttgattaactttcctacttttgagttttcttatctgttcaatggaaggtataatatctactgctgaggtatgctgtgaagattaaataacaatagtaatgagataactattactttttgagcttctcctctgatccagttactctaatgggaaagtggtatatattatgacatttaaacttcaacccaaccaggtagttattactgtcatcaattaccactgaagaaactgaggctcagtaaggtttaagaaacttgcccaacatcatgtagctatttttatatataaagtttcggtgctgcaaaaggaatagcactagaatgtaaaattttctttttaattcttagcaagacaagttacttctatagaaggatgcgcccttacagatggatcaatggtgagcgcacacttggacaagggaggggaaggggtcctcatccctgacacacgtggcccctgctgctgtgttgttcccctattgggtggggttagactgcacaggataaactaattccaattggctaatttaaagagaatgacagggtgggtgctttggctggagtcggagcagagcaggtagcaggtaatcagaatgagtcagggtggagaatgagcaggtgatcggactgagtcagggtgtagtaggtaatcgaaaaaggttgctttatgaggaagttaagtttaaaagtagaaggcaaagaattgaacatactgatattaattctttgaaaagaaatttagaactcatatctaacaacatgaagtagaaaaggtgagattcaaaccaagtttatcttgtcttaatgcttgtgtttgtctcagatgctgcatccttttcacatcacactacctcttgacactataaaacattctagaaatattggacattattatttaaatccaatttgtacaataagattattctattatattttaattaattgaaaaaatgtataaatggtagagaggtcactgtttaacagaccatgagattgtaccatgctgattttgaaagtgtaaatgaatagtacgattattgattgtattaactgattactactgctgcacaggctactggggcttgtacacttagaaagccatactgaccccaatcatcccttccaacttggttttaccatccctttcctcattgccaggggagagcaaagaaaatataggacgtgtcaacatttatagtcatttgtataggagatctgtgaaaatgtcctttttgaaatagaagtcatcgtttggataagatcaaattcagacaaattgaatttttatttgctttgacatggattggaatcagtgatgtgattttttttccccctcctgtgcaggcaggggaaagaaaaccatcttgataaatttccttaactttcttgaaggtgctctttggaaaaagcaacagagtgttatgacacagagctctgactctgaggttgaaaatcttatacttggaatctaatgctactaatggattttgatgaaggaaaacatttaattaccacattgaataatttgttcattcgtttgacaattgctcattaagtgcctactacataagagaccctattctacgtgctatgaatacttcagaaagtaaataaaaattcctgctttcatagagtttacaactgaggagaagggagatagacaataaaatcttagcatgtaatgtcctggggataatatggtatgctatggagaaaaagaaagcattgtctgggaataagaagtgtacaaaggggtgtgatttgaaaggtgttttcagggaagttttctgacattcagcagaaacctgaaaaaaagtaaagaactgagtcaagtgactatgcaggggaagaattctttaggcagcaggcagagcaagtcaaagcctctgaggtttgagagtgcttggtggatttgagcactagcccaggaggccagcgtggtggcagtggaatggaaaagaatggtagcagaagggtacagggaggaaccagattattccagggcacatgggccactgtaaggccttggcttctgtctgcagtcatacagaaagacattggaggcttttgagcagaaggtaggacttaacgtcaatattgaaatgaccaccagtgttgggtagagaatagaacgtgtgggtgggagaagggaggcagaagtaagagaccaactgtgaaaaatgtgtaataatgtgagagttggtagtgacttgcccagagtggtagcagtggaaatgacaagaaataattaaagctaggcacagtttgaaggtagaggccttaggatttcctgtgatgtgcaaaagaaagagaggatcacagaggactccaaggtttttcttctgagcaagtgcaacagtgaagttcccatttacacagatggagaaaaatatagaaggaggacattttgtggaattccgaactttgattttgaacatatcctgtgtgagatgcctgtagacatttaagtggaaatgttatgtaggtagttggatatgtaagtatggaggttagaggaaaagtcaaggttagggattagaatttgagagctctgtatacgggaagtttctgagggcttgacacttgattgaactcatttagggcttaagtatagataaagaagaaatttatagttgatccatggaacactccaatatttaaaggtttaggaaataataaggaaccagcaggagattgaaaaagtctctgtttataaaataaggagaaatcacacacacacgcacacatgcacactcaacacacacacacgcacacacacactctctctctctctttccccttttttcagaaacctgagttaagaggtaggagtcagtccctgaaaaaggataatgctgtttttcttgaagtaccaagaaacctaaggatgaagaggatttgacaatggaatggcatctttaatcagttgtgcttagacaagcaaatgactttggaatttgaggtgaagacatactacatgatatgcagcaggatcacagacaaagatggcaacaggggctggagataaacttttatgatatgtcttattcttactattgatataatagatgctctttgaaaaaaaatgcaaccgtgcaaatgtatgaagagaataaaatgcaccaattccgcctcactgagataactgctgttaaaattttgatgcatttttttctagtttttttcatacacacatatgcattaacaaaattatatacacattcttgcagtctgcttttttatttgatatcatagcagaaatatttttggaagctttatttttaattatattttgatgagagggagagatgatcaaagggaagattgtgttagtttgagaaatatctggtccaatatcttccaataaagtaggatgatgactgtctgtgtatataagagagacagagaacaaggacaactctggattctaagtgtcttggtgactgatacgatggctgtgttacccatggggactgaggaaacaagactgactaaagctgtgcttattttttatatcaagggggactgcagacttgctttttgcatagctggagaattgtttgttttttattactagatgtagaagaagctgaaagaaaaagatatctcaaaatgttttggctggtatctaccaatgtaaacaggcaataaaattaatttgtgatataaagtagattgttttgactaaattacttggtttggctttcctcacagcttataaagaaaaaaaaacaagcaccatatctcctctatatttttcaggttgtgggcatacagttcagacacatatatcatcaagaatacggaaactttttcctcatcaatctgtgaaaattgtgaaaattcattttagtttatcagtaaagtgttatgagcataaccatagcaaaataatttctcctgttgacaactttcaaggcacgaattgcctctaaagtaaatacttgatgcaattagattcagaagatatcggtaagaccagaggcagtgaaagtccttttacccttaatgaaattaatgaaaataatagaaataatatcgatttgtaaacctctaacaacagtaagtaaaatgtatgtgtgtatttttgtttgtgtattttgagctctctctttctatacatgcattcttgactggtcagttggctggagaagggacttcacaaggtcaagggcacacatttcactggtaacatagaagcagaaaacgatgtcatagctatcaaatgcaccaagaattccatacagtcatttcgtggacatgtggtctggtcacgtaaagaccagccaagagagttcggctggttcagtaaaatccaccacactgttaggaaaaacaaacaggaaactgtaacatagatgccatctactatggggcaatgatttcaactttgtatgtggattacagtatatatatagaagctcacaaatacacaaactcaactgcatcagagaagagcaaaagccctatttatccttaattgcagtatttagctgaaaacaaacatactctaatcatcttccaattttatttctagttaattctgcattagtatggaagttttagatgcatttgaagaatattgcattcttttataaatttataattatttcacatatctgccattcgttataaccaatctatgcctcagaatacagagtttttcagaatataaagcaacatctttacagctcggagtttgtgaagtccactggggaaacaacacaacagcactgagaaattcacttactatgtttctgccacttcacattgagggtcatatgcaatgacaaagactgaaatttgcaccatagatcaagttgagaaaacactggtttctgatcattgtacttttgccttagaaatctcagcctgtgatttcctgacatttccttttctgattgtgctataccgatcccatataaagtacaaagcagtataataagttcctctgcaaatctattcattatcgactggactttggaacccaactgcccctcccatctttgaaggagaattgtgtttttatgctgttcatttaaaaaacaaaacaaaacagaaaggtaaaatgtcaagtccataacctctaactaatcaccatttccatctgcagccccagcagttgttgaaaagcaagagcaggaaccgagagaaagccccttcttttagtcgaaaactcttactctgcttaggaaaaccatgaacccaaacagtgtgggtcagcctttcaatatgcaaaacggacgaaggtacccaattttcttttataatggattacataggaaatagttctttgtcagggaaatttgtcgtaatcttccaatttcccctttgaaaaatcagactctgaccatcaaaacacattgactgtagaaataaaataacaggtttcaaatcttaaggacagcttcctctttatttttcttggacctttatgccttccacccaccaaagtcttcactcgaccctaccagtacagtagcccagccggcaccacaggtaagaggcaaagtgtttccttcgtgacctctaagcattctactccacaggaaaagcaacgtggaatgcacactcagcaagctgtaagcctggagccagtttgtcctggaggcatttctgccataaaacataatactgtccactgtgttttgctctaagcagagcgtctcccactcccctctccctcctcttgctgcttctcactccgcacctggctgcaattcacgatcctcacgccacagaacaaacaaaaagcatgaaacagcaacagattcctttgttttacatgcaaatcctacctccggtagttgtcacatcttcctcaaaagccacgcttaatttttaatgacagcgatccggtgcagtcctccaaatagccaccggtaatcatcattacctcttgtgcctaaagcctttgtggaccattaatgtcacaaccctttctaactcatagctttaatactccctgctcaaaatgtctgaaagagtttggaaggacaataggagtgacaggcacgctagacagccatgcttgaaattagttatctggagctccgttaaagctgcttcatactgttttaaagcgtgcaggaggtaggatttattagcctatgataggcatgctgtttctgtttttattaaatactgtaataggctgtctgttagcaatgctgtgataggtccaacatcacttccccactgctttcgaattctcatattaaaaagggagagagggctcacagtcttccttcccagaccgacatcgccctgcactggatcagatttccaaatcctccttaactataggagagagagccaaatagatattttctatatggaaagcgaacttggtagtaaacactctaggattctccaaacaattttctcactcccagtaagggattcctgctcttcccagttacaaaaataagtgttctctggagttaggtatgaaaatcaatccaaataggaaaagttctcattattactgagatatgacttaaggtacacatgtacacaaaatctcaaattatagatcaactagactgaatggatcattcagtgcataaagtgtttattttatgctgacttacaaagctttgtgtttcaggctgaagcaatcacatgccatgcacaactgtcaaacggcaagaatgaatgatggatggaaagaatgggaatgtgtacgttatcttgctccactttggacagtcatgatcatggaagatagaagagggatttcttaacattggtcagagaagagggtatcagttagctggaagtgctactctgaaaagttaagtacctttgcaagtaaggaagcggagaaagttcttaatagaactacacaatttattcattctcttccgcatttcctttcttcctgctactccaggagcaatagtattgtagtagttactacggaaactagatggtgtgctccagggaagggcttaaagagagcagcagatgtaatatggatggacatgtattatactggcctatagaactaaaaatgagtagcaattaacaaacaaaaactgctacaaactactacaacaaaatattagagagaatgattataaatcaccactacttaattattggtagttttgtaatctagaaatgctctaatgatcgggtcatagcatccattattttattatatgtaataactgaatatctgaattgctcagatgtctgataaagcaaagacgctgtttcctctgctcctttgtccctccctccctccctccctctctgtcttccttccttccttctttcctccctccctctctccctccctccttccctctctccctctctctctttcttttcttttcctctctctctctctcactctctctctctctcactctctctctctctttcgagacaggggtccactatgttacccagggtgttctcaaacctttctttttctaaactcctagttgtcagtttgaatatgccctaatggtgtgtgagttttagttgttacttgactggttacagtttcttctcaggaataaaacgtgatttagaggaaaactgtcctagtatcacaaaccataattttgttctctttgagtatccttatagtggttttcctgggacaaccaaagtcagaaaatacttattgcaactcaaattaaaaaaaaaaaaaaatctttgcccattaaattggtaggaaaaagagaaaaagactttttcaaattttcagttttccaagtagtaaaagaaaaaaaattcttttatgttaagagtccaagacatttcactagcctcatggtcatccaagaggaactatttctcaccagcgtaattaaattttcacagttgtgaggagtccagcgaatacaaaattattttctttagtacctcaacttcacagtttgtaattggagtaactgataccactgaagtgtgagtataaaaactccgaaaagaaattgttgaaaaacaatgcttaaagattttatgaaaatcctgtcttttataggcaagcaaataatccaaacatttgtaatagaagaattatttcaggggaaaagtatttgtgatattctcttttaataataatggggctgagcacggtggctcacgcctgtaatctcagcactttgggaggccgaggcaggcggatcacctgaggtcgggagttcgagatcagcctgaccaacatggagaaaccccgtctctaccaaaaatacaaaaagttagtcgggcatggtggtgtatgcatgtaattccagctactcgggaggctgaggcaggagaatcacttgaactcgggaggtggaggttgcagtgagccgagatcgtgccattgcactccagcctgggcaacaagagcgaaactctgtctcaaaaaaacaaaacaaaacaaaacaaaaaaaaaaaaaaaggaaaagtaatattacaaattatatctcacagttattttttcaaatgtaaggaagtgtttaaattataacctaaacaccaccactatatgatttagagagagaaaagaagagaaaagaagagaagagaagagaagaagagaagagaataggagaggagaagagaagggagaagaggggaggggaagaaagcagagaggagggatcagaaaaaataccccagtcgtatacttccctccaatttttatctgtggctaattcagaaaacagtggctaaaaatacaagagataaatgaataagattttgataatgggataaagcgagaaggtgggcctggggcagggattgttagtgacgctttctggaggctctgttcctggaggagcaaagaaagcccctaactcagacccatctgagaataaaggaggtttctggaaggagcagtgttcagatgggaatggggatggagcataagatggtttgttgtggtagtgaaagaggagcaggaaatgaggaagggacgctgaaggaggagaaagaagagaaaaaggagaaaagagatttatgaggaaggaaggaaagaatttcttgagatagcatggtattggaagagggcacaggctttgaaataaggcagcctgacttggaaacagttctgctagcctgtttccagttcactgtgttcaaatgaaatgatagcaatggctgttctaagactgcagtgatgtgaatgaaaggacataatgtatgagtgaagctctttacaaagagatgtactgaaataaatgttagttatcacagagcaggaagaaagagggagatgcatgattgaagatgaggagagggccacaataggaaagagaggagaaaagggataggaagaaaaggaagcatgaaaagaacctctctaggggaggtagaagagagaaaaatttctcctgttgaatcatataagatacaatctctttcttgcatttgttttgttttctggatcacatttcaatagctgttcctttagttttacctctatcatgaagtttcagataataaagtgtctttgaagctcataccttcttcaacaagagagaaacctatgctgaatttgttgaaagcttgttctaccattttgaaaacagctgatcggaggagtgaatttagtaactcttagcattacttttctggatggttccccagagagtgaagtttgggccggcagaaggcagggactgaagtgatatttcagagctatattaccaaacacattcagcaagaatattttgtgcatctgtaacttgataacatttcaacagcatctgctccctgaatgtacatcagagaacttgttctggaaagaatttgtgtgtgttaacaaatattaggttaagaactggagactgggggagagtggtgtgatcacacatacacagaatttgcagtttacgtgcacagcccgccagtgaaatggtttaatgaatggaacaatgaatgcataatttcattatgagtcatcactattaaaatgaaaatttgatagatacataaccagaaaatgtagctatctgttacagacacaagtgctaattatattttggagtatataatttatgctctgaataatacagcaagtaactgcttttgccctattatgactatttttccaggaacaacaggaaagttagtttagacactgcttccttactattatatttctgtgaatgttgaagctgactcactttgaagtgatctacagttccacattaggtgcatacaaaaggcattttctagtataaactcaaatgcataaacttagaaagcaattaaagacaacagttgaagaaaatctaacatcaaaccagcatcttatttctaaaatagaaatgaaatgctttaattggtccatatcacttttcacaaaaattgtccttcaaatttaaatttctctaaaaaagttttcatgaaatcataatttctaaaagtttacatttctggagtatatttgcccacatcacatttgatacttttagaataaagttattgggtggcaaggcaaatattaatagttacatttccatctaggcaaattgaggataagggaggtttaatgattttttttgcaatcacgtagcctgtgcgtatgtcctcataatccagtgttctttttatttcataaaacttttcacctaggtcctgtattttttagttaaaacttctactaatatatgcagcagaagattttttaaaaaaaattttaaaataagagagacaacaaagagaagctacgcactggtagaaaatattcacaagacatattttataaaggactgctatccaagctatacaaggaacacttaagacctagcaataagaaaaacacacaacctgattaaaaaatgttccaaagaccttaacagacacttcactaaggaagatatatggatggcgaataagcatatgaaaagatgctccacatcatatgtcatcaggaaaatgcaaattaaaacaacaacacactaccactatgcacctattagaagagccaaaatctagaacagtgacaacaccaaattctggagagcaacaggatgcaagagcaacaggaactatcattcattgctggtggaaatgcaaaatggtgcagccactttggaagacaataagcaaagcatactcttaccatatgatccagcaaacaggctctttggtatttatccaaaagagctgaaaacttatgtctacacaaaaacctgcacacaaatgtttatagcagctttattcataattgccaaactttggaagaaaccaagatgtccttcagtagctgaaaaaaataaactgtggtacacccagacaatggaatattattcagcactgaaaaagaagagctctcaagccatgaaaagacatggaggatagtcaaatgagcattactaagtgaaagaagccaatctgagaagtctacctactgattccagcaacctgatgttctggaaaagtgaaaacaatggagacagtaaaaagatcattggttcccaggagatgggaggtcaggggagggataagtgggtgaagcacagaaaatttttagggcagtggaaatagtctgtataatactgtagtgacggatcatgtcataatacatttgtccaaacccatagaatgtacatcaccaagagtgaaccttaatgtagactatggactttgggtaattatgatgaatctaaatatagtttcatcaatttaaaaattaaatataggttcaccaattttaatcaatgtaccactctggtgggagatgtggataacggggaaatctcttcatatgtggggcaaggaatacagtgagggggtatatgagaaacctctgtgtcttcctctcaactttgctgtgaacctaaaactgctctaaaaaataaagtttttaaaataaactacagaaaaaagcataaaataagagattgctggaatatatatatatatatatatatatatatattttctccttctatgtgacaaatactcatggctttttaagaaacattttgttttattgcaacttatgtttttaagatagagttgctaaatatttttaaaaggtgaactatagaaattcataataattctaattacagactcaatattgaataattctgtaataattgcagctgcccaggacttcctgaccggtgggttacaagcaaaaacccacccagtacgaccacgatttgggtcatgttcttggattatttgattgctttcccgtctctctttatcacaattaggagagcaagtcctataggtcctaacccccaccaccaaccttgtggcagttagccttacctgcaggttttatatagagttattaccattctgtgtgcatgtggtcaaatgggagaaggaggtacataataatataatatacatattaattaattttatctaaattttcagaatagtaacatcctctccaacacctccctgattccccaccaaacacagatagagatgctgcagagcccactcttggatcccatgagaaagcactggaataagctagtttaaccactttcagaagcaatagttctttggctgaggcattgcatttggcagaagcttattggggcttcattaccatccttctgaagcctgtcagagtactgaacataaatcagttttaaaataaaacataaaatagagcattgacagttgctgaggttttatttcatttggaatctcctacttcccaggacctagctgcagtcttcctgcttattggaaatatggactatatgaatgtggcactccaggctctgtgtatctatgtgcaatcaatgggaagatgatactggttgctatacaacatagcattagacatgatacctgctgctttcaatattatgttaattaaaagacatctgtcttccaaacaaaatggaacaaaaacaaaaatctttggtatgcagagagctctaaggttagctataaaaggcaaagatttatgtgtatgttggtatttacatttatgtgtatattttattagctcattttatgttgctagattcttagagtaaaagaagaaccacttaataaacaaaatgctatttagcaaaatgtgaatattttttgtgaaacgttcactttacaaaatgacagcataatcctgataaatgtattgtgtctttgctaggtggagaatttttaagggcttattaaattctaggcatctagaaaagtcttaataaatatttccttgtttcataatttacttagaaaaggaattggcaaaatggatataaacacatacatttgcatattgaagtatatttgtaaagttgctttcataaagggtgtaagttagataggatggtagtgtcattgtatgtcctgttttattccttaaaaatgaaacaaaaaatccctaaaccttgtttaattcagattatgaaagggatacacactcagtattgaaaaattggagtatcgaaaaaacataaaaattaaaagtatacaaagagtattttaaaagtttcctatcatcccacaatccagagataacttctattataatattaaagagcattttattgcatctagttttatatatttattttctccttatccttatgttttccatgttattttgaaatctttaaatctttttaataaacatatagtattttgtcatatgcatcttctgtaatttttttcaacaaccctcattggttaacacacaggttatcttcctttttcattagcaaaatggctttgctgaaggcttagtaccaaaatcttcgtctacatctctgattacattactttaggatagatttccatgcgtggattgttgggctgaaatgtacgaggattctaaagggtcttggtatgttcttgctgagttgctctgttgaagggttgtaccattttcatagccccatgagtggagtatgactctacttttggcagaagagtcatcatggtgagaaaagaatgctttattccagtcttccacacaggtttatttcattttctttttgcttttgggactaaagtggaaatcacttgtcatgtaacaagaggggagagaaagggggcaaaggaaaagaataactagtgttggcatttttatttcagtttcttgaagtagaaatgttttcattcttattgtgggaagagggaaagtgaagaactactgcaaagtctggtccctagattcatgttgttcctattgttcaaagcaaaatctcttcctcactgtgtcctttaaaaccttgggtatttctacttccaggggattctgatgtaagcaaatccacatggtaaatctggtgtgtcttcctggaaaatcaatttgctccaagactgtagggacaggagttttgaatttttgtgttctgtaaagtttttaacagatgcataagatcaggttattcaacatcattaataacgtaaactcagaaaaaaagatcaattttatgaactgggagtcattgggaatctggaactattttgtcttcagggagcttttgtgatagaagtcaaaatgaacagaaaacaagtcctcagtgagaactggtgatgctaatacaaaaggatgggagcgtacaatttcttggcaagttagaagaaacctatgttgcttgctatatggagaaagagtttatttcctaagattcagtatttttttggttgttacacataagaaaactgcccacatacaaatcagatcaacatcttgctaaaattgcattcaattaaatgttaatttaaatgagtccctgttttattttaatttctaccagtgaagtaacttaaattgtgtgtgtgtgtgcatgattctagggccatacctaatttatgtcttaagtatgctaattctaaagttatattttcaactgtgatagctctctggctagttaaaaacagtaactcttaaaatgagcttgaaatatcaggaaatatgcaagataatgaaggaaattaagaataacctgaaattatagacacgtgtcaaaactgacatccttaaagctctctacaaagtgcttgatagcaacaaggttgatagcatgacccaactatgtctggaaaacacataatgagaagcatccagacttgtcaaaaagtgtagaatgtacccaaatgtttatttaaaatttgagtatattatcatggaaatagagaatgacattttttcttatacaagaatacaatggataaacattccatgaatctatcatttctgaagggaaatttaaaaaacaatcacagaatttttgaagaaaaaaatcactagagttttgccaactaaaagaaaaagtcttgggtagaagtactagaatgcattacaaaatcaaacaagccattcaaaacaacttgacattatctttaagtttaaagcgttaccttttccatttctcttagaaaatgaagtttatgaaatagagacactttggtgaaatcttaaccatgcgtgtggccagatggtgactttgtaaaaattagaaaaagccaccccttcatcagaatttatgaaccttctgttagaaaataatctcaataagtagaaaaacactatgatgtctacatatatgaatggcggctctggaatcacagcataaaaaacctgcatgactacaggtgatagtcttgtatttctcaactgagaagtggtagcacaggccaaaataattgtggcaaatttgtgttttaaaaaggattaggactaaccttcctctttcccttatattttcatgataacttggataattgtctatttttatttaatactgtatttattaatggtcatgtttgtgatattaatttgcaaattactcaattgtattaaatgatgaagaattgtttagtaagtgagttatttaacaaaaacaatagtaagtgcaaaaatgtattaacaaagaagagattttacgatacagttcgttgagtgtggctcacttccactcttttcctttctccaatagactgatggccctttgcaggtgtgaccctgagctctgctggatttcttgtgaagaaaactccaaggaatggatgaatgcctggaaacttactgctggaagtcataaggcaatgacaagaaaatagcatatcattggaagacttgacccatgggatctataaattcctagggaagctccttactataatttgtttggtttctatggaatccaacaagaaaagaaatagcgaaacatgtgggttgtctcctctttggcactaagcctgggagaatatgaagatatctgaaaacaaagaggcttccttcaggtgttcaggagggggctaacactgcctacttgtatgtcaagggcccatgggagtagacactcccagaatgctaccacttggattctccagggatcatatgtgataccaatcagctgacaaagaaaataacaacccatctaaggggattcagcagctagaaagaaaatgagtatgccaagcaaactgaatacacgaccagcaaaatagaacttcaaaaggagacaaaatacaacattctctctctctctgtgtgtgtgtgtgtgtgtgtgtgtgtgtgtgtttgcatgtaaataacaaaattcaagttctggacacaatttttagagctaaacacatgaccttccaactaaactttttattagatatcaaagaagctggtcactgttgaggtgaagatcaagtgcaagatacattttgaggcacagagcaaaaatgtaaagaatcagaaaaagacaagagacttgaggatttaatccaaacaactgaacagctaaaaacaagagctacaggggcagaagaagaaaaagtttaagaaagagacagtatattattttctctgagaagaggtaaagctggaaacctgttgtaagcaagatttattgaattttctcatcatagtcttaaaagagcagtactccaataggtcttgtttactaaaggaagatttgttgaaagaatcaaacaactgatggaggctgatgaaaagaatacatgacgatcaatgacacttggtacacacgttcacactcacagacacatacacaaacgttggataggaaaaggctggctggcaacatgtggcaacagtgctctgtaaggactcttgaagtagaataaatagtcttactgaaagaggaattcagattattatttttaaaaacttggaacaagagttctaggctgactcagcaaaaactaggagccaggctaggggaggggataagtaaaaatccttccaaaggattcctatctggggaaaggaggagaaggccaagcatttaagatctcatattacagaggacaggagagggagcacattgagaagaaatatagcatcttggttgtatagtgtgttctggtgtgaaaatgtgcatttaatgttcaaaaatagtgtgagaaaagataatcattgatggaatagtaccataaaagtcccaaattaacaagaaaaaaaaaaaaagaaaaaccacaatagataatagcatgatcagcaaagataagggaaagaaaaaaaaaagaagtaatataaaataaataattaaaataaagtgtaaaggaagacataaaatcaagtacaatggttactatatcatttgtaggcagaattttccctttgaaagactgagacgtcagattgggttaaagcaaatttaacccatgtatatgctatttaaaagaaaataagataaaggtgaacaaagattgaagataaagaggtgaaaaaagaggtatcatacaaatgcaagctaatagaaagttataatattagtggcagctgatatatttaaacttaaaagcactatagaggataaaaaatattatataatgataaaactgatactacttgaagcaatgataatcataaacctatatttacccaccaattaaaaaacatcaactagctaaatacataaagcaaaaacaattaaaaatttgagaacttttaaaaagttataataggtaacactaatttaaggaagtgatagctctctctaagaattggacagattaaatatgcaaaaaattagtaaaatcataaagcaattgaagagtatcatacatcggtaagaatttgtaaaaagcttccatctttcaaatagagaatcacaattacaaaataatcatagtaataataataatggtgataattatgtacttgacta

SEQ ID NO: 59 - DNA, 321478 bp, Mus musculus
ccaaatatctgacttagaaaattaccatcggagctcaaattgcctttagttgtttacacacacacacatacacacacacacacttgtcttctctattcactggccatgtattcagcttggaaacccattttctttctagcatctaagtcaatgtaagtagactgtggtttcctctgtgtccttgttggctactgtgtgcctttttaggaggatccaagagtagcattctgagaaggcagtggtatctactcccgggataccaaggagacagtgttgctcacgtctggatacctggagtaggatactctcctaggattaggttaaagaggggccaaggtatatcattctctcttgaattcgataaaatcaagcaaattgtaacaagaagtttctttgagaaattagatatcacacaggtcacaagtttttcccagtagtattccacttgttgttgtagctgtgcgacttacagtggtcaatttccaggcatttttttttctttttaaagattttccccactgggtattattcaacagaacttgaagccactccatcggcaagctatcaattgactggctgaaaggaaaggtacggagtgagattccttcaacatactggatcatgggctcctcttcatcaatacagctttgtaccatgtgataaatctggctgctttctctttgccgtttctgacctggttaaatcatgctcccaacctctgctctgcaaagtgccctatatgctccctacagacatcagtcttgacacatgtctcaggattttcaggttattcttggtttccctcattatctttcatagtctgtgatatttcagcctcatttaaagtgatgtacttttctaactactaagtgatacaggttgaaaacataattttagaattagtataagttttaacaataagttaggagtggtattcaaaccacacacacacacaccatacacatatagtctgagtgacttcactggcaggaaataaaatgtagactcaagcagggtgtgctgcctcactcctgcaatgccaacacttaggagggagagtcagaaagatcagaagttcaagtttagtctcagctacacatggaattccagtccaggttagggtagataagaaagtgtatcaacaaaacaaagtgaatgaaaacttaaagaacagctcataaactcatctgtaagctaacacaatatgtgactgactaaaatactggaagaaacctgatccgatttgggttgggccacggttgcctttcttagcatccagatcagtcagcttcgggaaaaattatgtatttttctaatacaggagagggtgagtctcctttgatttatgaagatgccatttgagactttcttctctatcaccatccctagttcatgctttctgttcattttgactaatgcattccacaagagttctctgaaaacaaagaaagttccagattccacatgactcccagtcatcaagacgttttgttccctgaacttctgttttaaggatttaaggagctgaatagacaattccgagggaagaacactggtgttcttccagaggacctagttggattactagtacctacatggcagctcacaaccatctgtagctccaagtctatggaatctgatgctgtcttctggcctccacacgtaccaggtaaatgtggtacagacacctatgtgcataaattaactgttttttttttattaaaaagtgaggtttgatgtcaaaagctgatatgcacctactataaacctttatagaacagaaaatttcaagtttttgttcccaaagtctttaagcaagctgaattttcaagacaacacacagtgggtttatgcatatttgagtcacatcagactcttggaatccgtaggtcttaaaggattcaccagaaacattttactggagggtcagcccagaccttgtctgtggtttttccttctcactcccataatggtatcaaaggtacttcatttcaggagctaaaaggaaaaggccaagttagctcttttgctcttttgtctcctctttatcctcccttgttacatgacacctgcctctacaggaatcaagcaaagacagtaaagtggactgggtaaggaggacagagcatcctcctcttccacttcaatgaccctgacgaagtctaactccaagtcaggagtgaggctgaaatgatccagccttccatggtgcaactcagcatgtagggtgctcgtcatttcaaagcagccacccctcccactgtggaaatccatcctaaataaacacaaagatggggaccaagagttctgaacaaacacttgagcaaagccttgtgctgatggaaaacagaaaggttccttctcttcccctgtgggaatcatggggtcaccaacagaaatgagggtggtcctttctacagaaggcaccagttaaaaagatgtgaggatttcaaaacagaaaacacgttttaaggggaaaatgaattcatgaaatgaatgttaagacaagagaatgctaagttttaaaagtcgtcatatcagaagtcctttttggcttgtggcttaaaaatcatttcctgcacagcccagtgttctttaaaagcaaatactcacccatgtactgtcagctatgtgaggtttgtttttattttcttcttttgccttatattttctcaaaattttacttatttccctttctaaaaccttttgtgtctgtgtgaatccacttttgtacacatgtgtgacactatttgacaacacatgtgtgagtgtatgtatatatctggataaacttaggcatgcatgtatgagtctgtgtgtgtgcctgtaggtgcatgtgtgcatgtgtgtgcacgctcacatatacgagtgtgggtgctcatgtgaagagcagtggataatattgagtgttgctcctccttgccttctcctgtgtttgggacagggtctttaccactgcatatgtgaagctagctgacctgagagtttctggggactctctgtctctgcctggcatcttactgctgtggccctggaatcacagtctgtgtcctcacgtgctctttcttgaatggttttgcagattcaaactcaggtcctcctgtttgtcctgtaagagctccactgctgctaagccatctctctaagcctgttcacttattcttaaggcagaagagactgggacaggctttgtttcagcactttcatacacattgtactttgcccacatttacacagtgaatagagcttctggtctctaccacctgttttgaccatcagcatagagacagccacgaaaatatccactccatggacattacattatgaaatgagaaaatggttaagatttttctagatttttagaatgtgacaaactcttaaaagttatctaaggctgggtggtggtggcacttgtctttaatcccagcacttggaggcagaggcaggcagatttctgagttcgaggccagcctggtctacagagtgcgttccaggacagccagagttatacagagaaaccctggctcgactggggaaaataaaaaaagttctctaaataacaaagtagcaaagatattacaaaaattatacaagttgtacttttttgtctagctgggctttttacagcacacatttattctatgttaaaaagattttgccccatagctcttcctccttctaagatgttggcaacatgaagtgaaccagtaaaacactcacaggagtgtgacatgagcgtgctgatgctgtcctcctaacttcagggctgtttgaatttatttagttcagaaaacaaatgtcttttaattaacatactggattaaaagcagcaggtatcccaccagtgctgtgtaacaacagcctggaacaccatgcctgtgttctcaagttagcatgagaatcatagccagaccccaggaagtaggagcatccaaacaaaatagaactccaacaaccgccaatgttgtcctttatgtttcatttttaaagctgatttatgttcagtgttctgacaggcttcagaagggtggcaataatgcagccccaatcacctgcctgccaaatgcaatggctcaaccaaagaatgatggcctccgggagtattaaaatagctcatgtgacttttcctcatggtacccaagtcagagccctgggcattggtgtgttggtagaaagaagagtgagaaatgcagagtaatttatgtgtgtgtgttgggctagactccctccttctttcctttccaccacaggtacactagactatattgcattgaatccaaaggagcaagcaaagccacagagtgcagggcagaggcctgcagggcttgcccttccaattgttatagacatggggtagaaaacagtaagtggaagacaggcttccagaccagagatgagatcccatgaggatccctcaataaaggccattcagtgttgattctgcagttagacgagttaggacatgtcatggtatatcatctttgagcagctccatctacatttgaaaacataaacgtgttagaaaacattattaaaaactgtgtttgacaaagaggaaaaaaactatgtcagtgcttggctttatgtttttacctattttaaaggcttttttgcatttttaactttattattatttgtgtttgtggtggtgtgtgtgtgtgtgtgtgtgtgtgtgtgtgtgtgtgtgtgtgtgtgtgttggacatgccatacatatatgtgtataggtacagattctatgcagtccagttgaaggcatgttgtcccctggagtcccaggctgacatgggtgctgagaacagaactttgggtcctcagcaaaagccgtatgcacacttaactgcagagccatctcttcagccccaattctgcatttttaagttatactagtttcaaccgacattcgaaagcacgaatataatgcatatatcttgtggggtttgtgggaagcatccaggtatgcagaaggattaaattggactattgagtctcctcgggcattcattgctaacagtgaacattcaaacgttctttcttctagcttttcagaatacacagcagatctcattacccacagccaccttaccttccaaatagcaaaccactagttctgagtcctctccaggtacaagtcaatatccaaacttccccacccccacacactccccagcctctcataaaattcactcagctttgtaggagcagctgtttctttcagctctttcagtttagcccattgctgcaggaaaccaggtacccaaacaaaacctcagaggcttactattatttacaaacacctaagccataaactaggctggttccccgactaactcctaacttattatcccttttactctacctgagctcagcaatatggctggactcctctccctgtcttcttacatcccactttttcatgtcccaacaaaactttcctttccactcctcagtatagcccaactagaagtcctactgctaatcctgtctcaacttattggctgttagctttttattgacaggtgtctcttccacacagtgcacaggagattagccccacatcagactataggaaggggctggttgctaggtaggagaattcaaaagtgtagcatcacgcttagaattttgtttaaatcagaaattccatctgtgggaaaacacacagcacctctgctctttgccaacttactaaactttacataattttctcctgttaaatgcatgttgttgcaaaggacaaattacacttgttgtggctaactggtattccattgtaaatatgtgccttgttttctttacccctttgtcagctttttgtgactagtgctgtcataaacatttgggtacagacatgtctgacagactagtttcactgtggaggctgcatcatctccctaattctaccattttcaggtcagatgtttggagaaaatgtttaactttctccaactggtgcctctaccttactgataggcatctaagcccctcccccgtgtcttctctgctgtactcattcatttcttctgggcgccagatgcactgccctgcccgccttggcagaaaccatccattcacccactgaacctctggggcagttttgagatggacgattatacagaaagctgtggtaagttctgtatagctttaagagggaatgtaagtttggatttatcccaaaggacagatggatcctatgtgtcctggtccatgtatgctactgtaactgaatgtgtggaatggtaacttacaaaagaacagaaatagatctcacacagttgtgtgagtatgcaagttccaggatgaaggcctgcctatgcctatgggaagagatttcttgctaaatggcagaaggcagaaaagcagcaacaaattttgtttttttaatcataaaactatttctgccgttactagcctactaccacagcaacatagtcccttcaagtctctgagctctgagagtctcctcttaatggtgtgtctcttcagtgttgccctggaaaacagacttccaacacgttcactgagggcagtccaagtcagcactgtgctgcttgctgagtcttagtttatacatgagactaccaaatcaatgtgcaccctcaccagacctcaccaaatcaacctccaacatgctgtaccatgcacacaatcaacatcctagggttgtaccaagtatacccttaccacagtgaacaaaaagtcactgttgctacctggtgttccctgactaattctgactaaagcctagtagcagccaggtgctttagtctgcatttccctgtgactatggcatgcaacagcttttcacctgcttgttttgcacttgcatgttttcattagggagttctaaagtagatttggggtgtggttttaactgggtcgattccttcttgctgggcattgaaagttccttgtctgggtcagatacaatcctacacgagctgtagcttctgcaaatgttttcacttagcccatgactttctcttttatttttctatttataaattcttttcaagaactatcctttggtgcttacatacctgggtatcaaagtagaagtatatctggtcaccgtgttggaagctagtttcatttaatgcaaagaacaccgggctataagttggaagatggacatacatgctgcctggtctttaggaagctactttaacctctcttttcagtttctatcaatagagatagagcaattaatatttgcccctctgggcagatggctcagtcagtaaagcatttgccatacaaacctaagaacctgggttctattcccagaactcgtgttaaaaagctaaacattaaaagaacaaacaaaactgtcatggaagtggttgcttataatcccagcactggggagaacccttggagctgtttaaccagtagcctagtctccttcatgagttccaggccagtgagagatgctgtctccagagataatgtacatggtgcctggggaacaacgttcaaagttgtcttctggcctctctaagcatctctacatatgaaacatgcatatgcctgcacaaacacatgtgcacagagaggggggagggggagagagagagagctatgtcttgcctcaaatcaattttgttctgaagattgaaaactgtaggagagaaggcaggatggcgcacacctaaaatcctcatactcaggaggctacagcagggggtttgtcctgggtttgaggctagactgggccatataaggagctcgatcttgagaaaaaatagatgaatttagtatactcatgtaatctcttaaggaattatggactcattgaattcacaccattctccttcattccaagggtcacacatgtcagtctgcgctggagaattacttttgtatgcactcgaagtggaagggcgctcactgcggaatgagtcagcctctgagttcacaggataacaggaaggaagctgcttctaaactcagttattcctagaaaaatagagcagagcaaatgctcaggctgcactattcagagtgtgaattatacactgcacattatcattattgctcggatctgtagccaatagctacaccttcaagttatatttctatcaaattttcattttaacagcgatgactcacaatgaatggatgatctcattcattataccatctactcaccgcctgcacagggaggctgcaaactcacagctcagacccccctcaactcacctttcccattcagtgtttgttaacacacatgcgtgcgcgcacacacacacacacacacacacacacacacacacacatttctttgagaacaagttttctcctgtacacagggagagcagatgctagggagatgctaccaagttgcagaggctttgcacattcttccaccctggagtaagccttgcctgccttctgcaggtccacacttcctcctctggactgagaagttatgctgggcaagaccaaacgctttcctcacatcagctcctttcatgaatggaagagcaggctttcaacatctgtgccacagcttcctctccattgggagcagtggtcctgacgggtaccttgtgatctgactcctaaagaaagagtcatggagctgagatccagaaaataaaaaagaaacaaagggagactgttatgtaggactgagggggagtgatgctctcggccccttttccctgcctgccttccactcctcctaaatctttttacccttggttcctaaggctgcccattcttcctatttacccatcatctctcttcttgtttagttacaaccatagtttattggaggagttttgtttgtaatgaactttattttttcccagactcgccctgtgtcgcatccttgccaacttgcgagggccactctggttttttcatttcaacaccagatgctcaaacagtacaaaggtctcaaactcaggcctgcttgtttactcccaagcctgtgccctcttctactactgtggaggctggagatcttcctccctctccatcttcctcttagatctctttccctcccccctccctccctccactctttcccctctctttctccaagctctcccctcctctatcctcctccactctctccattcctctctgcttctccctcccctccccttccttttcctcccctttcctttccttccttcttctctcaatcatgatcctcctttctcaccacaaacaaacaaacaaacaaacaaacaaaaacaaataacagaatctgaccctgacatcacaggtagagaattcttctcacctctcagaaagatccagacaacccacatctgtactgaagcatctctaacccccctgcccgcgccagcctccacccgcgccagcctccacccgcgccagcctccacccgcgccagcctccagggaacccatggctgggcacagcagagcaacagctgagttgtcagaagaactggggggatgcagtgggaattaccttttggtgaggatgcttttggggcctcccctctttcctttttcttttctggtgtcttcctctgtccccttccaaaccatgaacacgttgcttacaatggtgtttagcttctcatctagaaaaatagatgaactacagaatttatgacgctgcttttccaatcattcaaaaagaaatctttattcttttactgaaataatccttctcccataaacaaatgttgggtgatatgcttgtccattaaaaaaaaaaaagaagatttccataaaaccctaaagaattccctcccaacaatttcatttttgaacgtttgtactcacaccttggagtgtgaacaagagcccctggaaggaagctgtgtccacaaacactgatggactaagaatttcagtcacagcgacaggttaggatgttacagagtctggctttacactttatctttatcttggcctagctttagacctctaagtaactactccttgcccacctctttgggaactaacatcctgtgagtaacagatacaacccctttgcaatttagcaacttaacagactgctgactcctaccaacccaaaagctaagaacagagcaatatagagtctgaggcctcagatgagactcctgcatcttgctgagactgtctctttgatgtacccaccagtgttcttaaaaccccttgacttacagctgtcattgtttgaactctaagaaaccggcttccactgcttccatgtggacaaggggaaaccatgggaatgtagttctatgtttcctgggctttggccatcaaatttgattcccgaatattctcttattcccttggagatgagagccttgttttgtgtcaacagttgtgtgaattgctccaattaccatgaaattaagatactgatgacagtaatcagcacttcttctgctctctttacaattatgaatatttaactatttctgaaatggtttctcttagatgaccaagtgatgagcaaaacttcttttaaaaaaaaaaaagaaaaaaaagtttcttttctatttgaggagctaaaaacaagaagaaactcttctttctgttgtatcaatccagtgggtccagggttatctttcaaaattcaaacttcatattcaggcccagggttagctctaaggaaatgatgtaaggacactcactcagaatgaagtatgattatggtttgtgatacaaagagagtctttttttcctactgaatcacattttattcccaagaaaaaactgtaaccaatcaaataacagctaaaattcaaatataatcagggtatattcaaaccagcagccaggaacatgagaaagaaagaaaggaatgaaagcaaaatctttggaccgatatgagagcaattctgatattcagttattatgtggaagaggatgtgggtctgctcaatgtcgtactcccaaacagcaaaaatgcccacaattaaacagtggcaacttagaatcatgcccctgagatggtcttccagagggtcactggcagtggctgtaagatgttcattaccactattcaatttctgttccatagtccaacatagaacactcctgtccatattgcatctgctggtctctaagcccctcccttagtgccgaccactcagtttccatagtaactactatataactatggttctgaggtagcaagagaagagaaaggaaaaccgagttaaaaaaaaaagactaaacctgggtagttggagcattaaaacattctctggcaagaactttgtttttgcattcctgtccggaaaaacacttttcagagtgatgtgtgtttgcacacacagaacagcctcctctctggccagtgtttctatgtcactactgtgtaaaggaccacaccaaggcagggcacccatcccaagctcctctacccaccttccattctttccatggagagagcagtgatgcaggaaaaatggtgacctttgcatggagcaaagaactgtgcagccgacatgccctaatgagttcatctgttttctgatgcatgctgtccgtctgatacaacatttgagacttcaggtgagtacatgccataaggcatcctcagttacccatcacaactttccctgtgtgaaaggatcctctcgcctagctctggaaataatgtctttttctaacttgggaaagcaagagtcccttgctgggactaacaggatcacttggggattccaagggtgtttactcccaagttcaccctcctagagagagcttatttacaggaggagttctttcttccgaagttagaggatttggaaatctaatctagtaggtagggtggccgcagagctaggagggaagtcagatcaggctccgctcccttttcagtatgaaaattcgaaagcagtggggaagaaatgctggacctatcacagcgatgctaacagacagcctattacagtatttaataaaaacagaagcagcgtgcctgtcataggctaataaatcctacctcctgcacgcttttaaaaacagtctggaccggcttccacagagcttcggagaactaatcttaagcatggctgtctagcgtgcctgtcactcctattgtccttccaaactcttgcagacattttgagcgaggagtaaagctatgagttagcgagggtgtgacatcaatggtccacaaagacagccagcaggaaaggtaaagatgaggaccggtggctgtgtggaggactacacgggatcactgtcattaaaaattaagcgtggcttttgaggaagatgtgacaactcctgaaggtaggatttgcatgtaaaacaaaggaatctgttgctgtttggagctttttgttgtcgctgggctcagcgctggggtgcctgtggtcggtcagggattgcagccaggtgctacagagaggcttggttgacttggggctccacgctgaccaaaacacaagacacactgggcagtgtgaggttttatgtctggaaagcctcatggacaggttggctccgggctcgatcgcagcctgctgagtgtgcactccacgttgctttcggtggagtagaaggcttagaggtcatggagaaaacagttcttttcttaccagtggtgcctgataggctggggagggggcactgagagaagactttggcaggtgggaggcagagagagccaagaaaaatagaggaggaagccgtgctgaacttgaaacctgttaggtaaatatatattcctggagtcagtgtgttttggtggtcagagggtatttcagaagatagtgatggatttccccctataatctactataagagaaatctggttacctctgtccatcttgcatattgaaaggctggtccacaccattctgttcctattaatggctttgctaaaaacagaccgggagtttgagagtaaagaaggggctttctctctgttcgtgttcttgcctttgagcaactgctgggctgcagatggaaacgggaattctttagaggttaaggacttgaccttttattttgttaatgaatagctcgaaagcttaatcttccttgaagataagaggagcggttgggttccacagtccgggaggagggggcaatgattagcactggcaaggaactgcatacatctccttgcacttcagatgggctctgtacagctctactagagagggaaggtaggaaccacccgcggagatttcagaggcaaaagtacaatgatccaaaaccaatgtttctgcaatttgatccccggtgccagtactgtcattgcttgtgaccctcagtgtgaagtggcagggacaaagtgaatgtgtccctccgtggcgggtgcgttctctcccctgtggacctcacagactcaaagctgtaaggataacgctttctattttgaaaaccaaacaaacaaacaaaaacaaacaaacaagcaaacaaacagaaaaacctctgcatttcgatgcatgcatttagctataatgaacaccaaaagcgcttcaatgatcatatttataaagaatgtaacattctccactggtctacaccatccacataacacggtataaataagtgttgaggacaatgttagttttcagttaaatgctggaattagggttaagtgagattctggtctttttgagctcctgtgtacacactgccatttacacacaaactcgaggtcattttcctttggttgagagacctctaggcttgaagttggctgggtgttcctcatagcagaatgacagcctttagtgagactgggacccagtcttagttggtctttgggtgacatggagcacatgggtatgagtaactgtatattctggtaagattgatggttacgacatagtctgtgcttcctcgtggcccgtggagagcatgaccttgaccttgtaatccccatccctagccagttgaagtcaccagtgaagactccataataaaaaaagacagagcttggacttcctaaacacaagatctgtcggctgaagttagcgagtgagtgttattgttttccttgatttcaaaaagacttttcctggctctagtctgagcaatttcacctgaatctgactgcatcaagtatttcttcaagggggaactgatggcaggaaaacaacagctgaagggtgattttctcgtagttaggctctgacacttcaccgataaactaaaactgatttccacactgttcacagatttatagggaaaaattcttctattaaatctggctggtgtatgtcagtctggattgcaatgcccccttccccacccccacccccacccccaaaaaaagaaaaaccggatgaaacaggattacttgggtgtctttagtcagctctgaggaaagttgggctgagaaatttggacaaacaatccactttgtgtggcaaatgaacaccattgcccatttcggttgctaggaccagccagagccttccctccccacatcatctttctccttcagtttctgctccatctagtaatgaaaacaaagcctgctccagcctcacaggaaatgtgcctgaatcctccctgatataaaaagtaaacaggatgtctgtcagtcttcttatgtcctcctcctggtaccaaggctcccggactcacagaggtacttgctttctgtccctctcttctacacgtgccactgtcactctgcatgtatctactagatgtgacatttctcaccctgacacaaccttctcttccttcatctctctcctcttggaaagaaatctccccccccccaactctccaagtccccctatagaaacaagtagaaagtcggccacaataatatatgtgcaatatcgagttgattacaggaccgtgtgtgattgtgcaatatagctcaacttgcaattatagatatacaatataactctgggttttttgtttgtttgtttgcttgcttgcttgctttttaagaacacatgtgcgtattaaaacaaacaaacaaacaaacaaacaaacaggaaaatgtgcaccaaactctcagcagccatttcctgtcacggctgtaagctgtacacttgctaagatgtttgagagaagtgttatcgtaatagtcctgagacacgtgtcataaagtccaccccatctccttttctatcctcactgccagcccccctcttagctcacctcacagtgcagaggatgtcttcatctaaaattccagtcatttgttcccacaagcaagacttggagcaggttaagcttctcccccaaggctccttgggttcttcttactttaccttaaggagctcagcattatcctctctcaaatgctgcctcagtgaagtgtgtgtgtgtgtgcgtatgtgtaaattttctatttctttttgtttttcaaggtttgtttctttttttactaatttaatcatgcgtctatgtcggtgtgtgggtctgaggcatgagtacaggtgccacagagaccagaggcatgagacatccctgtacctggagagacaggcagtcatgacttgcttgaagtgagttctgggaacacagtcagggcaggtcctctataagagcatcaagcactgaaaccctgacctatcaccctagcccttttccttgcttctgtaaatggagaccgtattcaaattccttttcctagtctctgctaatcttaaaatgttgcagtgttggcatggatcagcttcaaatctcttctttatctatgtttaagctccaaatatgtgagatcctacctcgagctcttcaagactatccatatacatacagatcccagattctcatccctagactccctcctgacgtagctaaattcctacagagcagttggctaaacatctggcaactatctcattcctactatgttcaaaatcaatttctggattttcacttgctatcctttccagtgtcactggtagactgactttgttatcccctttctcagaggaaaatactggaggatttctttgaagccacctattctttcgcaggccatagtgatgtctgtcctcactgactgtaccttcagtatagatcaatactgttactgttccttctggggcctttcaccaatcccccaaataaatggatttttttttcacaattgatcacttcttctgcttccttctgttcccattcaactctgtaccccaaatccagcattgtatcagaattgaaactgaattaggatttcagttcaaaagccctccactgtctacccatctgccttcaggttacagataaaatcttgcagtggtcacaagttgggcacttctttcaccattcccaattggatgagtcagcaaacccaccccacactcagatctcatagcctttgcctccaacatacacttttcctagaaaagcctgtcttggttctgattctcactgtttcagatctcggttaaaagtgctcctatggactaggcagtggccaaataattgaacaagccccacccaccatgtaggaattgaacatttttcctcatcaaaatcccattgtaatatgagatcccaagcatacatgatttgcaaccttggggcctaaactctgtgccttgacatcctgttgctttgtacaaagagatgccaaataccctgaaaaagtcaaggagatttgctaagaggattttcttccttctccctgcacaggagggaaagacacatccctgattccaatctgtgtcaaaggaaatacaaattcaatttgatcttatccaaaagatgacttatagttcaaaaagaacactttacacatctcttacaaatgactatgggtgtagaaatgccccacctttccacttcctgcccgtgttgatccggaaggaataacaaagtcaggatagaatattctacatgagtctgtatgtctttcctctgacaataggaaccaatcaacggtattcaccagtgttattaattcacaacccactccaaatccacagggtctgtttaacaatagtgttctcctatgtacaaagtatgtgttttcaaatgactatgttgtaatacatggctttattgcccaaaactgttaaatgaaatcatgtccagtagtttaacaatgttttcgagtctgaggggtggtggtaagcagaaacgttggtgtgaatcttgctttcacagtgctgttaccttggggaaagttttaaatcttagtgagtttcgatttcctcactggtgtttggtgatttaaaaaaatgcttagatctagattgaagatttaagacaatcatggatgcccttctccaccagaaagcctggagcagagaactttaagaaatatttctggggctggggagatggctcagtggttaagagcactgactgctcttctggaggtcatgaattcaaatcacagtaaccacatggtagctcacaaccatccctaatgagaaacaaacaaactttaactaaaaaccctatgggccagagcaagtgggggcctggagcaagcaggggcccggagcaggacggaaaatggaaggggaaaaaagaaaaagaaatatttctgttatcattgcacttaagtactaaacagtgcctcccctgtagacatggcacttcccattgaccagataaggagactaagatgtggaaaatcctaacaaataaaggtcagagggctcgaaagctgtcatgttgattctccttccagctatgtactccagtaaacagatgacgaggttaaccacctttaatgtaatgagtgactgaaggctactgaggttggacttgttcttatggaacttgagaacggaattttccttctatgagcagtatagaaagtatttctttcttaggccaaaagtacactccggtgtctggaaggaaacttcagtggtgcagcgtgcagactccaataagatgaagcactggaaaagagcatcactctgtgaacacgtaagggtgattcccagctctgcctgttgtctgctctccagcttgctggatgctcagcagaaatgcagatagcaaacgtacataactcatggggccgtgatggttgtgtgtcaagactgtgccttgtaaaaataaacgatgtacctatagcctatagtggtctcatatgaaatcacaaatattaattgtacatatagagagattttgtttaaaaagtgccctttatgctaggtatagtgacttatgcttttgatcccagcactcgggaggcagatccaggtagaactcactgtaagtttgaagccagtctgttttacctattagtttccaggccaaccagcactgtacaacatgactctgtctcaaaaacaaaatacaatacacaagaacaataacatttttatgggtttctcactttgttatgatattagtcacagtctttttgctgggcttaaagccagacctttgcacaaactaggcaaatatctatttcttctcatgaggctgcattagtgggaagtgtttcttctttgcttttgctaccgcatgtctccatgtccattcagcaggcagcgtgtgagtcattagcatggagatattacacaggagttcacggctgggaaccatcagacttgtaccagggacagcttctcctgacacttgtgacatttgttcctccttattagacccccacagagaggacgcatggagaaaacaaggcaaaaacctgtttctttgagacaccaaactcgattttataaattcaggtacctaagacagagtactttagcaagtacctcaggctctggctttgatgatgctggtgtctttgctccatcagtgactgcagtggctagctctctaagaaaatgtccagatggaggcactatgaccacaacaggaggcacatgacatgatgttgtgaggtcagggcacaacctccatgccattggcaggtggccggcttaccaattattccagacttagcaaggatgttttatgttaagctgttggaaaaactctccaatgctgagcccctgcaaaggtaaacacccctcctccctggtcagctctgacccctgtcctgctccatagcatcaaattcaggactcggaagctccatttcaaagctaatgctttgggggtatttccttcaatgtttctcaaatccaccttcgcaacatgacgagttccaactgtagaatccaaaaaggtggatattccattgttatagaaatgtcacagaaacttaaaggttgatttttaaaggatgtttaggacgtagttgttttcattgccagagtaccctttacataattccaatctggcccttaggtcaccacgctgtgggctttagtgcagggatctctcctctcctagccaatcgtcagtacccagcagcactctgggtatcacttatatatttctcaaatgagtctatgactattagtctacacttgatgtctcagctgggacttaaggacagatgaatcccaagcctcaacagtagacacttgagtgccatatttatatgaatgagcctggacctgcaagctctcatctgcttgtcttcttgcccctctatttatactcccaggccatgggaaatgcttctcctgagctggttccctcacccctcctccctgctgttggtccctggatgctggctccccttatctttgtaagatgctttgccttcaaagctgacttcaagtctcgtggttcacacagcaaactcttcatccccctcctcatcgcagccagggcaccagtggagtttgagtgaggatttcagtgcaggaggagggaaggaaggaaatacacacatcagtagagaactagctgtaatgccaggcaggtagactttggtttagattgactgcatgtgtacaacataggggagatgtcagataagctctaatacagattccctggtgccttggtggtgttcttcttaagtgggaggcaaagtctcagaaggttttggacctggaagtccattttcagttttgatccccttcagtaaaatggggtaaggaaaatagttaagctcataataaagtgtgtaactgaaaagctaaaggatactttttgtcttgttgtgtgtatgtgtgtgtgtgtgtgtgtgtgtgtgtgctcatgtgtacaactgtgggaatacgtgtccaaccagacacttgaggtgatcagaggaatcccttcagttggtcctagtcttctacttccctcgagaccgggtgtcttgttatttactgcggaataagccaggcttgctggtctggtaggttttttggagattcttctgtctctgcatcctgtatcacagggcaagtgttgttattacaaatatgcaccacacctgtgcctggttttatatgggttcggatgatctgaatccatatcctcacacttgaatgacaaaacccactgagccatcactgtttcaggcctaaagtgtaatttttaatccagtaattaggatgtgaatttattgaaagcaggaactttgtttttacaaagtcccaggttagtagaattgcattaagaatatatattttttttcttaaccaatagtaataaatgaagtcatatgtgtgtctttaaaaataacggaatcaatatactcattccttttccccttcttccctgaggtaaagctatagaggaaacagataaatgtttcatctgtatttaccaggcctcatggccagggatttgggattctagaaaccacataaatcttaattccatggattcccctctgtgtgcagtggaataaacagggctcctgtgaaggaggaaagggaagtgtgcagcactccacagtgtctgctcgttcctagaccgtgtgactcctaagcgtcacagtgattgagaataatttgcaaaatcggtgtagatgtgtgtctgtgagggtgtcaagagacatcacattctctggagttggcagtatcagtgatcatgagctgcctgacaggtgtgctggggaccaagtctgggtgatttaaactgccgaggcatctctccacaagctccatgggattcttttaagcagagaggtgaatttgaaattttttcaaactaatgcccttcgacactgtgtgcctgggaatttccatgagttttgcgatgtagatgagaactttccactcttcttttcattcagttttccactgaaaagctcaaaagagtcaagtgcctgactcttacactcttaccctggagggaaagtgtctttcctggtgaaactcttaggaggttaaaagtaacaattcaagtgcaagtgaggactcctgcctttcatcccctgagggacctgctctgacacagcagagggactgctcaggagctcagactggagcgtccagtgctggctttgcttaagtgttcgatgacttcagaccaaccagggctgggcaggcagctcagtcagtaaagtgtgtgtcatgcaagcatgaggaactgtctaagaataagcgggagagaattgtgtgtgcttgtccttccagctccagggagatggagacaggcagggactacctgacagacagccaaaccaactcagtgagctccaggtaaaactgacaatctgacaaaataaagtcctaaggaatgacatcagaggttgtccagctttccagacacagatgtggaaaccgacccccacacaccccccccccacacacacaccctcagaatgtgtgagaatcaagtcacactcaaacttccggaggggttgtgtttcttgctttgcattatttccatcttctggtatatttcaaatggagccatcagaaggagagagaaaaaaacaagaatttgcaatttgaaaagaaaaaaaaaatggaggcaaaatcctaacaggatttctgtgtttcctctgtccctgtgagaatgagtgatgatccctttaactttgcctcctagtgatttatttgatcctgtgagctgctcaggaacagtctgtggggctgtgtttagacaactcaaggtaactatttgcttttaagatgtaaaaatagagcagaagaggagccacttctccactggaatgaatcaaaagagctgttgagagaaagtgcatctcaaggagagaaggttgagataacgtattactaaaattgagaaactatttggaaatgtagagcaaataactctagtcccggtgcccagcgtactgcccagagaaagcccatcatcgcagcccacttctgcagccccagctccgcgtctcccccaagaggatttagtctctgctgaattgaaactgacaaagtcagatctgcagaaagcagatgtggcctgatttgtacgcctgttgggaagctgtctcgtgtgtaattttgatttcagacacatgatggtgttgagtgtggctgctaaaaatcagagttccccctcagattgtgagtgtgcccaggagccacgtttattttttaatctgttctccaccctgtaaagctttaatttatggccttgttcatttagtcattcattcacttagtcaataattttttttctaatatccacaatggactaggcagttgacaatctagaaaatgctagaaaaacaatcttcccccaccctgttggagttatacagaaaagaaggaacaagtgagatagtggtaggggttagagaagacacttgtgtgtgtgtgtgtgtgtgtgtgtctgtgtgtgtctgtgtgtctgtgtgtgtcttatactcgtgcaggtaaggtagagtggagtggtgagcagaaatatcagactaaaacagagaagacagaggtggcagagatgggtactgaaaggcaaagatgggaaaacatggtttcattcatgtaggaagcttttgataagaaaacaaaaaacagtaagaaaataaactgactagtggaaaagaattctgtggcagagagaaagagagagagagactggatcctaactgagggctaatgtgattcaaaggcaagaaccaagaatatgagtgaagggatggagaggcagagaagagtgtggcctaatagtaccttgctgcttgcaatactctcactatgatggaaagccacactcagtacttagcagcgacctgatgtctgggagaggcacagggatgtgcactgctataggtgatccaagtgccagctagaaggcctgtatgggagcctgggtggaaggggacaaagaggccagaagaagtggggtaagaacattatattgcagagttggcaatgggctaaacacggggtgtgggcgtgagaacagcaacaggaggtaaagggtaacaggatctcaggctggggtgggttcaagcttaggaacacatgagcagggctaatttccttcatattaaagactttgaaattgaaatcttcacttaccgcttgctcctccctctctctctctctctctctctctctctctctctctctctctctcccccccggctttttccttttttattaaaacaaccaatttatccttccttctgaagatcagaattcttgtttttctaattggaaattatccccctttcagtttcccttctgcaagccccctatcccctccccctccccctgcttctataagggtactcccccaccccacccactcactcctcaccaccctaacattcctctacactggggcaccaagccttcacaggaccaagggcctcccctaccactgatgccagataaggccccatcagctccttcagtccttcccctaactcctccattggggtccctgtgctcagtccgatggttggctgtaagcatctccatctgtattggtcaggacaacctttcattttattggatcctctttagacttctcttaatttcataaactttttcactatttgcatattccatcgatctgcatatgcctcccagaccatctctcaggccgttaccttgctgcccaactgaagtcctgtgaagtccttcctagtagacatttccttatggtggccatctttaggtctcaaaacccagctagctaaactaactcttgtcaagacctggtaagtctatcctgtctcttgtacctatcccacataccaccaaagtccctgattttgaagccagtagttgtctttatgccttctttcagccatagacctgatgattgtcctagatctctaaattaattcttatctcaaattatcttttggctgtctgccttttcctccccacacatataatgcccttgtgctcacgcccagatgacttagcctcctcccctcccatctgatatttttcaaatcactgtcattgagtaatatgtaaaagaatgatttggagaactcaaaacaaaacaaaacaaaacccactcacacaggtgtcccatatagaattaaagtcttttgattaagatgtagagattttcaaaagatatctatcacatataaattttgagaaaaccaattctggtctcttcctgccccattctgctcttcacagtcctcccaagtagaagtgggaacctgactgtgaaccttcagtgaccacagactttgtctttcacttaacccagcaaataaagtcttatggcctgggtgtccagagcctctaatatctagagttcagacaaattcaaaactattcttcacccttcccaccctcacattcgacccaccaaacaagtctgtattctattcacacctgtcacttgcttctccccatagatttcaaacatctagggaagggctccatctgctctcaggttaagttctgtgagtccccacagtctacagtagccctcattgacaaagatgctgcttctgtctgattttcttttatgtccatcctttgccctgtaggttggcaggaatctctacagttttgaactctgtctgcaggatccatctttttgtacctaatgtatcattttcttatgtataaatgtctgtttctgttttctacttacacattaaagatagaaaactacattttataaaatgataggctggtaaaaagttgatttttgatcccaaatcaatctaatgtttgtctttaaacaaataatttatcttccctgttcattagaacggtatcacagaatttcagacaatgtaagttaaaatgtttgataaaagacacttacaaaatgaccaatatttgatgactttcttcagtaaactttgtcgtttaattttgtcaagtagacctctgttttaatgtgctttcattcaaaatactccatccaaactgtgtgcactcaccctaggacaaagtcacacccttgcacagtgagcatgtattcaagtgtaaccaagatatccattattggccctaagaaagagtgacagggaacagcattaggctagcctgcagtccatccttgcatgttctctttcttgagagcaggaaagctaagagcaagtttaagattgcaggaaaacatgctgttttctaatgaaagcatctgttatgtaaaggtcagcagaaaatcatcagcaccctctgtctctccccctccccctcagactgggattccctacccccaccccaccccacccccacatcacctcacttggatttcacaccatccatcccccattctgctctggcttcctttgtcattactcaaagttcaaaagatgtctacaatgcaactttaaggaaagataaataccctttggtctttacaggctatttttcttctccttgtgctactattaaaagaagaaaaagaaaaaaaaaaaaacccacagacaattaacctcaaggaaactcttgacttaagaaggtcagtattgtactgatgtagaggtgactgagacaggagagatcccaggatattttcatggtcttactttaacacttgaggttttatcagcccaaggcaaaagtccaaacttcctttgttaaaaatgacgttctccaccaaagcatttttcgaaagaaagtgcccagggatttttaggttattcacaggtacaatagcactcagagagttaagaatgagtgaatgtcatgagtaggttcacagtgcactgaacgatttcatacaaaagaaaggttacaaacaggagctgagagattggtgacactctggagcagtctcagtgtggaaaggatccagactccttcactcgcttgcgtcacatttaaggcatcactcatggccactggcatctctgtgcctcagtttcttccgtgtaaaatgggaccatatctgcaccacacaactttgtatgagttaaaggaagtcacatgtgcaaagaggctgccacagtgcaggtcacctgtgtctgacattataatggtgggggttgactggagtgttaaaggttatagagttcaaagcagaagggctttggaattcaaaatttgactttattgtttcagtggcaggttggggatgatttttcacaaatggctggaagtccaaatgcagctggggtgatattaaagcatggagcaggtggtagtgtagaggcagacagctcattcaaagaaaacaatctctccacgtaaagagtaagagcaaatgaacaagggccaataaggacacaagacaggttcaaattttctttccagatgctggctgtgggctgaagagatagcccagcagctaagaggattccctgtgcaatagtgaacaaatcaagtttccttcaaatacatttaactctggctctgagagatctgatgtcttttctgggcctgcacatgcaagcctatgtgcatgcacatataagcacatgcacgcatataaactcaaacacacatatgtacacacactgagggagggaagacacagagacagagatacagatagacagtcatacagaaacagagaaaggttaattaaatatttttttttaaatttccctgctgtggatggctcattgacaccttctttcccatccttatcgtgctgtgtagacagcacattgataccctctctcccatccttatgttgctgtatggataacacattgctaacctctcacttattgcccacctttctcctagtggtaagttcattattctcaaccccagctgtggacagaaaactgagagacacaaagcataatgagatctctagagctggagtctctcaccagcccccactagctcaaaatagggtccacactgtttggtttagctatgaagctatcacttctgcctttggaacctgagtcatagagctaggccatttccagggcaaaccaaggagcaaactccatgcagaaaagttcatttttatataaccacttgctaataattgcttccaaatacacatcatattacacacatcaataccatactgtgtaggccaactggcaccttgcatgatacaagccatccctatggattgtgaatgctctgctaacttaagttcagatgaaccctaaaatccccatttcttacacttgagaaaactgagactcagaaaaagtgattattttgtcccagatccacagcttatttataatactgttatggttcaagaccttaaagcactgcaagggatacttgccagtaattcagcactttcttgctgtgtctcagcaagtccacacccagatgatatcccgaaaggaccaggctgggagctccaggacacaacaagaagcagctgacattgacaatctgctctaaaatctgtgcattaaaatctatctttcatcgaccccctcccccacctgctaaggaaacccctgatgcctcaccacacacacacatacacacacacactcgaatacgtgatatgttggtaatggagttcattttttccttaatatatcaggatatatatacatatatatatatatggtattttggggtaaagcataagataggaaagactaacctgtgaaagatggagaaagagagacagaatcccctgccaccaatttctaagataattcaggctgaaatcccatttgggaataaaatactaagcatgtcttaactttctttgctcaatatgtaccatagcattgaatatgtgaccagacatagtctattctttttctcttgttttcccaaatcattctgactccaaatgcaaggactgtttctgtcaagtctccccagaccaagtagaattcagaacacagttcttcctatacctaaaagatattttcatagctgtttaattcaagcaaatatcataattatccatatctcccttttgcttttatttgcagaaaatcaaacactttttatcgtgaaatgattataattcatattcaaaagcaagggctaacaagctctacactttgcagctcagtagtctacagggtctgtgagttaccatcctggccacttttgtcctcaggatgttggttagagtgttgccttagctctgtcctcaggatgctggttagagtgtggcctcagttctgtcctcaggatgctggttagagtgtggcctcagttctgtcctcaggatgctggttagagtgttgcctcagttctgtcctcaggatgctggttagagtgtggcctcagttctgtcctcaggatgctggttagagtgtggcctcagttctgtcctcaggatgctggttagagtgtggcctcagttctgtcctcaggatgctggttagagtgtggcctcagccaactgggtgggtatcagatgtcagtcatgtttcaaaggaataacaggacccaagggcttcacactggtggagctttggtaagaaacgggaagaggacccccattcagtgttatcctggtggataagtgttgtctccacttgtcatgctgttcctaagatgatactgcactaatccatataaatcagtgtcagtaaaacattacagtggaattcaacctgacccttcacctgaaacttgaacttctaaattgttctccagttaaactcacttaagatttatgataggcacataaactgtgaaggaagaaacactttgtctttgctgccctacctatgacggcattgggcatcatggtggaaagtaaaataaaagctgtgaactggtcttggtctagatggttttacaagaagtgattaatatataatatatgttatataatatatatatacatatacatgtgtgtgaatatatgtgtgtatatacatatatgtgtattatctatctgaaataaggtctcatgtagcacaggatgaatttaaaatggtcacacagactttcacataccagtagttcctacatcttttgaatggcttctcacaatacggacctttcagctttgttggaaagttttaatcaagtaacacatgaaacataagtgcaggaacaatgggcaacaaatcacaagtagccactgttacaaaagcaaacttttaaaagggaaagtaatcaaaacagggatctatcaggtgtggtgagtgaatgagagaaagaaaggcaaaagataacaaaggattggcagcctggcaaacagggaggaaatcattggccagagttcagcctaggatcactgagaagatctttctaagacactgggctgggaagaggaatagcgaggtggacattcaaatgcggatcctccatggtgagcctgacttaaaaaacagctgcaaatatgggggccaacatcctgatatgagatttcacagttgtaggttgtgactttggggaacagaacaaacccagaatgagagagcaactgggactggacaaggaggagcagctaagctgcaggagatcttgctttagaaggagtcatggagcgcagagatgaaccagtcagtcatgggagagcctggtgtagaaggagtcttggaattcagagatggaccagtcattctcgcgcttgcttcccaattgagaagacttgaactcacatcccagaacccattatcaaaacccagtgggtacctgtaagcccaacactgagagacaggagacagatatgggagtttttctagaagcttgagtccagctgctctggcttatatgctgaaatgttagatcacttagagactgtctcaaaacaaaaggtgggagatatgaagattgacacttcaaagttgtcttctaatctctatatgtgagccatgtcaatatacttcactcaggtgcatccccattcacaaagctgtgcatgtacatagcacacacacacacacactcacacacacacacacacacacacacacacacacacaaacacacacaccatagggatggagtgttggtgaccagaaaagaaaaccaagtgtgtgagttgcttttgtggcttcgccaaaatatctgagataaacaatttaaggagggaaacgaggcaattcttggttcacaatttcaaaccatggtcacttgaggttggaccagcacagttataaaagggtatttgaggaaagctgctcaccttgcagcttgcaggaaacagagtcagggaagtcagtgtatacacatccaaagcacactgccaatggctacctctcccattatacccctcctgatccccaccacctccttgtaatttcatcaaattacgaatctatccatgggttaatctaactgatgaggttaaaaaccctggggcccagacacttccccaaagcccatcagttgtcacctaaggctttaacccataagtctttggaggacatttgagactcaaaccataaattcaagtgaacatagaagcctggttgtcaagaggagagagaacttcatggaggtgactgggaaacaaactgtcggtccctaaaaagtcttcccaggggacaaagatcttcagatttgtctttcctacacggtaacaacaaccaaagccatttcagtacttaacgggagcagcatcatggaggcaagaaggaggatggaaaagatgcacatggcatagcttgagagataaaggaaggaaccatttggataaagaggggctggtacattcacaggatcctcggacagaacaggcaatgaagtggacaaagctgaagaatcagcaaaagttaatgaatgagccagaaccccagcacattggaattcaactctttccccttttaacttaagactcaacttcagacacccagataaattgatctctgaccctctgattctgtaattctgattacagttttctgcacagacgggcccaccgttttatctactaggtttgttttgttttggtttttggtgtttttaatgtgtgaatggctattatagccattccttagtacaggtgggcaccagaccaagacaggatagatgtcagctgttggacatgaaggcgccttcctctgagaagagagcaaggaagtattgtctagagaaataagaacagagcaaaataagagcagacgcattttgaaggaagaaggctgagtgaactcccagtggtgttctcagagtaagaagacaggcagaggttagataggaggcaagagggagcaaggtgggtcatgaccgagatgtaagctgtctccagcccctctgagcatctgagtgaaggatgggattttttcctagtacctgggatgccctagatttagtctccaacacagactttttaaaggcattcgagcaggggcatttctcctctcaacagctttggctggcatttcctggagagacacaaaaaagcaatactatccctttattcctcttaggagaaagcaagaaaatttataatcagagaaattccaaataaataaacagttatgaataaccaggaaggatgctacagcaggctgtcacaagagagagagagatctgagctatagattctgctgtctgtaaatgattcaaaactggtccatgaagaccagaatctctgagactgtcccccacctcctcccacacatgtgatagatgaactgacatgcaaagagggcctgagacttggccaccatcaaggcagcaagcaccaggaaatctggatagtgaaacatgtgaatcacatccacgcctggggctcccctccccactcggtggttgagcttctcggttagccaaatgcctgtatttgttctgtgaggattaataagaaaatccataaattgttttttagtgctttgcaagagaaatgggggaaagttcaatttcttcttcattgctattattacatggatcagactgaattcctgtatctcttaagagttccttataactagtgcactttcccatgttaaaccaaggcagttttaaattgctcatggaatatatagatatagagtgtaataattcagttgctatatacttggtacattgttagaaatccagacacacagagaaaggaaaatccttcaagcctaaacaagcagcaaggtacagcctgctagaacatccaaagatgattttaggaaattaagaagcagtaagtgagctcctcctagcagctactctggctctgagagatgaatgggccaaccatctctttggcctttttcatttctgattttagtctcaatttttgccatcatttagttagttttgccatcatcaatttagtctcattttaccaaagctgaaaaaaaaaaaaaaaaaaaagacacaataggccatggtcttagaacattataaaaagaattacaaataagtttcagtttcaaatccttcatcttggaatgggagtacgtaaatattgttgtgctggctttgtttcaatgggccatcactactttttttggctgcatccaaccagttgctatttaattccaaaggttgaaagccctgctccctggcctatagctccaggcaaggcaagggcaatatcactgtacttttggaccaatgtgcctgggcgtctttcttttgtgtgcacaataacgtggactactatgggagagaaggataaaggaagaaagctcacagcaggggagagtacacagagtaagaggggcaactggaatctcccttgtattttgcacttggcccttgagtttataaggctcttgttgctatggacacaaaggctaagagaacagtactggtctgggcattttggaaatggtctaaaagatggagactatagtgaacacagtgttttgtctctggacatctcctgcaaggtcagaagtgagggaatacttttctcataaaggagaaaaaataagtaatttttttcttctctgagttagatttaggcagttttgataattttcatgtgggttttttcctattttaaaaatagtgtagtattcatttacaggtctcctattccatatcaaaacacgggagtcttgggatttttctcagcctttgaaattctcaattattttactgttagtgtagtcttctgtttgataacttttctaaaagtaattctgtctagacatgtactcagaattgaaaaagagacagaaacatctagatgagtcaagaaagaaaacgtcttatcctcaagggagaaggggggctggaggttacatgagttgacaggaacccacactcatgagatcaaaggaacaggcagaactgcccaggccaacgaatgtgtgaggatggaaaaatggaacagaggagtggtgtgtgtgtgtgtgtgtgtgtgtgtgtgtgtgtgtgtgtgtgtgcatgtagacaatgcagaagccaacagcagaatatgccattgcccagtggggtcagtggggtggtatgctgcagcctggaacttgcatagaggctgactcataccctgaacatgctgctcagcctccgttcacttcctggattggacttccttgagggcccactgtggtccatgtggccactgggggcaatgtgtagatcagtggtcctgatgtggtcaggaacctggttgatgtctatggctcatattactaccaaagaccatggtctatgctgaggcccagagccacatgaatgtccatgggctgtgctcccatcagggaccatgttactgtgggtggcctgctttgtcacttaaggccattgtgaggttcatgatcctatgacagctggggccatgttcgtggtctgggctgtctccagactaccactaccactggctgtaaagtgcaaggaagctactttggcagtgagatcgatggctgcagactcacagttgagaaagagggacatggaaagcttctatgacaacccctaacctcccatcccttaaaagtaacattctaaacaggaagccattgaagagaacccttaaaaagtgtgataagaatgctgaagtgtagctctctactgcagatggcttctggaaatggtgtgggaagaaaaggacccagttctatttaaaggacaggtcactgaaaaatttgaccatgatccagtgagtttgtatataacacaaattggacttatgattttgttgttgttgttgttttgtttgggggcagggggcggcggggggggtagggtcacaagggttggtcggagggacagagaaaaaaagagtgtgattggcatgtataatgtgaaattcccaaagaatcaataaaaatatcatgttgaaactatgaataaaacattttaatgggagtttttgtcaatagaggttttgacatcacaggtattaattattcaaagctatgctggtctctactctgatttcacacacatagtaatggcctcaaaaacactcaatactgtccttcccatcaatttttcaaatgttgttctagttgtcattctaatttgacacacatgggaatggcctcacaaacatttgaaaatatctttaattttccacagtttttttcttcctctcaaaattaaacctttgtacttttgtgataaggaaacacatacaaattgaaactgacagcagctcatgggtttctaatactctaggctgccctgggatacatcactcagtttataaaaactataattgtttaaaaaaaactataattaattgcctgcttaaggaccattttatttcaaattagccagattatgcagacatatttatgtcagctatttcatccactgggggggggcaggagggagagagagagagagagagagagagagagagagagagagagagagatgtaaaaggaaaaacagaaaagaaatagacagtgagtgagaaacttgggaaagtattagtgagattatttcattctgtaatttcagatcaaccaaaaatacttcacatttttcaactttgtactatttatttgaaatccttcctctaaatggctaaccttaaagctacagcattgtattggcaacaaggcaggtgggaagcaaagcaattgacaggcaatcaggaagcctggagctcggaacctccctgggtgaccaggaaacactgacaaccaaaggcaagaggctgttatctggagaacacctctcacaaagcaaacagctcagacttaacttgaagttagcacccgtggtgaagtgactaccatctacaacttaactcatagactttcttatccaagccaaagatggttttgtgggcaaacaggctccaaatcaaactttgttgattagttagtagccagtcaattaataaaaactatgcacttctcatgcaaagctcagatgtttcttcctgggggtgtatttaggtattgcctctgtaaaccagtgtgtttgcagatgcaggcttcactagcattaaataataaattaatgtgaacactagctaacagtgttgtatcagttatggatcagaaatgtatgagatgatttctgtcttatcttctaaaaagtctttaaaataatttgaagtaagtgctattctatcttcagatatggatactgaaaactgaccacaatcacctgcccaaaagagaacagctggcaaaaaacacaaccaagactcaaacccagcactgtctaatcttagaatgagctcttgtacccatgatactatcccctcattagggacagctttgcctctggccccagatggtcctggatactcacaagcccataattcatagcctttgcatctcctaaaatgcaaggtcatgtgtgttgctgagcaatgtttgaaaatatacctgtcaaattgcatccacaaatgcagaccctttgttctaataatttgtcatctctctctgctatgaaattaagtatgaatccataaaatttagtcataaagataatgttatttgaacaggagcaagatggcattatgaataatagatttcaatctattaagcacagagctagagcaaccgtttaacaggataatgcaaggattattatagaatctaaagagattattgtaagtggcgcatgatcccttctctatcaatcaaagtaaaacaatgcagagtaatgggtcttcgtgtttatttgctgttgtgtgagagctgtgtggagctgttggctatgtttgttaggaagcacaggctctattctaaacatctctatgattcctagcaaaatgctgatccctttgaccttaaatgtccttacatctggaaatgaagggggtggcataagatcagatgatgttttcaattggcccagttctaaaacccagtgtgtaatagtactgaagtagatttctatgttcatggaactaaaaattctcactttattttctttatttttacatatatgagtgttttgcctacatgtatgtttgtgtaccatgtgaaagcaatagccatctacagaatccagaaaagggtgttacattcccagaaactggaatgacagacagttgtgagctgccatgtggattctggaagtcaaactcaggtcctctggaagaaccatcagtgttcttagtctccgagctttctctccaatccctggcttcacatcccccacctcaaaaaaggatccttttcttgagagctaagtattcttcatgacaaagcccatcagggggagaaaccagtagcttttgagctctgctgcaagttatatccatgacagtatgtgcaaggcaagaggaagggtgccaggggcgttagcagaagtataagtggacaggggagatggctcattggctaaaccacaagcactgcaggcacaaagcctgagtgtgaatcacggtaactacatagagagcaccacatagaaagtccatgcttataatcgcaatgctggggaagtgagcggagggtggctgaggttcactgaccagccagtcccgcctaagtggaacaggcatgagacaagtgggaggctgtttccaaaaactgcaagtggtgatggaggaacaatatctgttgttgcaggatatttgatcacactgtgaacccagattgtgttatttactgaagaagaaaaaaaaataacctgttcctagttgtaatgtggcaccatccttattacacacctttaatacctctgcctagaatacagacacacccttatattatgcacctttcatcccaaacaatgaaggtaaagttagtttgtggaaagaagcacccatgtttgaaaataatgtctaattgagtggcagacaaagtgacagatcagagaaagatttgacagagtaggatatgcccaactctcaggagaacaaagagaaaagggaagctacttgaaggacagtggatagagaaggaggcagttttactgggagagatttacagagacaggttgaagagagaacaagccagacacaggtgaggacagaatgagctagagaaggaggagccagaagattagaagagtgataaagaagaacgaagaccaaagtgtggacactttgccccttcttagaattggaaacaatcacccatggaaggagttacagagacaaagtttggcgctgagacaaaaggatggaccatctagagactgccatatccagggatccatcccataattagcctccaaatgatgacaccactagcaagcattggctgaaaggaccctgatatagctgtctcttgtgagactaggccggggcctagcaaacacataagtggatgctcacagtcagctattggatggagcacagggcccccaatggaggagttagagaaagtatccaaggagctaaagagatctgcaaccctgtaggtgcaacaacattatgaactaaccagtaccccggagctcttgaatctagctgcatatgtatcaaaagatggcctagttggccatcactggaaagagaggcccattggacatgcaaactttatatgccctagtacaggggaatgccagggccaaaaaatgggaatgggtgggtaggggagtagtggggggggggggtatgggggacttttgggatagcattctaaatgtaattgaggaaaatacataataataaaaaatattttttaaaaaaagagagagagtgataaagttagtttgaggccaagcaggttaatcaggacaagttgagagaagccagattgaaacacagcgtggagtagagttttgagccagaacagccaagttcaccagccagtcagagctcagaactggaaagggtgagtttattcagtagtaagtctcagaagctgaaaatattgcaggcctagattcatttgtaaggaggctagaagcttccaggactagcctaggttaacagacatggaagtaaacccaggagacaacaattacactggaataataaaagttacttttacacctgctattgtcctctaccctctacatatacatgtgtgcatgtgcatatgcacctgtacatacatacattcacctatatttatatgcacaggcacacacacctacacacacactcacacatatgcaaagaaatacacacacacacacacacacacacacacacacacacacacacattcagcaaaaccactatcttttcagcataccaaaccagccaagacatgattaagagcatggcagtatccatagagtgagtcaaagaaacttagccactttctagaattttcctatcacactcacatgttgatgaaactttcttggaattcaatccttcactttaatttaggtaagatcaaaggcaacattttactgtgcagactttctataattataatgagaaacaaattgtgtatgcatatagtaccactaatatctcagttaacaagtcagccccagcactgggctccatatctgtctctctagtaatcagctgctgtcttaactggtatgttctctctgaatctagatccctttgtctataaaaaaaaatagttgcctatctctaaaacaagtgatcttcatgataggaagaattatgttttgctgattgcaaccacttgctgccttctacagcagatagcttctgagaagagaatctgttgttagctgagtgtccacaagtgtggttaccctatttgtacagctaagccagtattaaattgtctcgtgtatttaaaggagagagatggtagaattcctagagagagcatcctgggaaggggctcagtagatcataaagctaagacccaacagtggaaagttatgaatggagaaaagatactaagagccctacctaagaaaaaagagcttggggaatgggttatgttccagtagtcctttcgtttacttctgattctaaactctccgtaaaccatatgatgtttatggtgcttgagtgcaagaggacttttattctgaagataactatgataaatctagtctcagagacttctctagaaaatgtgtggcaagaagaagggatatgatcaaccagtctaagcttgcaaaattgattggatagtatcatagcttgaaggaggccttggctgggctttggccatgtgaaactaggggtgaatatatgtaaggtcaattatacatgtgacactggacacatctctaactcagatatatttaaagatcaaacagaaaggctgtaactgagtagtaaggagggccctggggagggcaggccctgtagaatgactttcaacttctacctttttatactcagaaagacaacaaattataaaaggtacatgccaagcaaaacaatggccagaatccttgaaagagacattaaagaatcaaaggacatttggcagggggagtagataagacacaaagtacatcacagtcctgaggactgtcaactgggaatctaacaacttgaaggaagtacaaagtatattcagagaatgtggtggttgcattaaaggtgtttgaagactgttacatgaaaaatgttactaaggtgttgtcttttaagggctagaaatgagagagagagagagagagggagagagagggagggagagagagagagagagagagagagagagagagagagagagagagagagagagaactaaatgtgcttcctgttcagagatatctggagtttaaaggagttgtcacagtgttgggatggggaggaggcatttatgacataggtaggtaacagtgttatgaaagatgaagaagtcatccagccgtggagtttatcaagtccaggcctagaagcttctctgacctagctgcaaagcttgggtccagttccatgtgcatcaaatactgaaaagtaaagtcacctttcctgtcctggttggtctcgaatatcatctcctttctcaaaagactcatcccagccttagcagaacaatcaaacaatattgggagttaagttgtaatgagaataaagtatgaagaagctatacaaaagtctaaagggaaggacgatgtccttggaagtcagagtcctgtgatatcataggcagaataatgaaaaacaacagtatttgggactcgaaggttggtgtcattgcatggtgttaaggccccttgctacacaaataatgaagaccagaggtacaatcccaaaagctatatgaaaagctgtacatagtcacatatgtaccttcaaccccagcactgtagccagtgctgtaggggcaggagacaccaccagcctagccccaggctcagtgagtgagagttcctgttatgagggatggaggcaaagagtgatggacccaatcaactccttgtcctcctttgacatctgcattcacacatctggacacacacgggggaaagggggcagagacagagtgagggagggaaacatacacacaaatacacacacatttagatttaaaaaaaaaagactagctctttacaatgaggtaataatatatattaaaattgcaatacctctattattacattatcatccttccttaaaccactcagagatagatacttcaatttcaaatcattcaaactagatatctatgtatgaaacttcaagaaacaaaagatttataacagaagacaaagtggttctaaaacatgaagattcagatttgggtagaagcatctgtccccaaagaacaatgaccaatgtaaggcaccagtgtccgaaacagacaggaaatgtggcactgaagtggatcagggtgtcagagtcctggggacaacagatagaacccagccggtggagcagagatgaggaaagctgctcgccactgtgtcctgttgcactgtgtagagcagagcagttgggaaggagaaggggtgagaataaagattaatcagtgcaaacagttcagtgcagagggctgttagataatttacatgcctttacaagtgtaacctcagctaatcctcatcatggaaatgaagtatccccattttcttacacaagagaattagagttgtgcttaatgcactttctcagatgccctgtgtggacagattatacattgataactatgttgagaaatcgcctggaagaatctatcagaactttcaaagactgattgccttcgcaattcacgttctggtggcgactcctcagaaacactttctctaatatgcaggaagactgtgttctctgtgcttttgaggcagcattacagcaatattaaggtttgagagccaacctaagcatttttttaaaaaacaaaataactaagaatgtatccccattctaaaatactctgaaggaaataaaaacggtgaagggagtgaattaaatttagctgagtgcctggggaatattttttctttttcttaaatttctattagtgtctgttttgtgtacaaagggatgggtttcatgagattttaatctcaagtttaccctgttatactttataagtatgaacaaatgagatacaaagtcatgagtatagcttttaatgaacaaaatgcatataattatattatagactattaaagtctatggaaaagcctagaacactgtgtggcaggtacttaatgtcattaacatgtcaaaagtaggaggtaaaggctgtggtagaagaaaccttgttccactgcccactctgccctttttattaaactatttcaaataaacatattctactccattaaaacacaaaaacaggaaggctcacataaataccactggttattccaggtgataccagtttctgctgtgcaacctacttctgagtttacagtttgggagtgccccccacccatccaaggagccaactctgtcaagggtgggaagttaggcacagaaaaatcaccccagaagaaaagaacgctttctgaggaaaatcaacagcagcatggctggaagccaccggggcagcgcatagccaagtgcagcataaacataggtctgcagacacaaagacagtggtgttctctggacaagtgtcctgtttagtgacccaggcagacacagtcatgttcacacagttgtcattgacactcccacttccaaatcctccaacatcgagcccatatttccaaagtgtcttgtcgaactttacaatgagaaccagaacactcataaatcatggccccactgtgagtctctcgaaggcaggatagggctttggagatacttcgataattagtagcatttcattataattattaatgaggtcttgaatcctgaaaccaagtaatcagggcagaatagaacataattataacaaaatgcaaaaatacagccaaagccctgagaatacagaaaatgaaaaaaaattaaactaagtgataaagaattatctctttgaagcagagaagattcgtgctggttgaggggagggaagaataaattaaaccatccaaagacagttaaaatcttacaacatcttccattcttttacatatatttcctgagagtatccaaataataatgtctgaagtctctcaaataactgcactcaaggcaaatttaccaagacccttaataattgtctgtaaccttctcaaggttataaaacaatgtttggtttgtctgtctcctaaaaggcaagatgaaataattcttcaaacacacaattaagagaattaactctttgttagatagagctataggtctaaacatgaaactaatccacatctgcagatcttagtgctctttgaatctaagcaggcaacatctggcctcaccatacaagggcccacatgtgcatgcacgcacatgcacacacatacacacacaagttcacatgcacataagtgcattactacttgaccattttattttaagtgacttttattttatgtgtatgaatgtcttggctgcatgcctctctgcattacatgtttgcctcatgcctgtggaggccagaataggttgttgtttcctctggaacaattaaagatggttatgagtcaccatgtgagtgttgaagactgatcccaggtcctctggagaaacagccagtacttttattcactgagccgtattacctcaaagaaaccttgtatggactgttgcaggcaagtcactgagaaatattctccaaattcaatccaaaacacatcagtctttccctaaataaaccagatacattctgtctccttccaaaaaatgcctctgacttattttttctgttttgaacacaaagccagaggtatttgttgcatttacatgtgtgcccgggcttcccagaactccacttgccactgaattacaatgcagtcacagtttttattattgttgttgttgttgttttgttttgggttttttcccaaacatagaggtatgtcctaatattttccatttaggtaaatgtcaaaagcttcatgtgaattttactcttatgaagatattttaacaaaaacagcactaagaatatgttcacaatgcaaactttacacatgtgtagtcacatttctcagattagcccgctaatggctccaggggagccattacagcagaatgcattggtgtgtgtggcaagaatgagaagctcttgctcagagataaactccctgttatagcttcaggtgctgcgggtgcataataacatgtaatcacagggattaataagatggcgtcggcccttctgacccttatggaagtggttcgattagttaccaacctgcacgctgggactccatcacaggcatccttgggaaacagagaatccgggctttttcattctcatttttttctctcaatatttgaacaggagcagaaggtcaacataagcagtttctgaccttgcccctgggtgaatgtacattggtatagagatatacgtgcctaagcagccccctcaagatggtgtactgacagctcttgcagtgtgtgaccaaaaatactaattgtgggtgtgctcagatggttgagtgtttgtctagcatgaagtcctggattcagtctccagccctgcataaagcagacatgtggtacagtcctgtaattggaagacttgggaggtacagacaagagaagcagaactgataggatcatacatgtatgtgtaatgtgtgtgtatatatatatattatgtatataggtgtgtatacatgcatatgcatatatgtgtgtgtataggaatgtatataacatatactattatttattatatacatatagatgcattcatatatatgatttattatatacatatgttatgtaagtaatattaatatatatctatcttatatgtggttatttattagtgtgtgtgtgtgtgtgtgtgtgtgtgtgtcctattagagtggtttacaggctgtggttcaacaagtccaagaagggctgtctcctatagaaagttcaagaatccaatagttgttcagcccatgagactgaatgtctcagctattcctcattatacactgaaatcccaaagcatcatgctctaatactagtgaagggatggacttgccagggagagtaagagtgaacaggcaaagagcaagagattccatcttctatgtcctttctgtgggggcataagaatgtgtggtccagatctagggggagtctccaacctcaaacaatctgaatttatggtgggtcttctggcttcaagtagatctaaaaaaaaaaattcccttacaaatgagctcagatgcttgggtttttaagttaattccagatgcagtcatattgacaaccaagagcagccatcatagctacatagtaagtttgaggccagcctggggtacaggagactgactcaaaacattcatttatgtacccatttaattaaaacaaaaatgataacagggactggagcaaggctcagtggttaagagcactagttgctttgctcttccataggaccagggtttgattcccagcacccacatgacaggccatactatctgtacctcccatttaaggggaatctgacaccctcttctgtcctccatgggttctgcacagacatgcatgtaggtaaaacactcatatacattaaaaacacaacaacaatgacaaccttgagagaggatttgttttagcttagtttggttctataattataagttttagcttagtttggttttataaataatagtccatcatggcaggtaaggctgagtgaggttcatggatagaaaacatgaaacaagagttgttcacattacaacaaaccaggaagtagaggaagcaggccaggccagggtgagggacaatctttcagttctgcctctagtatctacttcttctgccagacaggtcccacctcttaaaatgtctatatcctccagactggaaccatcaactgagaccaagtactcaaagcatgtgtctgtgggggtgtttcatatttaaaccacaacacacagtattgcttatcactaatatttgaaatgtacttggggccctgaagaaaacaaaaaagatgttctgggtagccaataggaaagtcttcccagagcagtgtagtgcctcttcaaaggctctccatcagagatcactgtggcagtttctttgccacctgcactgtctccatggaagtcagtgtcactcaccagggacacttactcagttttaacacaggaacacgggctatattttttcgtggtaaaatcaacttagaagggcagagctactgttagcattctaataataagaggaacaagcaaaatataaatgacaggggtagatctgaggagaaacataaaagattggtggcagccagagggaggggagctgggggaggggaatgaggacagtggtagaagggagtggggaagggaagtgggggcaggggtggaagggagtgggggaggagagtggggacaagggtggaagggggctggggttggtctttgcaaagtacacagttcatagtcttgatgaggacactgttgaaagagtcatgactatgtagtggttgatagacccaaataccagcgctagctcagtgtgtttgtgattctggctatgtgactcacccagcactgcagaggctcagtttgtcattctcctaaatggggactgtatgtcttcttccatgagtaggtctgaatggaactgttcagtgtcaatgactaaagcaaggtctaccttatgggatctaccatgtagctgctttattggtatcattattattattaccatactatgcttaagaaactgtggaaatacatatattaaacaatctcttttaagcaacataaagtcaaagaggttttctattttcaaaaaaaatcaacatcacttccacaagatgcttctgtgagtaggaaggcttggtctaaaatattgcatatgttctagcacacatggatgagaagatgggcaatcagaagcagaaagaataaatagcatcttgtctttgttccattaggatcatgcctgagacttcacaagctgtggaacaatagttgaaacatggccagtcactatgccactgttagaggagtaccatagaaaggggccctataacacaaagattgggttctggaacctgggtacaggcagtgagcaaatgaagaaaggacagacatataggtgcacataaagtgaagctcagatcaggcagggttctcaaacactacagcagcagctggaagcctccctgtgtttgttagacaaggcacacagggctggtctctataggaggtctctgcagggatcaacctcaggcagtaaacatcctggaagagaaagccatggttgctaatctttgcacatattgatagatcatccataaacactcatacttggatgccccttcagcctgaaccatatgggttacagctttgccaatttgtcccatgggttacaggcctagaggttcctgatatgactgtgttctggtcaaaatgtacatttattcaggacttggttctctgagggctttctctggtccccacagaaatgtgtttaagccgctcgttttttattatgctttcctgattaagtacttgaccttacatacaaattatctgcctccaaagtatacattcataaacatcggttgtcttagcttctttcctgtagatgtgattaaatgacttgacaaaagtatctcaagggagagaggatttgttctaactcacagttcagagtacagcctaatgtggcagggaaatctaggatgcagagctctcacactgttcccacaatctggaagtagagagtactggatactgaatctcaggtacttcctctccttatgcagtccaggatccaagcccacagcataatgccatccacattcagggtgtatcttcccacctagactaacctaatgagcatagtccctcacactaaataatcctttacaagtgtacctggaggtttgtcttctaggtgattctagatcttgtcaagttgacagtgagcactaaccaatcacagtggtgctgtgaccacccaccctgccagaaaaggagtgtctctgatagattataagcccttctaaggacatcaaggctattgtccacagaacttcaatccattttataaccatagcatttaataatggagaaaggggatggtgaagtgcacaggagagaggattgtaatatccaatgtctctagggatagctttggagctattagtgcacacttgacagaactaaatatataaaggtgtttctggtttgcttttgcctttgttttaagatatattgggcttgaaccaaagcattggacatgctaggcaagtgttctatgactgagctacatcctcctcttcttgtttttctgagctaggttttcaccctatatcccatttaggtcttgggcttccagtcctcccatctataatccctgagtattggtattgttggcatgtaccatcgtgtaaggttcagagaatttttaatattaagcaggagaggtgaggaagaagggagagaagtagaaaggagaagagggatggagaggaggaggaagagaaggacagtgatcggaggtcattcagtttctgtattattcagaacctttctaaagataaatgacagaaatgtaattcaagtatatcccagcaaatgggaaatagactggctgacatcaagttacctagtctcagcagagctaagtccagctagtccaaatggtttgggttttgttttggtttggtttggtttggttttggttttttttttttttttcactttgtgcctttttgctctggaaatacctacattttcccaagattgtcttcctatggcaggatacttgctgggtagccatcataagcttcagttttgtagtgactttgtcaccaaataggcagagaaattgacctcttcaaacattggaatgtttacactgacagcagtttcaagtgaccataataaaatctgattggtcccaagtgatcatggtgatcaatcatgtcatcagaatagcacattctgattttctacctttattctattcatgtgatcaattcgtgtgactgtatgtgtgatgtgtgacatctcagaagtgtcctgtgatggactcaagatgggtgagaaaggggcaatttttaaagacacatagaagggacaaagcaaagatgtcacctccagtcccctactggagtttctgttaaatactctcttagtccctcgctatgcttaggtcatgttgtcttgtttgctcagaaatcctaggacttggaggtttaagcacctgatgaacaagagagcactttctcacagtgtagtgcattgaacacaatacatactcactcatttaaaacaagaacttacagaaagatacctttgtaaattgttgggagagatcatgtaaatgtttcatgtatattcataagatagactgagttgtctttagccttcgagtttgaagatgacaacactgccctgaagttcagctatcctaagaagggctgattccagtaatagtttcagccagtgcccctcagtccatgtctttgcattacactcttcttccacactacaaagggctgaagagaaaacattttaaattcctgatattgccttaaaaaagagctagtgtccccaacaaggaaccctcatcctcctgtgctgcacggagcaatagatgtgaagggtccatgcggttagttagcatctcacgttctgtgctgtgacaatttgccctgtagatgacattcctttccaccgagaataagcactctgtgtcaccgactccaaaacgttcagtgttcctggcacgtcaattcagcctttcacccatttgtctgaaattccatctctaagctacctttcaagattttcttgttagtgtggctttgcaattacactagagagagaaaaaaataatgaaaaaataaaatccaaaggaagacagtgtttaaatacatacttcttatcacttgtggagtcctgcaggggaaaaaaaaacccttagaatgtgttttactttgtctgaaaaggagcattgtgagtgaacaaaacatgaatatatttcaggcaagataagtgtaaaggatgtattatgagaaatagcagtacaacaatagcagttcatttcaaggctctccctgcagtgaccgtggcagcaacactgccatttcacacttgttacagtaagtttcctttgttaataactcagcgtgacaaagacttctcttccagtgttaccacacagttgtctcctgctctcacagagggggaaaggaaagctggatgcttgcatctagagtgaagaggaagaggggaactaaggacaggtggcagcttcaacagcacaatgcacgaaaatgatgatgggaaacacaaggggctctacttcagaaaggggaagaggagggaaggatggagaaggagaggaaggaggacgggaggaggacagaagggaaaaggacaaagaagaagatgaagaggcagattcagtgaggtctggtaagaagaaaaagagctttgaccaagaatgtgtgtttgtgtttcaccttcaagtgtgctatatgggactcacacacaggtctgtgtgtacatgaggcagaaactcttcctccaagtctcactcataagctataataacatctacctgcattgctgcatagaatgcaaccacctaactaagcaatgacaccaattgttatattctcatcactttgccaattggattttcccaggagagcctgtttacctctcttctgattcaaacattgtgttccacttgcacagctgcttcatttcctccacaaactaaccatgttatttcaaaattctggaatgtaacatgccctttagatggaatctctaatttattttacagactttttgttcttccgttgtcccatttctacacactccacttgtaatttccctcctcagccaattgggctatagctcagcatcatctagaatgtggtggcatccagcactttattactgagtacccaaattttagtttgtgagataaagtgaccaaagtcatattttgagtttgttgtttaatggtggttatagaaactgtatgtatgcccttcagggaaatgcctagctagagccagagaagctgatccaacagtttgcacatctttccaaaatgggtaagaactaagtaatgggcttccttggtgagtcaccatggaagacttcaatcagcttgcaactcattcatatggtcaatgaagctccaacctctgcatcagcacacctcccccattccagttcatttgaccagaaggaagacggcttcgggtctcaccccataaataccttccaaggttatcgcttcaaccacacaaatttcaattcaggacgctggacagcgccattgctttttttgaaaaatagagagccgcctactggctagaggtctgtggaatcttagtccagtttcacatactgggattctaagacaaaaacaaaaacaaaacaaacaaacaaaaaacaaaacaaaaacaagcaaacaaacaaaaaaaacctaaacaaaaatctttgtgagcctcttttcctgacagcatgttccccacaatgaggatatcctattgtgtctcccaagaacccagcaatcgaggttcacatctaactctgatgaagcatcctcgcagacaactttcaagtatttaatgaaagttgaaaacatatttgtgagttatataaactctgaaagtttactttttgtttcacagaaataattttgtgactagttgatccagttaataaatgatattatttgcacaagaaatgatcctttctccatagtaaattaagaaatatactcatgcaaacatgtatatgtgagcaccccatacacattctttacactgagcagcctccctttactccatagtatacaagttataaacagttatacctgagaattgattgttttcttggagaaatgatctttgtataacacccagggtggtaaaaattaaatacaaactataaagtcttttcattcacataataacttagagtagaaacagatgaggtgggagaaagcctggggatggcaagatgatctccagcaggcatgtgtgtagttagagcactctggagagtgactctccagtgattctgtattttatggattctcgctgttggcattctttaaggatcctttgatttttaaggagtgtacacattaagattctctgtgcttgctggatggtggtggcacatgcctttaatcccagcattcagaaagcagaggcaagaagatttctgagtttgaggccagcctgctctacagtgtgaggtccaggactacacggagaaagcctgttttaggggggggggggaggcaaaaacaaccaatcaacttctgttcataagattttgttttcataggctctcatatcatctcctaatttaattactttaaaactaaaaacagcacaatgagatacatggaaaatctactatttatagacaaatatggatcctgtaggaagaacctcactcaccctactcagtcctcaggatgccacttacacaggaagaaaaccaatcaccatctacagagccctgctgagacattgtgtgaagcatcattatttgaaagaataaagacccaagcaatggcttacaaactcaaagcagcacatctggaaccatgtgaaagtgggatatgttcagagtgttgtgttttgctgtctttgttgcttaaaaattctcataacttttataaggttctccacagattgcttttgacaaaatacaaacacaaacataagcatatctgaagaaggaaaagttctacatttcaactcctgacgtttgtaattcaggtccagccatgaatggcatagaggtacctacaattactacaatcactaaaaatccagtcttgagtgcattaggatcctttaaaggctttactcagaaacagatagatgaggcatggtgctggggcaaactgcattctgggaacttatagtaagaactttggtttctttaaaaacattggaatattatgggaatatggttttggtttaatccaaggtgtaggatatggtgttgcttcggattgcccatagtggcaaactatgatttacctcatgagttggcaggggttgggggttgattttgtcagctgcaaatagttaattttgcatagattttggaattctggagacccttgagatggtatttaaatgcaagagccctgagagcagtgaagcaacagctgctgcttctgctgctggatgctggatgctggatgctggatgctggatgctggatgctggatgctatttggagatatccgaaagacaaatattggacctgtcccaaggaacttgatgccctattcagcaagaagtagtctaccaatattgacactcccttcccctctagccttctttctgttctacctagtgttgggaatggggtggaaaggatgagagtggaaaatggtggtagaaataggggcccagccggagcatctgagggagccatcttggttcccggatccctcagagactagtctgcgcaggtgagagtgtggactacagaacctaacagcttctgggttaggcagaagccacacagcttctggggcaggccccatttcgggctgcagacatccgggcacctttcctgccagaggagaggtgtctgccccacctggtagggcgttgccggagcacctgggggagccaacttggatcccagttccctcagagactagtctgcacaggtgagagtgtggactacagaagctacacagattctgtgaaaggtggaagcgaaacagcttcagtgacaggccctgtttcaggccttcatcttctgccaggaggcaggtccgaacaccagatatctgtgtatcttccctgcaaaaggagaacttgcctgcagagagtactctgaccactgaaactcaggggagagctagtctcccaggtctgcttatagaagctaacagaaccatgggaggaacaagttctaaccagagacaactgtaacatctaactccagagattaccagatggctacaggcaaacttaagaatcttactaacagaaaccaagatcactcaccatcatcagaacccagcactgccaccttagccagtcctggataacccaacagacccaaaaagttagacccagatttaaaaacatatctcatgatgatggtagaggatatcaagaaagactttaataactcacttaaagaattacaggagaacactgctaaacaggtacgagtccttaaagaaaaacaggaaaacacaaccaaacaggtgatgaaattgaacaaaactatgaaagacctaaaaagggaagtagacaaaatgaagaaaacccaaagtaaggcaatgctgaagatagaaaccctagaaaagaaatctggaatcatagatgcaagcataagcaacagaatacaagaaatagaagagagactctcaggtgcagaagattccaaagagaacatctgcacaacaatcaaagaaaatacaaaatgcaaaaagatcctaattcaaaacatccaggaaatccaggacacaatgagaagaccaaacctacggataataggagtacatgagaatgaagattttcaatttaaagggccagcaaatatcttcaacaaaattttggaagaaaacttcccaaacctaaagaaagagatgcccatgaacatacaagaagcctacagaactcaaaatagactggaccagaaaagaaattactcccgacacatactaatcagaacaacaaatgcactaaataaagagagaatattaaaaacattaaaggaaataggtcaagtaacatataaaggcaggcctatcagaattacaccagacttttcagcagagactatgaaagccagaagagcctggacagatgttatacagaccctaaaagaacacaaatgccagcccaggctcctatactcagccaaactctcaattaccatagatggagaaaccaaagtattccatgacaaaaccaaattcacacattatctttccacgaatccagcccttcaatggataataacagaaaaaaaccaatacaaggacagaaaccaccccctagaaaaagcaagaaagtaatccttcaacaaaccaaaaagaagacagtcacaagaacagaatgccaactctaacaacaaaaataataggaagcaacaattacttttccttaatatctcttaatatcaatggactcaattccccaataaaaagaatagactaacaggctggctacacaaacaggacccaacattttgctgcttacaggaaacccatctcagggaaaaagacagacactacttcagagtaaaaggctggaaaacaattttccaagcaaatggtctgaagaaacgatctggagtagccattctaatatcggataaaatcgacttccaacccaaagttgtcaaaaaagacaaggagggacacttcatactcatcaaaggtaaaatcctccaagaggaactctcaactctgaatatctatgctccaaatgcaagggcagccacattcattaaagaaactttagtaaagctcaaagcacacattgcacctcacataataatagtgggagacttcaacacaccactttcatcaatggacagattgtggaaacagaaactaaacaggtacacagtgaaactaacagaagttatgaaagaaatggacttaacaggtatgtacagaacattttatcctgaaacaaaaggatataccttcttctcagcactttattgtaccttctccaaaattgaccatataattggtcacaaaacaggcctcaacagatacaaaaatattgaaattgtcccatgcatcctatcagactaccatggactaaggctgatcttcaataacaacataaaaaatggaaagccaacattcatgtgaaaactgaacaacactcttctcaatgataccttggtcaaggaaggactaaagaaagaaattaaagactttttagagtttaatgaaaatgaagacacaacatacccaaacttatgggacacaatgaaagcatttctaagagggaaacttatagctctgagtgcctctgtcttagtcagggtttctattcctgcacaaacatcatgaccaagatgcaagttggggaggaaagggtttattcggcttacacttccatgctgctgtttatcaccaaaggaagtcaggactggaactcaaacaggtcaggaagcaggagccgatgcagaggccacagagggatgttctttactggcttgcttcacctggcttgctcagcctgctttcttatagaaccaagactaccagccctgagatggtcccacccacaagggcctttcccccttgatcactaattgagaaaatgccttacagttggatctcatggacgcatttcctcaactgaagctcctttctctgtgataactccagctgtgtcaagttgacacaaaactaaccagtacagcctccaaaaagaaactagagagagcacacgctagcagcttgacaacacacctaaaagctctagaaaaaaaggaagcaaattcacccaagaggagtagaaggcaggaaataatcaaactcaggggggaaatcaaccaagtagaaacaagaagaactattcaaagaatcaaccaaaccaggagctggttctttgagaatatcaacaagatagataaacccttagccagactcactagagggcacagggaaagcatcctaattaacaaaatcagaaatgaaaagggagacataataacagatcctgaagaaatccaaaacactatcagatccttctacaaaaggctatactcaacaaaactggaaaaccagtacgaaatggacaaatttctagacagataccaggtaccaaagttaaatcaggatcaagttaatgatctaaacagtcccatatcccctaaagaaatagaagcagtcattaatagtctcccagccaaaaaaagcccaggaccagatgggtttagtgcagagttctatcagacctttaaagaagatataattgcagttccgcacaaactattccacaaaatagaagtagaaggtactctacccaactcattctatgaagccacaattactctgatacgtaaaccaaagaaagatccaacaaagatagagaacttcagaccaatttcccttgtgaatatggatgtaaagatattcaataaaattcttgctaaccaaacccaagaacacctcaaaagaatcatccatcctgaccaagaagattttattccagggatgcagggatggtttaatacacggaaatccatcaatgtaatccattatataaacaaactcaaagacaaaaagcacatgatcatcctgttagatgctgaaaaagcatttgacaaaatacaacacccattcatgataaaagtcttggaaagatcaggaattcgaggcccatacctaaacatgataaaagcaatatacagcaaaccagtagccaacatcaaagtaaatggagagaagctggaagcaatcccactaaaatcagggactagacaaggctgcccactttctccctacctattcaatatagtacttaaagtcctagccagagtaattttacaacaaaaggaaatcaaggggatacaaattggaaaggaagaagttaaaaatatcactttttgtagatgatatgatagtatatataagtgaccctaaaaattccaccagaaaactcctaatcctgataaacaccttcagtgaagtagctggatataaaattaactcaaacaagtcactggcctttctgtacacaaaggataaacaggctgagaaagaaattagggaaactacacccttctcaatagtcacaaataatataaaatatcttggtgtgactctaactaaggaagtgaaagatctgtatgataagaacttcaagctctgaagaaagaaattaaagaagatctcagaagatggaaagatctcccatgctcatggattgccagaatcaatatagtaaaaatggctattttgccaatagcaatctacagattcagtgcaatccccatcaaaattccaactcaattcttcaacgaattagaaagggcaatttgcaaattcatctggaataacaaaaagcctaggatagcaaaaactcttctcaatgataaaagaacctctggtggaatcaccttgcctgacctaaagctgtactacagagcaattgtgataaaaactgcatggttactggtatagccacagacaagtagagcaatggaatagaattgaggacccagaaatgaacccacacacctatggtctttgatctttgacaagggagcaaaaaccacccagtggaaaaaagacagcattttcgacaaatgatgctggcagaactgtcggttagcatgcagaagaatttgaattgatccattcttctctccttgtactaaggtcaaatctaagtggatcaaggaactccacataaaaccagagacactgaaacttatagaggagaaagtggggaaaaacctcaaagatatgtggacaagggaaaaattcctgaatagaacagcaatggcttgtgctgtaagattgagaatcgacaaatgggacctcataaaattgcaaagcttctataaggcagaaaacactgtcaataagacaaaaaggccaccaacagattgggaaaggatttttaccaatcctaaatcagataggggactaatatccaatatatataaagaactcaaaaaggtggactccagaaaatcaaataaccccattaaaaatggggctcagagctaaacaaagaattctcacctgaggaatacggaatggctgagaagcacctgaaaaaatgttcagcatccttaatcatcagggaaatgcaaatcaaaacaaccctgagattccacctcacaccaatcagaatgtctaagatcaaaaatcctggtgacagcagatgctggcgaggatgtggagaaagaggaacactcctccattgttggtgggattgcaagcttgtacaaccactctggaaatcaatctggttgttcctcagaaaattggacatagtactaccggaggatcctgcaatacctctcctgggcatatatccagaagatgttccaactggtaataaggacacatgctccactatgttcatagcagccttatttataatagccagaagctggaaaaaaaaaaacccagatgcccttcaacagaggaatggatacagagaatgtggtacgtttacacaatggagtactactcagctattaaaaagaatgaatttatgaaattcctaggcaaatgaatggacctggaggttatcatcctgagtgaggtaacccagtcacaaaagaactcacatgatatgtactcactgataagtggatattagcccagaaacttagaatacccaagatacaagttgcaaaacatatgaaactccggaagaacgaagaccaaagtgtggacactttgccccttcttagaattgggaacaaaacacccatggaaggagttacagacacaaagtttggagctgagatgaaaggatggaccatctagagactaccatacctggggatccatcccatagtcagcctccaaatgctgacaccattgcatacaccagcaagattttgctgaaaggaccctgatatagctgtctcttgagaggctttgccggggcctagcaaacacagaagtggatgctcacagtcagctattggatggaacacagggcccccaatggaggagctagagaaagtacccaaggagctaaaggggtctgcaaccctataggtggaacaacaatatgaactacccagtaccccccagagctcatgtctctagctgcatatgtatcagaagatggcctagtcggccatcatttggaagagaggccccttgatcttgcaaactttatatgcctcagtaagggggaatgccagggtcaagaagtgggagtgggtggttaggggagtgggggggtggagattctgggggacttttgggatagcatttgaggtgtaaataaagaaaatacctaactaaaaaaaatttttttaaatgaaatagggacccatatagtagacaaaattctaactagaattaatggctaagataaagttcctaaaggagataaagtttataaagtaagataaagattaggattcagatacgataaagtttataaaggagaggctagattgatggtcaaggacaaaagtgagaaatctcacctagaggaaatcagggaccacttgatggacaatggtgcagctttgataagcaaagagcaggatttacattaagatgctacaaaccatgaaatgctgttctaatgtttgattctttccaaatgcacaaaataaaatacattgcactctaagctatatgtcaataaaagtagttgaattaggtaatgtcagagttcagaacagatgtccactaagaacacagaatcaaggaaacagacattgctatcaaagaagacgcaagaccctgtagaaacagcctgaggcaaaagcttgtttggacatggagggtaccatgcaggaaactagcatcctttggttctactcccctttgctcctcataggctttcttcctcccaatgcagaaccatgttgaccttttgccccatgcatttattttctctctgcttcttgaatgtgccttccttgtatttaatttgccatcaccctaccagcctccatgtctgccttggggatcacctttacagttgttttcacttctgtagttatcatgtgatgcaaactgtctgtatactctttattccttttcccaagaaagatatcgacctggggctctcaccaccctgacgtcaggtggccagccatacttcaatcagctttgattatagaagagtggccatttgactcctcaagccccctgtttgcatgcaaaaatggatgcaacggcacatgaataacatgcttttcaaaagtctgtgacatcaacatgctttcattctaggtgggagaagcaataataaaagtttaaaaacaaacaagacaaatgcaggggtggcaaatactaaatacattttgaaagtcattagatgaagagaagggatcacgatgcagggttgaaggcatagctgagtgggttgtgtggctacattataagtaaagcatactgagtcttctctgttctcagccagtcctccccatgaaccagggtgaaaattagcattaaagtttaaaccttacagatgctcctcactgtgcagtgcagctgtgtcctgatgagctcagtatgtaaggtgagaatatggtgaagttaaaaatgcatgtattacaactggtctaccaagcatcacagtgatacagcacactgtcctgcctgtggtttgctctcagtcttgtgtctgtgtgtctggcaggcagggcaatagcacatagctactctggaaaaattgaaattgaatgtctgaaacaaaggctttattaagtatgtttaactctcacaccattgtgtagttaggaaatcctaagtcaaccaactgcatgctaagcatcatccgtacctgctgtcacaagctgtggataggcagtttctgaacacgtgggaggagtcacaaatctggggcatcaaagaaatcgtctcggagaagtaactttgccacgactcctagtctgaactattatttagtggctaaaagctaaccaggttaggggagggggtagagaatcagctacgagagatttttatataaatgttcaggacaaactagagccttgggaagcacactggttcccagacgatgcagtgcccaccagcctcccattctggaactggagcagtcttagttagtacctaggatggctgttcatgtgattgacagaaagaatcctatgcagcctgaactgctctaggggtgggggagggggcgttttatctgtagatatctgtcatcactgtttgaaacactgtttaaaatctaaatcaaagcatccattccaacatttagcctaaggatgtcacaatcctaagacctgactcttttgaagaaaaaaaccaaaaaaacaaaaaatctttaaaatcagaagtctttccgtgacttgtatgtttcctgtcacctttcccaaaccaccccaggctcctgcaaaatcagagaagagaacacaagaaatgttcccttatgtctttcatctgttctacaaatacatacggaaattgttgatccaggcttgtgggtaatgaacctggccttggagaatcatctttcattttcctgtacacactttgcatgtttctgccaagccaggaagacttggatatgattctgtttacatgcacacttataagaactagacagaaattgtatttataaagtaagattatacagaaatggtcctggttacacattatctttattgcaaaaatataaataaaaaagagtgtgatcataaagaaagtaactacctttcctgagatttcccagtagtacaactgaagaaggaaataggtgatatatgttagtttctacatacaaaagagaattcagtgacatatgtcttctttaaaaaaaaaaaaaaacagctttcttcatgtgtccagctgattatagccaatagggaaaactctgttttgaattatgaaaaatgagtgtgttaggatactaagtgactaagtcaaaggacacatttccttgaacagtaagtgggtaactccgagttaatgccccatattggatgtcttttggaaagtttagaagactattaaattgccattaagcttatggaataactggctgtttgaaatgtgatctgcttgctacctgcatttcataaagaaatgcaagcaattgcattaggctacactaatcacggccaaattttattttcttgtctaaaccagaatttaattatacagatatgaaaagggaacttaataacactgacttccaatctcttcttggctggaaatttaccaagaacattatctaattcagcaataggagattatattctctggttagaagattcagttaaaaatttaatctctttgtttccaatataactgaattactacgtgtttaaccaaggatgggtttcttttggtcggacattagaggatggaatttggagacagaatgtcttctccccacagcctcaacttcctttctgtctctgcaattctgatagctgctgaagctctccgaagtgcagaccctcccagtgtggagcgttgtctgctgtacttctcacaggatagttcttttgaaggataaatgagccacgtttttaacagcactcagaagtcagaaactggggagcagatggccagagtgcatggctccttcactgcacgtcagatactcaacagaggttatggtgttctggtgacacaatagttgggtgaaactgagttctgaactatttgccctgcctagaaaagctaggttggaaggagttatccagccagaaatgacgctgttttataagtggaatgtcttgtccaagttctctaagaggactaggaggacctacagataacacaaatcgctggccaggggactaccttccgtggtgctacattaatctgcctcaagaaggtgatgagggagataactcattggaggtgaacacagccattatatctcagtgactggcagcatcttgtgactcccaaggcatccactgctcagcatgaaatttctggttagaggcaggagaatcagaagagtttcctatttgcaaacttatgcagatgggtgaggctcgcttagtaacaatgcagagaagccctgggcagtgtttattctgcagctgaaagatactcttcccagtacttgcaccctcaccctccttcccaccccaaaaacctcacgcgcgcacatacacacacacacacacacacacacacacacacacacacacacacaccacctcccatccaaacttactctcgtgacaagaaggaaagttaattgttacacttgctctttctcattggcacagatctcaatagcccccttctacttcctgcaaatgaaacagaaactatctgaggcacagcaaggtatacatacatagttgggcctcttgtctacagtgctttcgttcctaacagggagtgtctgtccgccagtgttttcagctttagcagctgggctcctcttgacagactgagagaggggtcctcaaggggaaaacattaccatctgattaaggctctcaagcaaattaaaactctctggacaggatcatctttccctctcttagatctcagggaacagaaaggagatcatctctctgggcaattatcaactctgaaagtgcttgtggtttgagactccagcagaacttattgcacacggcatcatcgtaatgtacttgaacaaactcaaatttcagtggctcttctgttccacgtgacccaacatgacatttgtgaagctctgtttccacccctcaggtcatttcttctttgtttctgcacagccaatctgccttatttaagctcaagtcttgtcttagccaccccttttcatagactagacaacttctaattgtccatctcatggccaacctgcacaaaaggtaggaccattgttttatgttgttgtctttttctcttgtagagactggatttcttgtaggaggagagtgcagggttaggaaaaaacagagtaggaggctgaaaacagcctctagcctctcaccagggtctctgaatgtgtggaggctgcgttaattcatacacttcatccaggatcactcagttgtttttccctcatagatgtagatggtctggcctggatctgatccagagagttggggagtcaataagagctgcctgagtaactttgcttctttattattaaagcaatataatgtgagttttctagggcaccatcgtttcccttaaagccagtataaactgctttattagagattatagcaccactgggacagaaggcaagagcaattatttatatgataatatgagctgataatttaggcataattcattcacataaatgttctaacattgccacataagtttattagcatatgtggcagagtatgagttctacccagacagcaaagcctcctataaaacaatttgtaattgacttttcattttttttcctatatggcagagtggtgtaggaacacagtgagatttcagagtgaggagcttgccacccttagccttcttgttgtttatctgccctgtccctgctttttgcttcattcacacaagatgggatgactggagtaatcatcttaatggagaaggggattttgtggaggcagttcaagttcagggtaggagagttaaggaagagggttaaagggtccatgcaggtccttgctctgactttctcttactctagatgaaaataattccagctgtaaataccagctaagatcaaattagaaaagatttttgtgatatgccattatcaaggcaagaaaaatataaaagcacaaaacagtaattatggtcatggatcacacatgccagagaagctaatgggcttgcagttctcctcctgatggccatgggtgtttaaaagttggtttttagaggcaatctctcatcatcagtcagaaggaaggaagggtttggggaagaagtctttctagaagcaaggtaacagagatgaaacaatctcttgcaataaaagaagaccacggagaagctacactgttttcagagacttaaaagggtaagaatagggagaagagacaatgggaatgaggaattctccagggttcctccagacatgtaccgttttcatcgtttttcttaatagtccaagtaacatgtgttctctgagttatgcctactagatgtactattgctaacacacaattgaataattttctctatagttaagtgcatagtatatcatccttcctatgtttgcagtaaaatatgccaatctcttctcctatgatttgttgacaaactttgaatgattctcctatatctttttcagtaacacatatttctatgccttaaattctacttcaccttggttttattttgggtcctttgggagaaggcagtctttattttctccaaacatatatctaacaatgctcccttcgtctttggctgatccgaaatgtcgtatcagttgtgcaagagagcagtgtagtaaaggacattatcccatcccatgcagcagggtagcatagcagagggtagtgccctatcctgtctgctcccttggtctgtgtttatctctctgttataccattggtatggtaagtttaattagtaggcaatatgttccaggaaaactctttcctatatacctacattagtcagtttttaagcagattattagagaagtattggagagagaagggcagaactaagactcttgaaaatttttttaatttaattttattttaattatgtattttcttcatttacctttccaatgctatcccaaaagtcccccataccacccccactcccctacccacccactcccacttcttggccctggcgttcccctgtactgaggcatataaagtttgcaagaccaatgggcctctctttccactgatggactaggccatcttttgatacatatgcagctagagtcaagagctccagggtactggttagttcataatgttgttccacctatagggttgcagatctctttagctccttgggtactttctctagctcctccattggggccctgtgatccatccaatagctgactgtgagcatccacttctgtgtttgctaggccccggcaaagcctctcaagagacagctatatcagggtcctttcagcaaaatcttgctagtgtgtgcaataggatggaccatctagagactgccatacccggggatccatcccataatcaacctccaaagactcttgaaatttaaggatctttctcatggaagaacagcatttggagggttagttctctttctcaagggatctgtctgggaggagtccagagtgttctgcttggcctttaactgactcgggtgatagccatttgctgtgtacattatcacactccaggtcagtggatataaacttgacctggttgatctctgccttgaacagtttggctggcaaggaaagatcccaatggggaaaaacctctcgttccagctattaatgatgataaggataaggcttaaaggcttgccattattattaagcacaacatagaagagtcttagcacttaacacaagctgggcaatgtgcaggaaccttggacagaaattgatgaggagtagctagaactgtgccctgggagtatacagacagcctcagcagacacatcctcatttaccacttggctttcttagatacgcgtgttcctttaaagaagcaagatgttctctacagagagtaatccccatgaggataacgccattgacaaaatgaatcctgtctagcatgctcaaacacaagcatatataagggataaattgataaatagaagatgaatggatagatgaaagaaagaaagaaagaaagaaagaaagaaagaaaggaaggaaggaaggaaggaaggaaggaaggaaggaagaaagagaaagaaagaaagaaagaaagaaagaaagaaagaaagagagagagagagagagagagagagagagagagagaaagaaagaaagagagagagagaatgaaagaaagtggttaaaagatagatagatagatgatagatagatagatagatagatagatagatagatagatagatagatagatagacagatagataatagatctgtcatatatatgtacacaccttatattgtacacacagacatatacgtatgcacacatttgttttttacacccacactagaaacaactgttagtgcttttgttccatacccagcacactgaggctaactaagctccccattccacacgactttacagaacctcaggtaataagagcaggtccctgagtcctaggagcatcattagtaaaacatgaagatccacttggaggcttcttgtaatttacgagatagtggacgtgaggcctgtagcaagggacctgaacatgctcatcggctgatagatactcagctcacacaactgttaagtggccttatggctcctagaggaatttagcaaattccctcaggcacatgtcagaactaaatcaatctctctctctctctctctctctctctctctctctctctctctctctctctctctccctctctccctctctccctctctccctcccttcctcctccagtgtgtgtgtgtgtgtgtgtgtgtgtgtgtgtgtgtgtgtgtgtgtgtgtgtgtgcatgaacatgtagaggccagagaacaatctgccatttccgaggttcaacctgtgttgtttttttgtttttttgtttgtttgttttgaaacatgctctttcattggcctggaattctttaaaacacaaaaccaaaaactaactaagaaaaaccagaaccacaggtcctagggacgcaaaccaggtcctcatgcttacaaggcttcacttactgagtcatcaccacaacagccatcgggctttttcctgaaagccatcttctagatccttagaaagactctaagcaagaaggacgtaaatttatcaaaataagatctccactgaaagcatgaatgtagtgaaatgtgaagatgcctccacaggctcaggttgacactgatgttaggaaggagatgaacttgtcaaaaaatttttaattggttatttatttcatttacatttccaatgctatcccaaaagtcccctacacgctcccccacccactcccccacccacccactcccacttcttggccctggaattcccctgtactgattcaaaaattgtaacttaagctttaaaccagatagtattttcttctatgtatctataccttctataacataacggttaacatagcattaaattttctcggaacagttaagggaatgtatcatccattattggcaagtagtaatattcactgagacctttctgcgtgccactcatttcagaagctgtatgcacagagtaggtgacaaatgcacctagagccacacagcttttacttagtaaacatgctcacccagaaagtctagtcccaacactcctgacaataaatactttgatcgattttgaatgtagagttatatcaaacatggtggtgtgtgctttttcagtccatcagatctacacagtgggttctacaccagctggggctgccaggtctacatagtgggctcctcaccagtcagtgctattaaatatttataaatagaatcaggaccacactgcagtggaaacattgaacaggcctggagcctcttttaactcccaaacagggagatatcatctctagaccctgtttgaaagaaagaaggtgagtctactaattttatttcaaagtactctgtgatgttgcatgagtcttgagccactaaaccacaaagcatacaatacaagtggccggcagcaagctgcttctgaattttacctaagattttgttgggtttattttgggggggaggggtatattttattttgtttgttttaatggcatatgctaacatggattaattcatatatcaaagtcccattctggtgagttttccagtcagtatgtcccttcctactcagtgcatcctggctcgaaggacgatctggaacccgtccagtagaaccagtacctgcactgctctgcctgctgccaggctccatgtctggtaacaggactgatgaaatctcttggccagatccaggggtgagaggcagctgggcaacctgtccccagcctctggcaagcccttctggactggcagtgagtcccctacttcctatacgtggttgctgctccttaaatggagggctaagcctccacggggctggctgtccagtgaagctctgccctctggcaccttctctttgaagtctgaaagtcagtctgcagtctgaaaagacagaatccagctttcctctgccctgctggcttcctgcggcaactctgtctttacctctttgtagttggaggttctacatgaaactgggggaaagagattttgccaccatttttttttctgctaaaaattaatagatttacagattcctgaattctgcttcactcctatacaattttttttccattttttattaggtatttagctcatttacatttccaatgctataccaaaagtcccccatacccacccacccccactcccctacacacccactccccctttttggccctggcgttcccctgtactggggcatacaaagtttacgtgtccaatgggcctctctttccagtgatggccgactaggccatcttttgatacatatgcagctagagtcaagagctcaggggtactggttagttcataatgttgttccacctatagggttgcagatccctttagctccttggctactttctctagctcctccattgggagccctgtgatccatccattagctgactgtgagcatccacttctgtgtttgctaggccccggcatagtctcacaagagatagctctatacaattttttttaaaagtacaatattgtctctttccagacaaggctacaagaatgtctgtcctcatacactctgttgtcagaagcagacattattttccactgactctgctttgattttagtggccacatttatagagcacctgagctgtcttaaagttacatcagcagctatgtatgaagttcctgctacaagatatgtaatctcccaggctagacccccttgtacaaaaggcttcagaagacccagagtgaacacattgtttcagactgtgagaaagccaaatcctacatggacacaaatgtcacactacagagcctctgcttcccaggaagattggctacatctgcttcatgaagcagaggctcacccaagacaaagacaccgtttaatatgtatgctcattttcaattctcttgagagctattcatatgtgaaatgcatcaaagttctaactttgaatcaagtcgaagggaagacacagctgggcttgtagttatcatgtgaggtcagccctagctatgcaaggctctctgatgggctacaagctgcttccatttagtgagacagactccaccaaatgataagactttatgttttaataaatttgttgtctttgtcaagatgttttgctccatttaaattattcttggagtatagaagctgggccgtttacatgagcagcagggcagagagatggttttgtgtagtgcaggtttgcactgaattcccatctctgtacaaaaggctaggaagcagctgtgcttctcagtttgctccctggggcttgtgaagcctgccaaccatcttttctttttgtgtgtgacaactttgctgtaacatagcctcaaaaaagaccatttatggattctaaatgtttttgccgtccaaggaatggggctcgatgagtccattcaccatgcaatttcatttttaaaatgaaatggaaggctgggaccgtagctcagggctagagctcttgtctgtatgcacaaagacctgggttcaatcggcatcacgaaaataaaacaataaataaataagatgaaatgggctgcatgtggtaattcaaatttgtaatgccagcacttaagagacagttggattcctgtggctacctagtgagatccaggccagcctaggattcagaatagaaacttgtctcaaaatggatgcgaaggagggaggggatagcaacaaggatgagggagaaggtgtagaggactacaaggaggaagggaaatagagactctgctattggggtggttattgtgactaaagtctgctaacagtaccacaatactcttgagtttgagattaatttaaacctgaagaacagtgcaatttattacctgggtccttttcagtttgagccattatccattatattgtacatatccaaactgcagagacagaaactcttaaaatatttatgtacatatttatggagtgtgaaatggaaaatgatacacctgggaacaagtaccaaacaatggaaaaagtacctaataaaatgagcaagccactgagaagcctcgcagcacccagctcgcctcctcctacagggacaagagaagaaaacatttcttatctacagctatgtggcacagtgtctacacaggaggggctgcttcaaaatgggagactcagccttttatgggccttcttttccctgcctaagttacatacacttgactcaaaggacttacttcaaaccactgattgaactctctttcagccatctaactgaaaaaaaaccagctggaaatgaatcattttcctctatcagttttgatcaatgagaactctctctcgcgtctcatcttgactatgtgtaccctgtagtatggcatgccgtacttcctgaattgctcttaactggcctgtctaccaccattggccccaggcactgtctctctggctgtgtcatagtgtaattctagaacaacttccctctcttcctcagtacaccttccaccttaaattcttaaaatgaaacctaattaggatcccgctttgctttaacacactatggaccatctttacctgttggatatagtccatcaatttcgcacatgcttgaatatttacttttacttggataagactaagtcttccttctttaaaagtttatccaccatattccccacttactcacaggtactgaaatttatcatcgagactcacaacttcaaggatgccatactttctccttactttcccagaatgcccggcatggctggcctgtaggcaggaggtcactgaggcaagagtaaagaataatcataaaataatgcagaaggcaacacactacagggagccagtcaaggtcctatgtccttgttgaattggaaagaccatagagggatgaaaatggaggactggcatggtctgccttagattttagggccacctctgactacacagtcagaatgtttgtgtgactgggaggcatgggaacatccaaagcagagcaatcaaaagtaagtgacaataactggagcaaggagttgccaaggaagtgggggtagcggtgggaagaggctgaggccggggtgggaagcagagatggcagggagcagagatggtgagagggaagcaaaactggtaggaacttgctagatcctgtgaatactcttatgccagaggtgacagggtctgctcatgtgctgatatgatgccaaggatgatggcagagtctggggtaaaagaactggaaaattgagtaccactgttctggttggaggagaaggatgcttcatgggacactagcaaattcaaatctgactccttccctgggtgttagatttgagattccatctaagaatgttggtaggcagatatttctttgagtcaggagctggagaagaagcttacaactagagaattcaatttgaaagctgtcaacatccaggtattgtttattaatatagatagagaaaagaaatgttaccacattataaaccactaaagtgaaatgaatgaaggcatgatcctgatggagactcaaatgtgaactgtgaataacacaaagatctgatctcagtaacattccagggattttattgttcgctgtcttcgcgtatggaaatgtgttggcagttctcatttccaaggacacactgctagataatagagttatttattaggttaatgtagaatagcaaatacaattgtctcttctaatattcaatcactcatgcccgcctcttctgtgtctttgtactaatgtatttgcaaaaagggaacaaaaatcaatatgctaatctgatggggttgtctagtttctatcatagcccacacaacatgtcttatgcacatgaaaaatcctttacatctttgtacaatgacttccaatttctaatgtgcttgattgcccgctacatcccttgactttgtgcctcacctatccatcggtcatgcacttcagtattcaggtgcctgatagaagttttcagaagctgcatttaaagaggtaaatggttggctgtgggttgaacccaggtagcccaaatggtctctctacttctgtttgccacctccctgaggagcccaaggtcagccccacctaaatttttagggcaataaactttagggtctttgttcaatttcaaaatgaatactactgaaaataaatggtactcatagaataccataggcaaggtcagcaactctgtgtgtaaatcagaattaagcatggtcactggatctgagatgccaaagaaacactgcagaagagaggagtatagtgggtgaccacacaggccctgtgaaagcatctcccctccttagccccaccctgctctacacatcgtggtagcaaaaaggagccaaactctggcctgtttcccagtcctcttccctgtaggggtttaactctttcctttctgtcctaaaagattcaaactttccagggtcttctacctctttcccacagccataccataaccactgtggaaactatcaaatcattcctacagttagtgaaggccaggaggagccaggcatattagtgactagacccaaaagagcatctgtatatttagcagacaaaacgtttgattttgtttcagagactacgtctgatacaagtagatcccataaatttgtgctcaaatcaaaagacaggacttcatagagagccttgtctagttaacacacccctcccttgtctccaaccaggatttcacatgggcagcacatggctggggaggagggctatagggggtgggctccatcttgagaattacttgccataggtgttgctgcctgccactctccagtgggtgccacatattagggagactcccagaaagagtccctctctcagtcttaagctgcctgccctgaacaggtctcctaggagcactttaaagtctccatgtgagctgtcacttctcatgcccaaagcgggccccatcacttcctaagttgcttttcagccacttggaagtcattgctttgcccagtcacttgtgttgtggggcctctcgaaatactatgttaatatggaaaaggtaccattaccagccagtttagtttacagggaaatgatccacaggccacagctactagacaagggaagcttgtttctcagtgtcaggccttctcctaactttctcttccacactgtctaggcaacagagtttgtgcaggcaactccactgagtcacctgaaggaaaatttctatcacgataggattggcatgcaaagcatgagtgtgaggacagagtcacattgtcatttccgctcactgactctctgataggacaggccagtcaccgtatgctgcattcagaaacaccaggggtactggagtatggcacatcactaatttctcataaacaccttaaatgggatgctcagggctcctttcccttccgtgctctgtgattgacgtggtcccaggcaaggttttcagatgctggctttcaactttccctctctgacagagctacacttagtaaaactgggtctgtttataaattctgcactgctttttcgtgaacatcttagagggaaaggaatagcaacaaaaacaaacggtgggggctggggacgtggctcagttaagtgaagtgcttgcacagcatgcaaaaagccctggcttctgcctgcagttagtataagccagcccttgggaagtagaggcttaaggaccaaaagttcaaggtcatcctcagctacatggtgagttcaagggcaaggctggaccacaggaaaatctatctccaaaaaaaaaaaggaaaagagggagaaaggatggagagagggagggagggagggaaggagggagggagggagggagagagggagggagggagggagggaagaagtgagagagagagggagagagagagagagggagagagagagaggtctgtagcctcaggaaatgtgaaaatatgaattactctgtggagatagggcctccagattttctagaactcttgtaggtattttgttcagtagctttcattcatgcattcatctgggcaggacatctacctcaaggctacacatcaatgatgaagcagacagacaccagtgagggagacaaaagagaaacttgtgattatcatgcttgattgatccggacagagggaggagaagagagcaatgcgaacaggaacagtgacttctgagctgtgagtttggtctgtcagggttagaacaggaggcggcagagccagtggcagcagcctgcgaagcaggaaagtactgagtgcatggtcacactcctgttcgggagtgtggggccgtgctgaagttcagcataactgcagagggatcagatctgtctgtcaggttagcagcctattccctctgctctaagccactcagctgctcccagtcctgtcagcatgtcctgttatacctggaagggagcagacttcagaaaaatcctctgagcccatctcaataaatctgtctgcttggttaaaggaacttttcagtgctaagcagggacctataggactgagcccacaatgcagagatgggatcaaatgttaaggtcagctgtgtacttcacagagactggtctagcacatgtgagacctagtagaggaaagcagaaacctggtggtttgacccatccagaggggctatagtttccaaactgatttaccaacttgggggtttcaaacacacacacacatacatacacacacacacacatacacatacacacatatatacacacatcatatctatcacatccttactttaataatctgtcccaggatgttaactcttattgcttcttccctttggtattgtgaacatgaatgagtatgcaaattgttcttcaaaatcggcctctaattcttgtggacatgtgatggtgtgagaagtagaactatggaatcatgtggcaactttgtttggaaattcactaactatataaagtaaagatggaagctgggcgtggtggcacacgcctttaatcccagcactcgggaggcagaggcaggtggatttctgagttcgaggccagcctggtctacaaagtgagctccaggacagccagggctacacagagaaaccctgtctcgaaaaaccaaaaaaaaaaaaaaaaaaaaaaaaaagtaaagatggccctttaggaaatgtatccttaattaaaaatatagctttattttattaaacaacgtcctatgaagaactttcttcctggaagatagggatgaatcttcttctttcttggagagagtgggaagctgtggagactgcaggacagggagaacagagagatcagtgagctgtgcacagacagcctgggctccagtcgagcaaagatctagaaccctggggacccgattggtggtgatttccacctacatggaatggaaggtattagatcatgtcgcctggacccctggctcctgtcaaaattaccctccacagcccctgcaggagaggtatgtgactatcagtcacgcagaaaatgtcccaagctcctggcattctggctagactccacccccacagttacctgactatagccaggtatgctcctccccatagttacctggcaacagcaagatagcccagccctctataagatgggctgtttggcccctcctcactctctttaagctctcactatttttgctctcttctctaaccctcctctctttcccttcccccctctctccatgtggccatggccagcctttctccctctttctacattctctctttctccctgcctttctacaataaagctctaaagccatagactgtctctgctcatcggggacgcacaatggaataggtgttcccctaatgagcccggtctaacctccctgctggaaagccttcctgcgctccagccatggactggatcaagaactctcgcccacatgggaaccacccctgcccccctccccctgcccttttccctcttcggcccctggaaagaacaagccaccgctgggcccccatttgttctcagctcttccgcggtgtccagcgtgggatgcccaagactgagagcctgttatctctgacctccatgaggcccagagacctaggactgccccttgtccaccgccgccaagctggggtccagtggcttcccacagccagacacccacccagggacagtcctctggcatctgcccagagcactggaactctggcggcacacaggttttctactattccctttattcccccagtccccactgcccaacaggaaggaatagattagagcgaacagtgagcagagtcttgaggatatataccctgctgctaccaccatgcttttggaactgtgggaagtcccagattctatgaaaatagcacatgacttctggatagcataatctttgaatcagtgagtattcttgtttgtagctgaatctataaatgggatagaaagattaaaagttacatctagggatctcctttacagtcctggggtgaaaagtctagagaataggttcatctcctttgatatccaaaagttacaatagcaccaataaattctacatcatgcattgagaaggcaacttacctaagttttacatctcagcagagagagtccctatcagtgtctaggagctaacactggcactatctagcaataagtaggagtcacaaaaggacaaaggaaacaacaggaaagccattatgcaaatacacagccaataattgcccacccactttgaagagcctcagcagagcatagagtaagttgttggctgagagccttatagtcagactggactcgacctcttggtgttacaaaagcatgtaggataattttttcatcaaacttactggcgattttgatatagaaaaggatgcaggaataagaaagaaaagctgatgctctctccctcatctccagcctagctggttaccaatttaaccagacacccatcagcttagcaataagacaacggaaaggggtgagaggcgaagtacaggtttagcagaagtggaagagtctggccatctagagcaggtgcaacctgtggatggaaagtagcatgtggccagagcaacacaagctaaaggtacaattatttacccaaaacatctgaggtgaggaaacctactgtttgcctaagacaaacctgacataacgatcagttttgctcaaacaaatcattactgaagagaaaaagggtgggctgaacaaatcttcaagtccctgggattccactctggacttctctggatcccaggcttctgtgagtgagaagaacaaagtgtaccatgaggatgagcagagcttatcatagaatgaagtggagtgatatccagggtgagaatgaactgtggatgaaggggccaccatgcctgtctgctatccagggtgagatggacggtggacaaagggaccatcatgccgatcttaatgtctaggctgaatactacttctacactctctagaaacttcttccaggtatcccaggaatcaatggggcccatttagattaactctgaagtaaggtcttggcttgttttgtttgttttatttgttttggttgttttattgtggttttgatttgttgtaactagaaagcctctgctagataggaacctcataatttctgggcagctcagaatgtcaaatctacacccaggggccatagataataaactcagatcccatttttttgatgagtaatctgagtcccaaaattccagttcctgattttgcaatcatcttgtcctcagtgaccttcaagtcaccattatctaactatctacctaacactgagaattgccaaagattattatgacagccaaggtattagaatcacaacaaagaaggttgtgaaacagatgtcacagagatctggaagagactccccaagggaggtgcatctaagcagtgtgtggaacaggatctaaggtcaaggtcggtacgtgaacaggatggcagcacacaagaaagccatgttttggcaaaggacaatgcgctggaaagaggcttagctgagtaggagaaacatgagctgagtctctgagggtggcaagggactcacccttcagtgagcaccaaagccagctacagaatccaagtgcaggtagccggagaacatgtgtgacaaggtcttgtatgaggctgccacagccattctgggacttgatgctgaggagcattgacacagaaggcccagacgctgaaaagggttatagggaatatatacgtaaggccatatttctgaccgtcctcatttaaggggactacacattgttaggaatgtagaggcagaaggactgtgctaccaactaaagaaagacagaaagggatgagcacatttgggccagaaatgacactgagtctgacgacaatgattatcaatttcctgggtacaaaataataatcagtgatatgtcacttcaactgtatctatcaactgtcccttaaagttggtgataaaggatagagatacaggttaaggccctggtgacatgccataacatcatagagagagaacttgaagatgtgggagtgagtccacaaaagtggagattaatcctctatggaacaatgtcttggggtggggggtggggggaataatttgatgaatggacaaaaagaaagcagaaaaggaaatcccaaagtgtcccagagagagagtccttcccacactttccagagaggctcagagacccacagaatttagaaagctggagggctgggacctcggagaacaaagcattgtggaaaaatggtaggagagctgacagggacagcaccagcatagtggtgacatattctatgcagaggaaattctatcaggattggacatttcactgctgattctctggctccagtgccttaattttatgttcaggggacacatttgaaaaaaatgtcattctatgggaaagcaaccaggaaaactggtaagtgagaaagacattgcacttactttggtctaaagagaagaatggtggcaacgcagtcaatggcctgagctgagagttctcacatggaggagaggagaaccagaccagggcagtagtgacagcagagactgtgtcacctggttggttctgctcactgcttccatgtttctcactgtccaccttactcagtgggctcgcatctgggactgagcagagagggagactattccctggtaactgtaagcactgttggggacagaggatagactatagagctgacctgtacctcgagtgcagtatgcaagtagcctagggccacgatggacaaaaatcagatgttgttgaaataaactataaaattcaccccaaaatgcagaagagcctgcccaagcaggttaactgagtagcacacaatccagaaaatgtactggaaaagcaattgaaccaggtttataaaatgcagcatccatcagtcctgttatatctggaaggcgctacttccttagagtcactgaccacctctggatcttataatcattctatctcctcttccacagagaaccctgagtcttcaaggaagaggtatgataaatatatcccatttactgcagaatactctgaggtctctcgctctctgaacattgttcagttgtgtatctgtgttaccactttctgcaagaagcttctttggtgagagttgagcacttctctcatctacaagtatagcaatatgagattaggagtcattttattactgagtttctttagcagaataatgatagaaagatttttcctaggctcatgatctatctagtctcaggttcttttccaagttagcaatgtcaggtatggattccagctcatggactgggcctgaaatccagtaaaaatgtagctggtgagtacagtattgttcgtgtcacaactgcaccggtacgtcttccaggcaggactctgttgtaggtcacaggatttgtaggtggatggtactgatgactaattatttcctctgatacacatatgaactcacagacgctgagagggggaagagacacaaagtcacacccctaaccaaggagctgtttgcaaatgattcctcctgggaaaaggaaaacaaacaaacaaacaaacaaaacaaccagttttctccaatgaagtatcactgagtataccagccatactccagggcataccccatgcccaagagtagttggccaacacaaaaccaactccatgtcttagtgtgtgtgtgtgtgtgtgtgtgtgtgtgtgatttctgtctaggtttggtattttttttctgttttattggttttcttttctttttctcttttgttcatctgttttgattttcctttgctgttttgtgttgtatttttatgggttgttattttgaagaagagaaataacataaagttaagtggataaggagatgggatggatctgggaggagttggggataggaaaaatctgatcaagattatattatgaaaaaggtttttaaatatttttaaataaaaatatttaatgtaatgtgtaaccaaacaccacaaatacattacaagacttaacaattgtcttaaaaggccactatttttctcctcaaaactgaaatttaattttgacattgggcctgacattcaaggacaatatcaaaggttttgtggaattttcaaaattagctaagaaaacataaagtaacctatagaatgagatgacacatttaattcttaaaatcataggaattggggggggggaatctcactttaatcgacacctgctagcttgtcccttaccaaagcaatttataggatctgtccatgattaattatacttattttataattatttgccttgaatgagaaagcccaggataattcctattgcttattaacttattttatacaaaattggcattttattccatcattattttctagtaagtaaaattatacaatttgattgaatgagctgtaagctcctggctagacaaagaattgtataaacataacaaattatacacataactgaaatataataacttatgagctgcaggatagaaaaggtgacaaaaagtctagatagatcaaatctaacacatttgttttaattgatctataaacagagtatggaaaggattgaataccttgcttaaggtcaagtagtgttttgagaactggcaatcaatcgaatttccttgttcccaaatcccctgttggaatacagtgaagttaggagtgaggggtttgatgatgagatcatgggaatctgtattcttattaaacagactccaaaggagccactgatctatcctcctacatgatgaccagggatgacactccagaactgtaaatgatgcatctctgctgtctgtcattcacttacatacagcaggtgaactattagagatcagacccagagtgaaactcaggaccagcacttatccttcatggaacttaggcctcaggcaggtatttgaggacactccaaagtaaggggcagtggtggagggggcagagataagggaaggatgtgatggaaatttcccagatgttttgactaagctctaaggaattgaaacacatgtattgctaagtgtattataagaaatgaaaagataagaaggcttgtgtatgtgtggggggatggggatgggatgggaagtagatagcttagtcactaaagtacttgccttccatgtatgaggacctgagttcaaatcccagaaccaatgtaaaccattggacatagtggtgcacacttgaaattccagtactggtgaaacaggggcaaaaggatccctgggacttgctgagggctagcctagtgatgagctccaggtaatagtctctaagcaataggttgacagctctcatggaacaaagtccaatgataacccctgaccaccacatgcccctatacatacatgaacacacataccccaacacatgctagtacacacacgcctgcaatgcacatattttaaaaactgaattaaaaggcttgtggaaggatgcacatcaaaaactaacacaagcatcttcacaagtcttctaagcttctatttatgtgtccatcagctgctgcttctgaagcgcccacatttgagacacagtgagggctgtttgcttctcaaactcagtaatgagttatcttatctgagacattaaacataaggttgccagagtggcaagaaaagtaaatatgattatcacaattgccaattgtccattatagtgtgtgtgtgtgtgtgtgtgtgtgtgtgtacattccccactcacagacactcccaagttcatgagttttagatataccgtcattactgacaataaagcagcaagaaacatcccaggtaaaggttacagcacttgttactcttgcagaggatccatgttgggtggtcttctggcttttgtaagcacacacacgtatgcacactaccataaagacacacatacgtgtacagaaataaaatttaaaacttaattttatttttaaagaagtatccttgatgcctcagatcaagctgacgaatatcaataggagtcatttcaaaacatctgtgtcctggcatttcatcaataaaattcttgagaaatagattctctgtaaaagtttttggaattaatcaacttgtgtgggtcctatattcctatttgggtacaggaatgtcatctctatggtagttatagctagcattctcctttaaataaattcttggtacttgggaatcttggagagcacagagggagtaggtaattaaaatatggtcatagaatgaattattctaagcaaataggaaaatgcatatcgagtgggaaagcacacaggacagaggggctgatggagtgagatgagtagagcaaaggcaagcttctaaagaaaagcagcaggtgtcaatcacagctgtgcaggtgtcaatcacagctgtgcaggtgtcaatcacagctgtgcaaagtccctggactttgatgggatttttaacttaagaaactatgcgcaagtccatgacccatgctactgccatctgctatggacaggaaagctgcttttacagtggtgtcgatgacggcagactcataactgagaataagagacactgaaggcttctgggatgaccttccccacttccccaagaagacagtgcagacaggaagccactgaagaaagtcctttaaaactggcttggatgctggccactgggagcttgaccatgtttcagtgactgtataggcaacacaaattggacttgatggggttttttgtttgtttttggttggttgctttggtttggttttttgtttgtttggcgggaggtggaggtggcacaagggtgagaggaagcaattatgatcagggcgcattgtatgaaattcccaaataattaataataatataatgttgagggggacaacacaataaaaaccacttggggaggggaaagagaagaaaagaaagtaagtaagcaaagatgcatatgcatttcatagttttgcacagaggctagaaaacagaggtaatatacaataacttttcagtttgacaaacagaaccacctgcttcattttattgtattacaaaaggtactgaaagaaaatcagaacttttggaaagcaccaattaatgctactgtccttttccaaccttcctactggtttccacggccgtccccatacatactgtgttctcttctgagctgagctaatctcagaagagaagcaaatatcacctttaaagattcaactgggatgtctcaaagagaaaagacttcttttgtagtgtatgttttatgtgtcaaatcctatcacgtgttatttccttgtatacctataacaaggtaagaatttctttcctagtgaaatgataagaagtcacaaactagagaggcaggtagtggtgtccaggaacacaaagccagttagtggaatgccaaattccatgtcttaaatgcatgtctctaatatcacgaagaaagtagatttgtcatgatttcagctaatacttactgttgcagtttgaatgggaaatgtccgccacattcatgaacactagtttccggctggaggtgctatttagagagggtggtgatttgaacatattgtttcccgtagactcaagtgtttgaacacctggtacccagatggagctgtccttagaaaggttgtgaaaacctttaagaggtgttgccttgctgaaggaagtgagtcgctggggtgggccttgaggttctatagcctagccctactacttccagcttgccctcggcatttctgtcagctgatgcgaggtatgaccaatggcctccttcctgctgccgtgcctttcctgccacagtggtctgtatcccttaaattgtgagccaaaataaatgttccaaagttgctttttatcaggtatttggtcatagcaatgagaaaagtaactaacatggggaaactctagaagctttagaaatttggatctaactggaggaagatgagtcttgaggcatgctttcccttaaaggttgtacatctggtcccagctctccatctttcttttgacttcctgtccactgtgagatgaacagcctcattccagcatggccctgccaccgtggtaatcttcctcatctacttctagaatcaacaggatggactttgaacagaaatcatcagtctccttcctttaagttgtctaaggtagatgttatgtcaccatgctgcagaaaataaccagcgtaccagacatatctgctgccccgtatcagacatagtttagtgtggaggatatgctgcgggggacggccaacattggggaacttgctgggtgaaggactaaggcttccacatgggcaggggctgcagatctagtttacatggggagccagctcttctttaagtatggaaagcaagggaaccacatggatattaaaatatagggattaaagggattaaaaagctggctacccagtatgatcaaggaggagaaaaaaatccctgaagaaacagcccagctgtgaggcacacagtgcttagtagagaagaggatggttgttgtatgagattatcaaagatttacaggctttaaacagagcagaaggatgcgctcttgggcgtggagggagtcagatgaaataagactaactctaagccatataacatgaaggtttattgccatgtaaagaaactaagcctaagatgcttttagctgaatcaacaaaacaggccacaattacgtgtacagcaaagggtcaggaaaaaataaacaaatggatgaatttaaaatctccatcaacttcaagccacatttaatgcgcatccagtctctgttttgacttaacaagttgcttaaattacaaatttgtatgtcttaggtgtgttaatttactaggtcagagatctgtgtcctgtgaggaacagaaagactgtctcatgtaggcaaaattatgaatgttttaggagctgggaaaaccccttagggaccagtttcccaccctcctcactactcactgcagctctcattgagagcagatgagccaagagagaattttggggacaagaaaaggagtcacaaccatcattcattaagcatctaatgtcctcattattaatgcaaatcactttaatactcacctcattaatcctcacagtgttctcactgagtccttttatggataaagaaactgaagttcccctacagaactaattttatgatatgtccctagacttgaatattatataccccttcaaataatgttttcaatgactttttgtggatagcataatcatgaaaagtatacaagagttaatttccagcaatagaatgatggatgatgatttttaaagtttcttaatttaagaaatgcagttttattttactttcagaggacatgtcatagttgcgaatgctgtttttgtctatgtagactagtgtaatgaagtgccatgaactggatggtgttataaaaccacagaaactttgatctcccacacatgaggtctgctccatgatctaagacctaagatctgatccttaatctaagatcaaggcagcaggttcagtggggggtggggggcagggggggggcggctagaggaagcttcttccctaaatggatggtgctccttgcccgtttgccccacagaatggggaggggtctactacttcttaagggtctctttggtaggggcagtaattccaattataaagactgtgccctcatgacctaaggctacccaaagccccacattctcattatcaccttggaagttaaaactttaatatataacttttggagagacactagtattccaaccagagcaaaaaataaccaatatacagaatttaaagataaataacttctaatgagaagatagcatgtgataccaacctttcagagatgggcaggacttgtacaggcaaaggctagctgacaaggaagcaagaaggattcattacagagaaaggacagagcatggcagagacctgagaaagcgaaccaaagctgattgaagccatgtgggaaatatcactgcatgctcacagaaggactttagatttgggggcggggggggggggtgggggggtgggggagggggcgttgttttgttgatgtacaatagtcagctttcaggtttcctgatatgacagtgtcatgatcaaagagatgatgtaagacctaatcttctgagattatctacaaagtatgacagaggcacgaggggtaagtcattggcatggttaggtccaagatgccagagcctggcttagcgacttgtcaacagggatggaagggaggaacaggtagacaggcgttcccactcctcttctccagcctaccctatgtctgcttctacactttgccatttcagggacactggcctttttctcctcctagaagttacagcgtgtgctattacacactctgctctggacattactcaattcacacttactcaatattttatctttcatgtctcactttaaatatcttccggagttttcccttcctttctaagccagtgtagaccaggctttgtgatgtattccctctcattcctccaccctttttcttcaccttgtttaccacaatcattagctaacagctaatttgcatttttatatcagttactttgcaaagtcttttacaatctgattccatcttatccttccaattgtcccatgaagtaggtgttgctatttctccctgtgtcacagagacaggaactcgtcttttaaaaattattttttaaaaaattatgtttatatgagtgtgtctatatgagtataaacacatagagaaaagaaaaggaatgagaaagggggagagggagagtggggaggggaggagaaagaaggcaggagaagaaaggaaaacagaaactctgtttcatttcccagttcagtagagaataaaaataataatgtttttgttttatttaaagtttgccagatcctgtttgaggcaaatttgccatagaaacctctaaattgatttagtggactatagcaaagcttcaatttaaaatcatgttcagaagccacccataatgtcagccaggcttggcttttactacacaaaatacaaagggggcgttccctagaggatccctgccctgaggctgtcttcaggagttcctaagaaaccggaagccttcaaaacaaagggcaccacagaggtgagaatttacctcagactcagctgccctgcagtgcttagagttctggcggattagcacccactgtttcttacctgtcccagaggtatcaaataactccaggcccctgacaggagacttgagcagggagcagtgaaactgtcccaagctttctggtgggacctggttctagggcaaatttgcctcaaataggatctgtcttggcagagcttagtaatcaactatcctgcatccatttgtcccttttggacaacatgtagatgaagtttgaacatttcttgtccagtgccaaacttggcaaaattaaagcaactccacgtggaagtttttgatgcttaccatcgtttttgaagtggactagaggtactgtcagggacagacctgtctcatagtcaaacggttttttaataatgattttaaatgtcatattatttggatctctgatgcttttgaagaccatctgtcacttttatagcatatctaaacaagcaaacattgcctgtctctagtaatctattacctattcaacccaagatatacgttttagtaataatctagattaatatctgacatgaccgtaagtttgactgtctattaacttatattatttaattatcttaaacagtttataatagcagatattaaaagaattaggaccaaaccttgaattaataaatgagttgcacaggtataatgcctacctaagagttgacacacacataactatattgtaacaaaattaatcttaaattgtgtatcagtatgcaaagatttatacaaatgaaaaccttaaactgtaatgatatataaaattctgtaccaatgtaacaaaatataaagatctctatcaatgtaagtttatgattatatcaaaacataaagatctttaccaaattatgttaaaatataaagatctctaccaatgtaagattatggttttaaaatgtcttttagtagtagaatctttaagagtagattcaacaatctacccatatttgtctaattcttataatatttctgtacccccctttttcttttcaactccctattctaagaaagaaaagatagagtgaaggaaagatagaaatcactgtgtctaacccccccctatttagtttctttcctgtctaagacaataattatttataaattctcctttaaaatgacaatacatgtatcacttataaaatgaccaaaaccttccaccccaacttaagggacaacagtctccctgtaactcctgactgctgagttagggcaaagaattctagttttaagctcaaacgaaaattggaagagtggtttaatcaaaagaatgttagctttaacatttattgtccagtctttatgtattgagaaagttcagggcttaactgaagctctgactggaacagtctgagaggctgcatgaaccaaggtcatctaggattagcagtcctttctgaagctgttctagaatcaagtctctagaaacagcatcatcagttgaggcaggatcagtcagggagctggaacagcagatctcagcatctcagcatctcagcatctcagcatctcagcatcctcgagggtgaatcctgtcaggttttatcttggttgttttatctatgaacataaaccttttaggggtaatatatatttctatattgtcatgacgtatggaatgtgcagtgtgcatagatcatttcagatgaatttttgctccttgtttgagcaggcaaaagacaacagtctttctttatgagttagtttgaacatataaccaaactgtaatatatcccatatggaaagatgaatcttagggattctgtagccaacatagtccattggctatatatataactccagttctggctagagacatttttatgtctcagccagtttaagactgttcccaggtaaagggatcagcaaaatcatgttacctctcctgtttggtctttttatttatttcttcctgtctgcagccaagatcttcagggggtcttcctctatcaaatctgatccttattactttggaaggagtccaaagcctttattcttttctggtaacacaaatacagagcctctctccaaaaataacatgtccttggttcagcaacctgacgtcatcaaaagaatagattgattcagtttaacagcacattttctatttaggaaaaacttataaccaccttcattttgacatttaaaacaattaaaaacaactattattatttcttattgaggcaaggtttctctgtgaatcctggactgacttgaatttgttctatagattaggctggcctcaaactcacaaggaacctatttttcctggcctttgtctcctaagtattgagatcaaggcctggatttatttacttaactatatccttgaagacacttatatcaattctcatttctttctcccttctttggagattaatatctgtgcagataaatatgcctatgtcccctttctttctatatgaattaatttaatatccttctctatattcagcttcattaagttcccttctactcactgtataagcacattctcggccatcatgtatgtgtcatgtgctaggacaagcagtcccagttttcctgtggaagcccacgtttatagagactggttgctaaagatagccgtgactccttaattcatgttattctttataatttcttgattgcgggaggcatgcagccttactctccactccgagcagcaggattttgcctgcttcattgcacagcaggggttttcagcatccacgtgattaggctgcattagacagcccagagcagcacctgggaagagcataggctggcattggagtctgccactttgttgttcatgggctttgccatttggtgatcaatcagtttggggcttagctgtgttttagctcatggtttaacccctgaaatcattctctgaaatcatgtgtgctaaaccagcatgcatttcaatgtttgctggaatcccacttgctaaggaaccatcccccacccccacccctgcctttctagtcttaacaggacagcacatattttgttttgttgtgtttttataaatcaggaaatctgaaataaattttgttaaaagtcagttcttgccacttgttggttcacccatttgttgtacaatttatttaatctcaactgggggcttctactctgccttagatcattcagttcccagataaaagacacacaacttttattattataagaagccttaatcagcactagaactgaacagatatccaccatctatgctattagaatctatttcctgatccataaccctaggttataacttgccatgttctgtctgggctgcttttaacttcagttggccagccctcatggccatactttcatgactcacctaacccatggcatcttcctccttttctccttctccctctccttgtggttcgtctcagaccccaaacccaggaaaccccaagacccctccgtatctcaattctgcccaactgtaggctgtagacatctttattcaccaatcagggataacatggggggccgggtcatagtgtcagttgggtttatgtgcagtttctctcatccttgggggcagccaggctttgggggccggtattaagcattacaatacatagcaaaagaccaaatctcaacagagagaaagagaggctggcagaaacacatggaacagagagagaatggaagaaggtgctgggcagctaactagcagtcctctttattagctgctgcatttggctcacacctgacaattcaagatccctaggaggagcctagtagaattgtctgttaagcaacaggcttctcctctgcaaatgagcctgtcctgatggtgttcacattgaacatgctcaggatgtaattgttcacttttccatcctttcccacatgagccaggggtcaccgtgagacctgagaatcaccatgagaaaagactaaatctatgatttgccaagctgtatttttagggtgcacccataattggccagctggctgtctcatcctaattctggatttgagagatcagcctctgctggtctcttgaggtcttgtttatagggaaggtaaggtattcacagggcaagagaactgggtattacacattgttagaaagatataacggaaagggaaggaacggggtaaggatagacatcatgtgaatgaggtcacaagtttagtgtaggttgaaaaacatgttttccagttagtacaggacaaacaggagcttattctttaactacagacagaaaccttagcctgtacaggacaaacaggaacttactcttaactgtcttaactgcaaacagaacccttaacctgcaaggtgcagttttcctgtcttggtctcccattaacttgcaagttatattgttcctgtttggtctcatgtcacctgttcatgttcgtgtatcaagctaagagcactgggcatatggtaagacttgatttcaccactttgactttgttttgtatttggctctttgatcagtgccacctcagcatccctccatctcacccactagctggtggaacactctacagaaaatggatggtgcattagaaagaaactgacaaggggtacccagttgaatcgccatttcagaatgcctctggtacttgaatgcatcctaaaaatgcagctgaggacattggaaggcagcctagaatgcttcattaagcttcatgtgtgttgatgtacactctgatcttacaaagaccacctggagccaaagagtcttcccaacaagcgctctgctgcatattaattggaagcctcaaacaagtctttagtgtatctgagccctggtccgtcgtctctactgtggaagctgtaagtccctctccccaaagtatagtggaaagacttaaataaagcagtgtaagccaatgccctgtgaatctacccccggacacaggggtagattcatattaagcaaatggtcactttcactttacactgtaaaggacaaaatccaagattaacagaggcattttggagcgtaagcacctagccttgcctccttgaaagcttcctttggatttatagcttgggtgtttggtggatctttcttgctgctatccccaagaatccttttgattcaccatcgcaggtagatggaacagacctagagcctctcactgtgcaggtcgaaccatgccagccttgagcatactggtccactagtaggatatttgaatatgtccatgtttctcaaactctcagacactatggagcccccaccagtgcagtcagacatgctgctttggtgtcgcagccgctagttttccatagaactaagcacacagatgttgctgcaaagggcaaagggaagcaggaacatcctgaaatgggaaagagtggccagctgtggctggctgtagcagaggcgcgcaggaatccctgtgaatgctaatgagtacaggctcaaagcttgcccatgaattagctgcatgagttctcttgttctaaacagctcaaggggcacccagagacatacagtgagggatttcagagaagattattgtgtgtacactacaccatctttcccctggtcatgcccccaaatgtttcctctaaacccttctccccacaatctcatcctctgggtgcctctgtactgtttaatgcttagaagcagagccaacataagcagcgaggagcacctgacgtcctctctaaacaccagacttgatttcattttcaaaggtaatatttttgaaaaaataaataaataaatgaccattctggcttccaccaattaaagtgcatttatcttaacattttacttcctattgcacagaacaaaaccagagaagaaccatgatataaatgccatagagagtagacgaaccaacatttgtgtgctatgataatgagcttcgatgattgtgaccgagaaatactctcaaggaattacagttttaaaattgtgggggaaaatgaggttttcagtgcccagttcaggatacaattgaaatgaactgaaggtgcaattgttaaggactctgggcataaataacagccttatcagtcaagggatattttctgacattcatattagcaaacactgtggcttttgctcagatttggagaagggaaaaatcatcttagagggaagaggatggtctatgtaggaattatttaaagaattgtagtttggaagctctgtagaaaccattgccttgctaagaaaatacatacctagtttgaattcctgaaagcccagaagtttggctcctgtcactgtaagttctgtctccttagatatattctcatggcatagtatgtacctatggaagtgaaacaactttaatcaatgtagtatctattttcactcaaagaactattctctagtaatgtaaattacttaattatcagtgtaataaccccaggcttacttcaggccatgattagcattgcaaagttctattctttaacttgttctctatattctttagttccatcaatgcaaactcttcactgttctctaagaggctaattttttcatgtgcatttgttcacaccatttactcctcatggcttgttgatcataaatagtggcttctgaatgcagaggaaacaggaagctctgaaggaaactctaaaaaagggctgaattctcttcaaaagtaaggaggtgatagatagatcctttgtcaatggggagcctggagagatgtcaagcaagcatgaagacctgagtttggatacccagaacccacaaaagtataggtactgtagcatgtgtgtgacacccccacactgaggaagcagttataggaggagtccaggagcccactggttaaggagtccattttaatcagtgaggtccaggttcaataggctatactgtgtcaaacaagaagatgaagaacaactgaagaagacacttgctacctatctcttacctccacacatgcatgcatatgggcatacacatccaccacacatccatacaacctacacacacacacacacacaatcaaacacacacatacacagcacaaacaataagtactctaaggcagtgggtcaagttcaatagcagtgaaattacccaatctatcctcagtacagaagttgatattgagagtggatgggttgggaagcagagtggacactgaggtcatgttgaatctatgagcgagatctaaaacaacatgatcctgctcttgggaatgagactgtcagaactctagatcccaggcatctttgtgctttgttatgaaacacttagcatcttctatgtgaaatattctgacacataatgaaaaaatcattaagacattgaagaattgcctagtgatcacttacatcaagagacaaatggaagactacagtggaagagtgagtttgggctcatggaaacaactgatctgtaattttcaaactaaaaggcttttgggtcaagacagagtgaggttaaaacgccttcacctctatcctccatggctataaatcttatgcttccacccacagagctagttctgcattaccacacatctcatagccagagaatgtgggcaatgattgctccaaccaagaaagacaacataatgtttaatgtactgccagtgttgccctgtgtttcaaccgcttttcctgatactgtaataaaagacctgaaaaaaagcaacttaaggataatggtgcttatttgggtgcacaattgaaagatcatcatggtgagaaatgtcctgcaagcaggaacctaagatatctagccaagttgcacctgcagtcaggaagcagagaaagatgagtgtcaatactcagctgatacttttgtgcaattgtaagcccaagcctagggaatagtgccacccacttttagatattcctatgtcaattaacctaaccaggatatttcaattaacctaatgtaattaattaacctaagataattcctcacaggcatggttagaaactagtctaatctaggtcacctgtacaggcatgcctaagacttgacctctaaggtgaattttcaatcctgtcaaaggtgacaaccaacactgaccattacattcttcatgaccaacagacttgcatgcagtgtcccatctaacatcagtctctggagatctcacaagcacctggctcccttcttgtctcacttccatgtgtgggagcccaagtcaacttctgtgatcgtattaaagccatgacaaaggatggaagtgccatagaatccctggaatgagctttaacccacactgttcccacaattctcatcaatactcacctagaacccaccaccaaagaaacatatgacataagttaaaatccatgttagaacacaaaatcagcatccccacctaacaaggtcaccaccctgagctctcctatgaaagaattctaagatcctggactcttggactttgtggatgccagtcattgagccagtggcttctttcaaactctttatagtgtcattgctactgactttgggttggatatggaacagctggtggttcttgttctgctgaagactgtgctataagtccaagaatgtgagaaggtgagacacatgccattatccccatgattgtcctgtccttgtcttttgttacttctaaatacaaaacataggtattgtgcattccagtaaatgaactgatatagagactgatgttctgagcctcaaatctaagcagtatggtctattaaagtactaattggctttttatgatcagaaatgctgaagttgtttttagcaaaatgtcaacatctaatagctttagggtttttgttgttgttttgttttgtttttaaagaagtttcttagttagggtttccagtgattggcattcacaaaatccaagagtccatgatcttcgaatttaataggagagctcagggtggtaatcttgttaggcagggatgctgattttgcattccaactgaattttaccttaagttatatgcttaatttgtggtgggttctaggtgagtattgatgagaattgtggggccagaatggattaaagctctttacaggggtcctctgtcacttccatccttgtcatggttttagtaaaatttgaaatgacaaggtataaagagacaccttgaccaaggcaactcttataaaggacaacatttgattggggctggcttacaggttctgagattcagttcattgtcatcttggtgggaagcatggcagtgtacaggcaggaatggcgctggaggagctgagacttctacatcttgttccaaaggcaagcaagacagtctcatagccagcaaggaggagggactcaaggcctacacccacaatgacatactttctccaacaaggccacacctcctaatagtgccactccctgggccaagcatattcaaaccaccacaagaagcaaattaagtaatgtagaaaaaaaatgatttctgtaaaatacatttttttcataatgttccatatgtgagatattatttacaagcaaaaaccaaacaaacccaaacttgtactatataaatactgaaactcagtaaagcagcaggccttgtgcagataagtggtttacccctgacacctgctggaagccaaactttcaaaggattttaacaaccaaacgtaaagaaaggcagagacccttttcattcttccaaacatgatccctggagttgagaattacctctcactctcagcccagcccccttggctgtcttcctctggcacaatcatttctctctgtggctaataggcctctcagtatctgcagtgatttctggaaaggtgtcactcatagtggtacttcctgcctaacataagctaaaaggggactgctagattattagttttgtcagtcacagccacactgagaacaagagatagaggattcagtctcatagctaaaagagcatagatgccgtttacccttatagccaataagcagagaaagacttacagcttctcgtccacacagcagggattctttgatattcttactgttcatgtttaggcatggtggataatggaaggatggatgggtggtggatcgtggtggatagatagataatgcatggatgctggctggctggctggatagatgcatacatgataggtggatggacagatgatggatgatggataggtgctggatggatggtgaatagatagatgatggatagacagatgcatgagtgctggatggatgggtggatgtatgtatcctggatcaatggatggtagatagctgatagatagataatgaaagatgggtagacagatacatggatgctgaatggatggatgcacacgtgctagacgaatgaatagatggcggatgatggatggctaacaaatgatgaatagttggatgcacggatgctggatggatggatagatagttggatacatgtgtgcatgctgcatggatgaatagatgatggatgaaagatggatgattgatgaatgatatatgggtggtagatgataatgtgtggatagacttgactgaaaccagtgaagacagaatatgaaagagaaactcaaagtccagctgttgcaagtcaaattaaaaggtcaagtcaaagccaccaaaacataatttgccccctttgactaactcatttgggttttattaggaattaactgggatgacttaatgctaaagccatccaggtatactcaacataatgaagctgcaaatatggaaaaaatagaaaatctagcccaggttcctggcatgaacagcttccagccttcctagaagatgtttttagctaaaataaaaatatgagctacttatctggcattcacaacagcctatcaccagtgcaacaggtctggaagcagtttaattgagacaatgaattattctgcatcatcaggaggcgaagcttggttgtggtggtttagacttttttataagcaggaggagcatgctgcctcaggaaaagtacatgccttaatgcaaaggctcaaaacacgaggttctgcctgactgtggggtgtgcccttctgcctttgactccataacaagcaagggaaaggaggcccaaagatcgtccagctagaacaaatagacaacacatactttaaacacccagatgaaaccaagatagtttcccagcagtgaaaatcccaatgctggcctccctcaaaccacaaggtagacagctggcagattctgatgtgaaatcgcagagggtagtgcttaaggcagaagagtaaccgtgaatcagtgtgtgtgcctctgagactcgagccttgaaatatttaaagatgaaggcttcaaagtggaaaaatcttggtctcttgggcctgagctaaataggaaatatggagactggccatggagggtacagcagtagccattgcacaatgaaaatatcgatgctttttattcctgccccatccaaagtgtactgaagctcctagattgctgtgcctcaaactaaaattaatctctcttttggtgtatgatttgtcagtttgggatacagcaggatttaatgtctagaccacgtagtactccactgtggtggagtgacaggagggaagtcagccacgatcaggaggaaaggataactgagcccagctcaacagccctgtagatgacccaacacccttgcctagggaggaagcttaaccagtctgttcacctgtgagagcgaagcatcagcacaattctgatgtaaagtgttgctgagttgttctctgaagctactcagaggagatgctgacagctgggggattgtggctttgcagcaagcacagtttatctcacatatgtgtgagtgtacatgcccactcccccccccccagaagcatggctcccacggtaagttcactcttcacaccaggcacagggaagaacaggagacagcttgtttacatgcagctgctcttgagaaagtccacagcacacgtttctataaattattaggcatacgtggtaccgaaaactctccacaccagcatcccatcacacacagctggctcttgccctgtttactgagtcacattcattctcctctaagggttcatgatcaagtcagagaactaaaatatcctgtgatcagatattcaccatgtgtctcctacatgcaccaaccattcatcaaaggtttctctgccttccagtgtaaaatgatcttttaacttattagaatcataaatatcactctatcgccaatgataaatgactataattacaaatttccaatgcttcgattgttgctcattacctactaattgatgataatcagtgtatccattgtgtaataacacaactcgttaatgaaaaactatgatttcataactgtgtagacattacagattttagggaactgggggagtattccaccttcacagctcacactgcgtgtggtttcttcactctcatatgactcattctgtactttaaattagatacaataaataaagctaattgtttgtggacttcataaaacagaaatgcatctggatcctcagaagcagcaacagatccatagataattccattcaacttttccagttgtcctggattgcttcttgtgcagacattcctttcatttagatgaatgatgtctttctgaaatcaaacagagggagcacgttcctacctcattgccctgtaatgccacagtgtattggagacttgaaagctgtgtgatcccagagctgggagagggctcagtgaagtgcttgtcatgctgactctaagggtcttttctcagtcctcggcactcatctaaagaggcaggtctggtggcatgtgtttatgatcccagtgctgaggaggtggaagcaagcagatatgctaggcttgctgaccagtcagccttgtctaactgatgtgtccaggtcccagtgaaagaccatgtccctgtctccacagttacaatacccaagactgacttctggccttcacacatacatatacacacattcaaacacaagtatgccatgcatacctatgaacatgcatgcacacaaaacatatacatacatacatacatacatacatacatacatacatacatacacacacacacacacacacacacgggtgtgtgtgtttagaaaattacattcccccaccttcttaatatgttgacaattccactcttcccctcatctctgtggagcaaatataaaatactagaagcagcctgaatgagccatcacagaaccttcctaggactgccacccctctcggaatggggtctcttttgaacactgctgcttctttccctgaggctagagaagtcttacagaatgctcgggctcaaatatcttatggcaggatctttggggatacctaacttgtcatagagtagaacatgggtaaaagtggaaggttatatgattaatagactcatcagtagtatccaatagccctcaagagttacttgaatgagagcattcttaggttccctatctattagtgatcttgtagagggagacaaacatctgaatcaccacacaaagatatatgtcactgaatgtaagtgaaacagttctacaaaggaagaatgaatgaagaactcaccaataaactctcagggtaaagctggggcctctagccaatcagcaatggtagatgaagctcatggcttccatcagatactgtgcatggtgtcccctcccccgcccccacttctgctggaccattccctcttcctaccctttggctggacatacctgcttgggtctctgcaaaatgaacttcaaacttaactatttcacatgattcctgaagctccacaccctctgtttctgtttctgcttctgctgaaggtgccagctcccttctaaccatgggctcctctctatttgtggaaacacatctgaacacgggtggaagtctgctgattcttctccagtggttcgctgctgtcacgtccttttcaccttcagcaccttagcccagacctcatgtggataccacagtgtctacctaagtcagcacctcatgttccctctgcttgacccacccccacccccagcccagcccattttggaaagggccagagtcatttctcaaagggcaggtcagagaccattattctcaaacatattcaactgttcctctggacctgtgcataaatccacacaagctttcaagccagctttacaagactcccaggccctgattcgagccaactccttcctttgtattcattcaaatctcttccacacaggcctctagcttactgaacaccactacatttcttttatattttccctggttttgcttctttctagattgcttctctcattatctccacatgtctaaatgtgttcatgggtcgaggcaccaatcaaatgccacctcttctctgaatgtttccgagtcttcctactggaaacaaccttcaccgcctccacactcccacagtgtttaatctgcacctcactgtggcacttctcacatattgtgtcaaaatatttacttcaaaaaaacactctttgtggcacctgtctgtaaccccagagcctggaaagcggaagcaggaggattaccccaagtctgatgcgatttcagaccaagcagaatgaactagcaagacccacgtcaaaaacaaagccactggatatgcagtgaaagcccttgagtaacaaagatagcaccttgtacataggatgacccccaactcctataaactttttcctttcctttaagaataccatgttctccactcccccaactcctcccagatccatcccctttactactctcccaactttgtatttgtttgtgtttttgttgttgttgttttattatatcttttttgggtgttttgtttttgtttgcaaagaatgaacatttactgagaatttatttttgatttaccttattctctttaaagtgtatatttttagcctacaaagtcatgtcgttttctttttttgtttctttgttttgttttgtttttttcttttttattggatattttatttatatttcaaatgttatcccctttcccggtccctccacacacacacacctgccagaaacctcctatcccttctccctcctcctgcttctatgagggtgttccttcacccactcacccactcccacctccccgccctcaattcccctacactggggcatctattgagccttcataggactaaggacctctccttccgttgttgcctgataaggccatcatctgctacatatgcagctggagccatgtgtactcctttgttgatggcttagaccctgggagctctggaggaggggcaggatctggtaggtttatattgttgttcttcttacgggtttcaaaccccttctactccttcagtcctttctctaactcctctattggggaccccgagctcagtccaatggttggttgcaagcatctgcatctgtatttataaggctctgacagggcctctcaggagacagccatatcaggctcctgtcagcaagcacttcctggcatccacaatagtgtctgggtttggtcactgtatatgggatgaatccccaggtgggacagtctctggatggccttttctttaatttctgatctttatctccatgtgagtattttgttctccttctaagaaagaccgaagcacccacactttggtcttccttcttattgagcttcatgtgatctgtgaattgtatcctgggtatttggagctttttttattacttctaaatctatcaagtccagtttgtgctacctaaacacaaagggtttggagcccttcactggagtccgtcaaactatcaggggccaatcctcaaagaaatctgactcttccagaagctaccaattgctaatagagctcagctaggggtagggctttgtaaccacctcttacacccatgctgagatttttgtctggtttgggtaggacttgggcatacatcaaaactgttgaaagttcttatctgcaacctccctgctgtgtttggaaaatactgtttcctaacagtaatctaccacatctggctcttatgtttttttctgcctcgtcttttaccatgatccctgagcccttagataaggggtcaggtatgatgatggccctttaggaatgaacaatccacattttctctttctctccaccttgactaattgtgagtctctatgttaattgctatctcttgcaaaaagattctctgttgagattcaagaggtgtactaatctatgggtataaaaacaagtcatttaggagtaagttactatgtccataatgctagtagtatgtttttttctattatcaggttcatggcccagataataatgccagatatacgttttgacttgttgaatgggacttaaattcaatcagagagtggctgtttgctcccataacattcgtgccactaaagtaccagtggccatgtcttagtaagtgggccattattatgactcacaagcttcgaaactgggtaagccaatgattacctttctccttggtaggctgcagagtaccgcagcaccaaggatgctaaccaggagggatgaagccaacttgatttctccatattctttgtctcgggcctgaggtgtgtttatcaataaggtcatatcatcaagttctggagggtaacctagagcactggcaaaagactatttgtggttctatggaacctctctggccatagctattaacatagcccatttctgaacctgggctttttacttgctagcctgaagtgtctaacagagcattatcagcccattatagagtaactctataatgtatggagtaaactctttttagatatctatagtatatattttcataaatgtatacagtagtatgtttccttaattcctttctcaaaagacatgtactattaattagtctttatagtatttcctcccttttcaaccctatcgtcccacctcccaccccatttatacttttttggtccattactaccccccccttaaattgaaaatagattctttttcatacaatatattttgattacagtttcccctcccccattcctcccagctcctctctatctcccttcctattcagattaaccccctttctgactttctgactcccattagaaaacaaacaaaaactcaaagagtagtaagacaatgaaataaaatacaataatataaaacggaaacaaattggaaaaggacaatataaccaaatgagaaacgagagtcaaagaaaaagcacaagacatgcatatggacacagaggcacacacatttgcgcacacaggaatctactcaaaaataaaaacaaaaaacagcaagccataatatatagataaagaacctgtaaggttaaaaaaactgaattaacattataagaaaaagaaacttcaaagatgccaatgagttcattttgtgtcggccattgactgctggacatgggccttaaccttacaagtaatttgtttccctagtgagagacccttggagaaaactgatttttttttttttttcgagacagggtttctctgtatagccctggctgacctggaactcactttgtagaccaggctggcctcgaactcagaaatccgcctgcctctgcccccggagtgctaggattaaaggcatgcgccaccacgcctggctgggagaaaactgatttttcatttgcaagcggttattagttggaggtaacttctgggttagggatctggtacagacccatgccggccctatgcatgctgcctcggacttggtgagtttatacaagtgtctaccctgttgtatccagaaggctttgattccttagagtcctccatcgcctctagatcttatactctttccagatcttcctctctgatccctgaggagagggatttgatggagattaccaatatcccttactactactgcattcagtctctcttccttgagaaccatcccctttctccatggacccttattttctgacctctagggatattccaaatgaaacacacatatctaaaattcacatctgaagttcttgaatcagaagaatgtaagaaaagcaactaccttacaattcagcctgaaattctttcttctaatagtggaaagcagacaggaaccagtgggtcagatgggctgacccaatatagaatcatttccaaccaagccttttaaagtagcattgatgagacacttctttctatgtcttcaaagaatcaagttctgcttagatgttttgtggtatttgagaatctaagaaacattttcaatagtatttgttctttatgaagaaagttgtattaaaataatcctacctagcctctgcttatcttgtacctatgccatgggacacagcagaagtttgcccttatttgtaccattaatgttcatttcactgtaagaggacatctgattttttctaagtaaatttcaggtacagctatattaaatatttatatggatcacacagaaaatgactggagaccctggaagaagagccccaaatagctctgcatttggttctgcccatttgctcattatttgacatgagttcctatacagaaacaggacaacaaaagttgcggttttacacacagattcagtccttcctctgacacttgctattggttgtgagactttgagaaacttctgtgatttctctggtgctcactttattctctatgagatatttccagtctgggagagttcataaatgaaaataaataaagccgtgtttataaaacccagcccctggcttcttatcctcaaaatagcttctgccctgagcagaagccattccatacattctcctaaatggtgcaatcacctcttgcatgcctccccccaccccttgccccctggcatcttcacactctctgtgaaggaacactgacttataaggctgcttagaatatttaaaagaataaaatgaaacctgatgcagcacacacacacctagacccacttctgtaaaacacctggtccttttagagtaaagccttttctcatcactggttgggttctcagcctgcaggatagccttctgttacttatctatcgattgagtgtggataatgagttaggattcaaggtgaccgaggaagagagttcctcctgcagttacatacaaatcaatgtaaagcctgacatagaacaggctttcaatacatattaggccgttagtttcttccccaaactccaaaggaaaactgccatttaatgtcaagatcagaaatgccagcaaggttctctgtggactttgtgttcctacaacccaatgtgacagacacaaatgctgaccatcataagtctcaatatctagagtactcattttcctggtcctgttaaaaaaattcatccatactgaaagttaatataatttataggcaaaaattagcttccagcccacagagactaagtccatgtttgtaaactaaagattaactcaacacttctttcatggattgtacttgaaagattgtaccaaaaactcatggccctgacccaaggtcacatagatttttctagtgtttaattctgtgagctttttcagttttatacctaagtatatgatgcattttaagtttaatcttatgaaaagtttcttgttcgatgcaatctttttatgcatttgtgcattccacttttctggcaccctttgtttagaacacggctttttctctattgaaatgtctttggtccttgcccaaagatccgttgacttaactccaagttctcaaaacatgttctactggtgtatgtgtgtattatttcaccataccacactgtcctcacagaacaccgaaatcagacagtgtgagtccttcaaatctgttgtcctcagtaccatgttagggattctaggacttttgtgtatttgtgtgaacattagcattattatgttagtatccacaaatagctttttttattttaatcaggactttaactctatagttaatcggaagagaatttggcatcagcacagtatcaaatcttctgtgaacgtgaaacatcttccatttatttaggtttgcttgtacttctttcaccaaagacttttctggtttgcatgtgctctccattcagagttgttacagttatgactgaccttctggaacacatttaaactggataggtgtgatataagcctgacatccctgggagcttcatatgtaggaggcttagttgccagccaggtagacattaggagacaggctctgacctaacctctagatgaagctataatttggatagatattaggaggtggcagagctgtggaagttgggatctagttcaagaaataaggtccctggggacctgtgctgtttccaggctccttttctccctcctgatcaccctgagctaagatgcttcattctaacacaggcccccacttccatgatagtctttatttctatttcagatcaacagagccggtcaaccagtctctctctctctctctctctctctctctctctctctctctctctctgtgtgtgtgtgtgtgtgtgtgtgtgtgtgtgtgggagagagagagagagagagagagagagagagagggagagagagagagagagagagaaagacagagagagagagagagaacagtcatgtggtattaacaaattctatatagtaaactacagactgtttgaggcaaatgttaagcttggaattaacagctttcatagtcgggtagcaggtggcaagtgaatgtttttaatggatggaagcatgagggtatccatacatgatgttggagggacacatataccatggcccatgtgtggtggtcagacaacaatggtggacagtcatttctctccttctgcctttccatgggttctaggtacagaactcagtctaccaggctatatctacccagctcaccagcctaaaactgagagatttcatttcaagtttcccttgttctgttgttggagcatgggaaaacaattgacttttgcatactaacctcatatcacccattgccaattattagttacaggggaagttttcatcaattccttgggattttctatattaataaccttaacagccaggagtaaagaaaattgtattttttattgaacacactacctatgttttctttctcttccatattttgtatttttattttcacttatgtgtacatgtgtgtgtgtgtgtgtgtgtgtgtgtgtgtgtgtgtgtgtgtgtgtgtgtttgtatgtacacataagtatggttccctgtggaaagcagaagacatcaatcaatcccttagagctggtaaactacttgatgtaggtcctgggaaatgaactttggtcctctgcaagagcagcaaggattcttaaccactaaggcatctcttgagccctgctctttcatatttactgcagtaactaggatttgaggtaacattttgcatgggaggggtgagagagacgttcttaccttattccccatctgaggaacaaagtgttaggtttcttcccctgttctgatgttaactgtgagttgcaagttctttatcaggtggaggaatttcatcttcttcctgttgcttgtgtctctcatcctgacttaaaagctcgcatctttaaagactcatatattttcttttgccgtctacttttcgttcctctatgattctgagttgtgcttatctatccgttttatttttatgtccttggttcctaaaatagtataatgaagccatctggagatttttttataagacttcctaaatagctaagatttggccctcaggtaaaataaattatagcaatcctgcataagcgtgaacagtggtttgttctaagtatctttgaaaaccttgggggaagggtcgagacaatcaaagaagactgcctgtttacaaacatcagtcttagccagtgaatgctatagatgtgtaaaccgagacatgttgatactgagtttgtgaaagtcatatgatgcaaacggtctgcaagaggaacaacaacaatttctttctaacattttactgttgacagtttcatacaattagttaatgaatttaagtcattttacacacacacacctcaggcatacagtacacacacacttcaggcatacacatacccccttcccatctctcatctccctccattcctctctaaaactcttcttctctataaatacctctcctattatgattatgagctaggcagggacatggatgcctcgaggacatcggtgttccaggctcacttctctgcacactgtcccctttgtgatctgaattggattgacttgtgttcagatcacgtgtttctttggatgcagtctcctgaacactcacatggtcgctagagatagatggggatttatcttgcttctatctaggaagaatatatcttcatagtgtgcatccaacaagaccctgtaaagcaaggacactaagaaaccaaaaccaaagtaaacaagggatgtggttttctttctcctcaacaggagccagaaccccttatcttctttttggggtgtgacccacagagtttttaaaaagttttttgtaggaaatgagtggagggtcatttgctggagcaagagcacttcattggctacaccactgatgaaaaagacaactcatgccccaacatgcattcattacccctcagggtaatgtccttcagggggtgaagcctcaaaggccactctcagcaatattgttcagagaatcacagccgtaagcttacttacatgtgaaagataacaatctgctaggttgagtgcagaatgaagaccagagttgcagtcaagttcgttcctagctgttcaatcttgagcaaactgaagaatccttcctagctctgcagtcttattctggagcacaatggaaataacctctcaccactgctcccagatcctgcccacctacctctcgggattaattcggggctatataaaaggagggccatggaacttccttttataggaaagagtaggaagaaagaatcaggtgaagaccagaggaaaaggccaccagaaaaggacaatatagaaccagccagggggccctggaagcatcatagaatgacacagcagaactagagatatttatctagctactgagtaactgtgttcctgctgaggcattaacagtgctttctgccagatccacaggtggcataatagacctgagggatctaagaaaggactgggccaatcaagcctgtggatatgcactttagacaggcacatgctgaggaatgtagtagaaaggaagaatgggccagaggttgtgtgagagaatcagaaaaacacatctgtaccaaaaagtcagcatccaccaagtattgtagctcacatgcttaatcccaagactcaagaggcagaagcaaatagatctctatctaaagctatcttggtctaatatatcaagtaccgggccagtaaggactacatagtgaaactgaaaaagtaaaacgtaaaaacaaaattctaggcctttaggcccaggcttggggaatgtgacctttgtgactcaatgctccaaggtatgctaatcataaaacagatagcgacattcctccacccacccgcttcctgggttcaaagagtgttcattcaaagaatgtgctattgttaggggctcttagaaaccgtcttgagaaataacctgaacaattaccaggtatcccttgtgacacttgtgactttgtacttccttgtgactcttaactggtatctttggtattttccaacaacgccctccgcacttccttgagttgtggtttcttcctttaaatacccccttatccagctactcggcaccatggtcctctatccctgcgtggtgtatgactgtgggcccaagagcgctcttgaataaaaatcttcttgcagtttgcagcaagaccgtttcttgtgggtgattttggggtgtcgcctctcctgagtcagaacgtgggggagtcctcacattgtgggtctttcaaaaccctgtctcaaataacaattcaatatcttagtgtgtatatttaagctttaatttaagaaaaagctccaggcagttaataagatctactagaatattggcatgtgttgagagacgatggagaacatgtctctttggtgtgtgtgtgtgtgtgtgtgtgtgtgtgtgtgtgtgtgtgtgtgtatgatgtggggtgtgtgtgtgtggtgtgtggtgtgtgtgtgtgatgtgtggtgtgtgtgtgtgtgtggtgcttattttaagggatcttttaagttcctatatgaagacatatttttctagttagaagtaagactattcctcatttatctttggcaacctgtacacaggagcctgcatctaaagttctcactttccaaagatacacatgatctgaacacaagtcaattagatacagatcacaaaggtgacagtgtgcagggaagtgaacctggaacactgatgtccttggggcatccctgtccctgcttagctgatagttctacagagacagtttcaaaaatcacaggaaaatcaaacagctgtagggcagagcctgaggcactttaccacctgcgccaggcaaccgactctattcagcctctggaaacagcaagtgtctggcaggggctccacatctgaggcacaagttgtaatgaataatcaggcatgttaatctgtttcctctactttgtacagcttgctttaacttacatcttcattttatcctggatttgcaatgatttgggtacagtggtcagcaaagtgtagactgactctgcagagatgaaggatacctgcttctctgaattaaaggagcataagagagcagttacggggcaatggttaggtctcaaagtgagagtcaacactgttgtctgctttcatagtccctgccaaagtcactccttcaggatggcagctctgagaatgcatcctttagggtggcagagaagcaggtggccgaagggctgtggcatcaatctcccataactcttgtgtggttagttaatggtgtgttggactgttaatgaacttggtctggccatgatgacagaattcagtagagaacattcatcctcaactcaaaaaggagaaaaatgacttcaataaaaatgacattgggttcacagataaattatctatattaaaatggcacttcccagcaggcagctttgttatatattcatataattaatatcccaagtcaaccctacttttattggacagattctgaaaagttctaaggaaaacaagtagggtcttcagtataatcgaacacgtgtgtgaaagcttgtttgtgttttgacagcctataatccatcctgctttaggcaggggaaacctggcttaacgtccgctctgcttctctgtcttgtgtgtagactcatgctagaggataagataaagaaaacagccaggcgtggtggcgcacgcctttaatcccagcactcgggagacagtggcaggtgaatatctgagttcgaggccagcctggtctacaaagtgagttccaggacagccagggctacacagagaaaccctgtctcaaaaaaccaaaaaaaaaaaaaaaaagagagagagagagagagagaacagatccccttgggttacaagttcatagtttgtgtgcttttctattccccacttctcagagtctagaaatacatctgttatagaagttagagaccaaaataaaaggaaatgcagcttcaggctgcggccaggggctcaaacctatatattttgtaaacgttcagaggtagaagggtaagtttaagaccaacttgggctacatagtaagacttcacagaatataactcttgtgtggagtgtgtgtgtgtgtgtgtgtgtgtgttgatgtttgtctgatatgtgtgtgcgtataatgtatgttgaggcgtgtggtatgtgtatgtgtatgaatgcaattctacatgtatgccagtgcatatggaagctttgttctgttttgttctgttctgttctgttctgctctgttctgttctgttttcttgagacaaggtctgtcactaggccgaggctcaccaattagaccaggctaacatgccagtgggctccagggatcttcttgcctctgcctctgggtgctgggattataagtatgtgccacaataccttcctggtatgcaagtcttatggatggaactggagtcctcatgcctgtgcaaaaaaaacctctactcactgagccagctcccatccagagtatgattgctttccatcatattctagaaatgccttgtcttacaaagagtctagagtcaaaacattaagaaataaaatcctggttccaatgcttagaaaagtcaagtctcagagctcatgtgtcacctaaaacgttgactgaagcatcacagtgcttggggaccgaccacatgggaatatatatgtgcttcacctacactattctaagtagttaacagttaagtagcctccattttctcttcttttagataatggtgttcattttatatagtcactcaataaatctttattaaacatctatcataagccaacaataacattttaagtgttgggtatataaaaataaatacggtggagatggtccaggtcccattaaatgcagcggggatctgaggagatgactcagtcattcactgctttccacaggagcacaaggatttgagttaagtcctcagctcccatgcgttgtgtatgtgcctgcaatcccagcacagagaaggcagagacaggaggattcaggggcttactgcccgggcagcctggctgatctgtgaaagaccctgtctcaaaaataacatggagagccattgaagaaaacagctgatatcagcctcaggtatccacccataattgcacacgtgaacatgtatgcaaatacacagaacagcaaaaatgtacagtaaggaaaataatcactaagaaagtattttctataatggattcacagtgagtaagtgtttaaaaacagtaactaaatcaatcataagagtatatacagtattctaatgacaacaggtaaaataatgtatttcatttatgtatgttcacattgtgttcagctcccatctcatccacagtacagtcgagttctgatttagcctttgcccattaactctgactctcatttcgctgcaggtcctctagagccctggcacatgcattgactccacgtgcagccttcactcttgaaatgtgctaacttagccgggcgtggtggcgcacgcctttaatcccagcactcgggaggcagaggcaggcggatttctgagttcgaggccagcctggtctacaaagtgagttccaggatagccagagctatacagagaaaccctgtctcaaaaaaccaaaaaaaaaaaaaaaaaaaagaaatgtgctaactcttggcatagagtaccccacccaaacccaaaattgcaaggctttatctccaggccatgatactaatgggggaaagaaaagacatggggtctcagcacggggcatgatgctcagggtattgtgggattctagtcttccgggttttgggttatgttctaacatgaatgcactttttctactaaccacaacctgccctagtctaatactgctttgccccaagtaaaagcaaaacaaacaacaaacaaacaaacaaaaacatggggaaaaattatcaataaaaaccccatctccttttataggtattctctcaggtagtctgttacaagaacagaaagttgaccagtgaggcacattgtatatatcaaaggactatggtacagataagctgcctctctttgttcatttgtactgctcactagtgaagcattgtgttactgcagaggcttcaacaggaaaggtgcatacctttgctgagtgacctgccttggcttctctgacctagcaatggacagccaagaatcattacacacctgtccttgtggatctgctggagtatttgctttgcttacatataccactatcagaaatttcaggcttgatagttgtgatagctcactgtaccattttctagtcctgtcagtgacattatttgatgtgccaatactactcatttggtggaagatagtggtatttcattgtttttggaagtctgattgtcctgaactcatgatctgtcctctctttaggcactttcaagttaatcacactcatgctttctaacacacacacacacacacacacacacacacacacacacacacacacaccacaccaccaccaccaccaccaccaaagcatctaaagggaacattgtctactttccctggatctcctaccatttccttttctttccttttttcttgttttttttgtttttgtttttgttttgcttgtttgtttttttaatgtgcattgatgttttgtctgcatgtatctgtgtgagggtgtcagatcccctggaactggagtcacagacaattgtgaagtgccatgtgggtgctagaaattgaacctgggtcctatggaagagcagccagtgctcctaactgctgagttcgctctccagtcatgtcttactgattctaatcccccacagtgaattacatgttggtactatttgacgttcttcaaaagaaaccctccgagtttgccgttttctgtcacgttgcctctctggtttaatatagtctatgtttccatgtcagtcaatcacatttgcccttttaaagggttttggtctggttcaggaatttttttctccactagaaattagagatattttcaccacacatcaccttctatgttcgttatccttttgctagtctgttaaactcaacttttcctgaagccagatgttgtgtcaaaggtcttcactcccagaacttcataggcagaggaaagaggaacggaagtacaaatctacctcagctataaagaccagcctatgcctcctgaggccctgcttcaaaaacaaagcaataccaacaaatcttttctgtctgtctgtctgtctgtctgcccctactacacactcccatcttaaacagggttctgtcatattgcctaggctgctcttggactactgggctcaattggtcctcctgtccctgctgtctgagtagctttaatacagacagcactggctgctatgttcttctgtataacttactgtaattagagatgtaccatgtataagctagggctccattttgttccaccctatgagccagttctctgatctgtagaagatggtggtttgtgttgctactgataacataggactgcatctttgataatttgctttaaaatttctaaatttaattaatttaacaatatactaggtaagggatatactgtctttgtaagtttcccttctaaatgcttttgatattttaattatatttatagtgataaattattttatatattgttaggaagaattaacacctttaaaacaatactgttatctacatgttaacacagcattaatgctcatccacacaagtttctttgtgttctacacacagaggacctatgaattatttcagttgctttacattgatagtttttgatgatatatcatctatcagatttttgatattattacaagctgaatagggtcttttcatgcccaggcagcttgctgaacatgtattgctttccatagtttatttgtggattctttttcctgtttgatgtaaatgttcatatcatttacaaataataacagccccatctcttttctttcagcctctttccttttatcttccttctcagtgcatagttaggatgctatgccctgtaaagacgagggccgtccttgtccgtgcccatctctgaagcatctctactaacagcctcagtactttcattgtgcttcaacaaaagcaacaactgagctgactatagtttcctgtcatgcacactgatgtattttaatatcaactcttatgtttcaagtattaaactatgctttacagactggattcagctggctgttgttcctcttgtattcagtagccatcaatgatgaaattggccttcaacagagcgtgtgtgtgtgtgtgtgtgtgtgtgtgtgtgtgtgtaagggtgtgcatgtatgtactgttcaccttggctctcagaattatgctagcttcatgaaattagacaatctcatcgttttttttttgttttgttttgttttgtttttgagaaactttctatacacggggaatcatgaatcatctatttttttgagtttagctcagttcgtctctgggggtgggggtgggggttggatgtggcagccttagtttcttcgagaatgcctcttctatgaccttacagtagtacttacaagtctggaaatacttttcatttcattcaaatccataagctgcaacaatttctatgcttctccttttatagtataagtggcccccttcctttctatattgcatgtattttcatcaaaaacaaaaaacaacaacaaaaaaaaacattaaaaaaaaaaccctcttaccacaagttgatttccttggtttgtgttttcaaagatctttatttgctttgtttatttggttatttttgttgttatatggtgggttttggttagggtgttgtttgtattttctgaaccaaattcttaccatatagccctggctgtcctaacatttgccatgtaaactaggcaagttttggattcacaaagctctgcctgcctttgcctctcaaaggccggtgttagcaatatgcactatcatactcagctcaaagaagattcttattttacttaataaaattggtaaaatatttttattctgaaggataggtaacaacaacatctcatattaacctaaggcacagataaaaggtatttagagaaaattcatagtttagaatacagtctaagcataataaaaaaaaaatctaacaatttgcattgagtgattctgctcaaaggaacagtagagaaatcccaaagaaacacaggcagcaaagtaaatgaattagcaacaaatactactaaagtagagaagcacaaaacatagtcaaggcaagcacactgcttctcaaagttcttggtgtgtgtgttcttccatgttggacttcgagctgttttcccagtgctgataagagaaaggaaaagaatgagaataattgcttttttaatgttcaagatttgggttagggaaaatcataggaaaatgagttcctatgtcaacaagcagaaagtaaggtgactcttccttcattgctgccttttcagggagatgccaatacatttaccttatggggttatccatctccagttagcctgaatgggtgcaacctggggtcataccactttctctctatgtcttctcagatctctaaaataatgaaaggcaataaaatatgcagcgtgcctagagaaatgtttagcaatatcagctctctcggttgaggccataggagaatgcattgcattcaaatagatttccatcccttgaaaataatctcagacaaactaataagacatggtagagtatatatttcactcctccaaatgagagaccattctcaggttcagacttaaagtggaaccaggcagcttcaaaccacaggggagaaactcaacggcaaagaactgatgcagaaaggtgtctagattccatccacgagttgggggaagaggagatggaagcaaaacagcacagctgtggcccagatggagcgtggagaaactgaaagagaaggcctttttcagtaactacaaagaactgaagtccgcgcaggagagtaaaggacctaatggttgctcccctgtgagcttgcccaatcttaaaacaaacaagcaaacaaacaaaaatgcacaaaaggaagagtctggatcagacaatgcacaactgcaatgtcagcactcaggaggctgagacaacatgaccacaggttcaaagccagcctggattacatgggaccttgcctcaaaacaataaaatgaaagtgtgggcagagagatggcctgcagacttgggaagggagtcctttgcccgcctgaagagcaaggcttccagagatagtgagtagcaagcaaggagacgccaggcagcacgggctacgcgtccagtcccacctcccaccttccatcttcaaacacctgcttctaagcagaaaatgaagtcatcttagggtttcctcacacatggtgctgaaaaaataaaactgaggcttcttagacttcctgggtttcacaagctttgtcaaggctgactgtccctgaaaaaaaagatatcatatcctaccaggagccagaagatctggctcccgatagatctgggcatcatcagcatgaaggaagccatgaaaatagagtttctccactttgaaagtgacaagatccatctgctcagatgggcaaacactgaatggacacattagaacagtctcatgtgggaagggatctagagaatgctgagcagtttccaatccactcctttagcatatgtacatcgtgttaattcctattaagatgtcttccttatctcctaaatgcatctctatgctggcaactggagtctaggaggatggagcgggaagcctcccaaacatgattctgtgcaaacaagcacgctctttcctttcatagattaacagcattaatgttaatgaatgctgaattgaaatgacatcccgacaaagtggaaattatcacctgagacttcggcttgagtaatggcatgacagcatgtgtcaggaatgccgtaattgctctaatagagaagggggcggtgttctcccagccagcagcaagaacgctgcacctgtgtcagcctaaggctcatgtgtaaagttaaataggatgtatcacaatgatttcaatgagtcatcccttgacccaaaggaaagaagtaggagtttgtctttcagagcatccttcacttgagtgggtgctgagtgctatgtctctgctcgccatctctcaggaccttggccgttgctgcatctctataggataaggagaatgaggcgcatggtttggaagcagctggtccaaggtgacagagccagcaaatggccgagacgatggcaagcttccattcaactgtacatccttctgctgtgctgtcctgaaagctgtggggacacagcagtgtcccctgtgtgtgtgagtctgctctccctgtcatctctcccagtggctctgcattctttgttggatgcttatgtttgtcttcagttactggttcagggtttattccaccctgaatctgaagtctcttgttctcagatgggcttgagaaacaccattcctgtatatatgatgataaagctatatcatctctctaagttctcacactatgtgtcctggcccctttcttgggggtcacctaagaccactttacaacacaaatatttacattacaattcataacagtagcaaagtcacagttatgaagtagcaacaaaaataactttgtggctggaggtcaccacaacacaggaaactgaattaaaggggcgcagcattagcaatgctgagaagcactgctttagctatttggctttacctgtgaaattggggtcgttatactgatgtcataggagtctattgtcaaatgaggttatgtggcccacggttggctgtcagcaaatgagaggccctcatggctgcatcctggaataggttatgcttttactccataatttatgttttattctgtatcctctgagtgtctggcaaagttcacctggatccatctaccattgctttcaacttggaagcagcatgttagcatatcatcctgctcaaatgtatgaagcctatggaggagagagaagtgagaaacagaagatggagagagggggagggggggagaaaagggagcagccactattgcttccaaatcttcacatcttgttagaaacggactattaaattaaatgtagggggaggcttctcagacttgaggtgtggctcagttggtagagtccacaggaagtatgcctatgcctagtatgcaggaagccctggattcgctgcctagtaccacacagaccagtaatgcactcctggcatcccagcactgaagagctagaagcaggaggatcagaaagttgaaagtcatccttggctacaaagtgagttcaatgtcagcctggaacacttaagactgtctcaaaaaaaatcaaaagccatcatattttctcctgagaaggcttggctcgctaatgctgctgttcttttcatccctagagaattgacatcaaaaccagtgttcattcctatcatagactcatgataaagtatcctttcctaataagttccttcctgtctcagaaaaccagattttaagctccctggaaagctcatctccacagttagtgtgactcttcttcctgttggcttgaagaagactttcctcacaccttaactgaacattctcctcacattctcactgcactctcctcacaccctcactgcactctcctcacaacctcactgcactctcctcacaacctcactgcactctcctcacaccctcactgcactctcctcacatcctcactgtactctcctcatacccacactgcactctcctcacactctcactgcactctcctcacaacctcactgcactctcctcacaacctcactgcactctcctcacaccctcactgcactctcctcacatcctcactgtactctcctcatacccacactgtactctcctcacaccctcactgcactctcctcacaacctcactgcactctcctcacaacctcactgcactctcctcacaacctcactgtactctcctctcaccctgatttttttttttttttttggtgactagttgctatatggacctagatcagtatgtttcaacttgtgggtctcaacccctttaagagttgagcaacactctcacagggatcacatgccagatatcctacataccaaatatttacattatgattcactacagcagcaaagttatagttgtaaggtagcaacaaaaataattttatggttaaggggtccccacaacatagggaactgtattaaaaggttacagtattaggatggttgagaaccactggtcttgatggaatacataggtagaaaatataggggccatacagtatatcctcctgaatttatcctaagccttcttgtagtccgtccatagcacagcatggtgctacaccatgcatagtgtatgtgctgaggatattgttccctgagatgcatatttaaacatatttaaatgatcactcagataaatgtcaaaggcttgcaatatgcttagactgagggtgaatggtacatgtgggagacagtccccaatctatcagatcatttctttggacagatgtctgactgagcctcaaataagtcaaaatcctaagtgaaggagctttctccctgtggcctttcccacattgaaggcatagtctcaaagcagttgactaagaatgctcttggcagttcagatcagatgtccagctcatccgtgaagcagttgctctggaatccactgaacgtctgcagaacagaaaccagatccaatgtgacaacagtcaggtgaaaatcacagaagcatagatgatacaatttgattccaaagcatgttctatgcactcgagatgccagtgagaccaagcatccatgaggcacagacccacattgtagccagagcggtccctccccttcacatgttttcatgagctttggaagtcaatgtcctcagcacattgcgaaacaaattcaccaaaacaacagtgttagtcaactgcatttcaattggtcagaatcttacaatgttggtgttgagatatctatgaaacatttccttgtttatttccatgcctgctctgtgtgcatgtgtgtgttaatgctcaggactagaagcacaatgtgggagacaagggacttatgaatctaaactgtgtcccagaagtggccttggagggtagggcttagggtgcagacacccaaagttgaggagtgtccagtgagaaaaccccatatatgtgtgcccccaagatgggagaagccaacagctggcctaccagtgttgggaggccagctatttattttttgtgctacctgagtttagttaaggattcaatagccaaggtgagagaagggctatcgaagtggaagagagaaagacaacagagtcagggtgggttcaagtcttggtttaactcctcccctgggttaaccactctcatatccaccttgttaggacccctaattgttttcttgctatggttgacctttggaccctgcatattgaacaagcttagagccttcataaaagagagaataggaacagtgcagctgatggtcctgcaccaacaatatgagaccctgaggacaggacctgaagactatgagttagttactcaagatccctaagtgtagatccaggattaaagcttgtacaagaaaaggggggtgggtgggtgggatgaggcaccctaagggcctttctgccgcagatggacctcacttgggtcctcgatccatgagtgaaactcaggttctggtggttacaggtgagcaaggagttggtgcggatgacaaacaaatacaaacacaagggagtgtggtatctgaaagtatttttgtcaaagtgagcatcagtcatttatattacagaaaacaaagaaattaagtgatacattaaggccattcaaggtacattgaaattatctgatgcaaaattacttttacaaaaaaaaacagaggaatgcatacttaaaagctaacaggaaccaactggggtaaaatcaatgttaacaactgggatcaaaaacagccccacctaagatcagcttaatcttaaaagccaggtgtaagagcttcatgcccttgccatagttccaattctagtctattatatagtccaccttccccctaggccattgtaaattcctgtgtattgatgcaactcagctatctatagttctaagtatctactctagttcctccctagaccacaaccttccttcttcctagataactgtaaattcctgtgtagggcagtgacgcagctatccatgcccagggttggctcaaggactgcctaggactgaagaatctaacttagctatatgtcaaaatcaatccttagaggcacttataataaatcaatattgagggaaagcacacagatccgtttaccaactaaagcaaggacattggagcatttgttacacaggacgccacggttccaggagactacgtttccgtgaacttttcaccttgggactgcgtccaggcttttgggcctgttactcgggtcactactggagtggatgtggcacctttccagtcccacaccctccttacagcttttctctcccacctggggtcaaagctaagccaagatccattctccatccacaggaagattcttgagtaaaaaaaattctcagaatgtactgactgatagtcacctgaccctctggaaagtcccaggtagagtccaaatgcaagtcatgcttgctagccaataaacttaaaggtcaatatgcttcgccaataagtttggactataaccttgctgatgtaacctgtgcccctaaaaagtataaaaactgcttgtaatagccattcaggggtcgccgtctagtcatttgcctagagggactgattgagggttgaccctgatgcgccagaaaataaacctcttgcttttgcatcagaaaggaggaggaggaggaggaggaggaggaggaggaggaggaggaggaggaggaggaggagggggagggggagggggaggaggaggaggaggaggaggaggaggagcacatacggtgtgagtgtgcaattcagaagacaattttcacctttacatgatttctgggaattgacctcaggttgccaggcttgtatggagagcacatttatctgattagccttctccctgcccttctcaccacacacaatgagaaactttcagtgatctcactgccagaagtgcaccatgctgtggcctggacccgttttgtccgcatgtcttgatccagaatggaaaccgcatggtctttgggagcaaaacactcaactactcttaaaataaatatgataagtccttatttcacagtaaggttgtcacgctaaagtgatttgcagagtgtaatgggtagcagattttgctggggacattttcctgcaacataatccccacaacagactctcatatcaagagatattgattattttctagggaaacacttatcatcagcaagaggaagtgtcctagttatggtttctagtggtgtgatgaaacaccatgatcaaaagcaaataggggaggaatgggtttttctggctcacacttccaccttgtagttcatcattgaaggaagtcagaacaggagtgcaaacagggcaggaacctggaggcaggggctgatgcagagcttgtggagaggtactgcttactggcttgcttcccatggcttgcttagcctgccttattgaaacaggaacaccagcccaggatggcaccacccacaatgggctggccatcccccatcattcactaattaaaatgccccacaggcgtacttacagcctttacctacacttattatagagacatttttaaaattgaggttccctcctctcagatgactttagcatctaccaagctgacataaaagtatccagcacaggagacaatgccgggattctgacaagtgcctgacttcccaatagggatgccagcaattacctggtggaccttgagtaaactgagttactgtgtatccatatgtgcatgtgtgcaagtgcttctgtgtgtatgtattatgtgcatgtgcatatgtgtgtttgtgtgtatgtgggtgtggacacatatgtgtctgtgtctgtgtggtgcatgcatgtgagtgtgtgggtgcaggttcataatcatgtacatgtgaaggccagaaaaggacattggtgtattctatcattctcctgccatatcgcctggtgaagggactgccactgaagcttgcactttgggccaggctagcaagctaatgagattttgaggtctggttgtgcagacataatgcagctaagactggtatttttatgggtcctggtgattcacactgaagtctttgggctttcagaggaggcattcctaccctctgagcctccctcctagcctttgcttacttaattttgttggacattatgtttgtcatctcttaagtgcagtgagtaatagtaagtacatttcagagtttgtagaaaaacttcataagttaatggatacattaactagtgaatgcacctagtatagcacctgttgactgtaaacagtgaaccgagaaagtttgtcattgtgaatggtccccatccacgtgataaactgtgttaccatccatgctggagctctgtgacaaaaccaaatccaattgacttattttggtccttttctaggaatccatataaatcaagcaacatctacacatttgactctgagcatccacagtgacagaaactttggtggccatgtcattcacagatgacaagaccttcttctccaggcctacataatggtagcagttatttcattaacctgatatagtgggttatgagttaactattctttagacctaatcattagttctccagagggatgcaataactagtttcatgaatctcactttgcacatgaacagactgaggcaagaggaatgaagggggtgcagagcaagtaaaggaagctacacacttgtcatgggaactgctgcttcataccagatctctcatactgatgagtctcactcactgccagtgtcttctgtatcctacgtattagtccatgtaggagctattgaagtcacttgattcttacagcgggtcctgttttatccagttagcagcctgatgttgcttgagttataagcctaccatgctctgcatgtactgtttttattttttgcccagaaccagactcttgccatcgtagacctttggggctgtggtttctccactgcatccactccaccaccataatggagacaacttataaacaaaggagcatgcttgtgttcttgtaatacgagttttataaaaagcaagcatgtggctggacttgacctctgggcatggtttgcctacttctgttctactgtggctgggaatgcagctcatgaatcattggcagttgtagcacccacaatttatggaaaggacctggaaagttgctatgcacattgaccttcaaggctctgctctgtgtatctccaagtagcagagtgtctctcagaatccaggtaccgaactacagtgtaatacaggcaacaaggctacagttgtcaacactgagcaaaaagactttcccattttgtacacagggatgcaaatactctgtgtctgaaagagacagtaacatagtagacaccgttgaggttgaaccaggaaacaaatcagcaaaatggtctgcgcaaagggccacacaggtatttcaaaggcaccgactctgggtctgaagaaatattatcgacctgattatgaatgaaggtctttccgtgctaattaaatcatcacatagccacagaaacagactttcactgtcacaggtaacacaagactaaaccttctagactactgttgattcaactttatctgacatcagaaactgttcaagatacaagtcatgattgaagtgtatttttttaattaggtattttcttcatttacatttcaaatgctatcccaaaagtcccccatacccttccccttccccactcccctacccacccactcccacttcttggccctggtgttcccctgtactgaggcatttaatgatttgagataacttacatatacacatgaaatatgagacaaaatgaggaaaagatgtaagaaattgagttatgaatgtggccaggagttatgttcccatgcaaaatataggccatgaagtcctgggttttctctataggatcttatttatgtattactattttatttattttggaaaattttatatacctatgttagtatttttatcatacctatctaatactaccaccctccaagtccctttaataccatcaccccatcttccagtcagcatttctttttgttattgtaaataaccccctaagtccaattagcattgtccttatgtgaataggtgtagggtcaaccactgggatatcaacaccataccagcaaccatgtccccaaaggaaagtaactctcactcctttagcagccattaactgtcaatgttcctttgccaagtgtgtagtacaagggagaggccctcctcacttcatcttggaattttgactggcttgatactgtaccggtagccacagttgctgtgaattggtgtgagccacagccatgttgtgttctgaagtcagcctttcaccgatctctccttcatctactggctctgatactgttttttatacccactcatcagcgatgtcccctgagccttacatgggggaggttaatctagatgattcatccacaggcgagcactcacagttactcatacttggcaccttgaccagttatgagtctctatattaaccagtttccactgtgaaaggaagcttttctgacataagttgagaacagcatccgtctgtgggtctaaaggtaggcagtttgacggggtgactattcaacataataagggtagagtcctcccagggtctatgatcttctccagtctggagtttctggacaactttgtagtatatggcatgacatccctcttgtcaaacaagcctttgaaccaaaagaatatggttgcttgcctccataaccttcagtgctactactgagctgatggggcacatcttgcttggaaaatcagtgttataatgtacagggttgaacacattgctatctttcctctctcagcagcctgcccagcactttctggcactatgtagttagctagtaggcttggagtttcctggtaagtccaggtttgtttccctgtgacctgcattcagaatgagtagtgtcttaaacaatagggttttcccatttggttatggtgggcaaccaagagccatatagcaaagggtttgaaggttcctctagggtcttcttgactaataacacttagagagatatcccatcttagttacatttctattcctctgataaaataccatgttcaaaagcaacttggagcagatagggtttattcatcttataacttcccaggtcaccctttatcactgagagaggtgaagcaaaaactgaagcagaagccatggaggagtggtgtttgttgacttgctctgtctgcttccttataaaaccgcagtaccactcaccatggacgagcctgccaacatcaataattattaataaagaaaatgccctctagagttgcctacaggcaatctgatggtgggattttctcaattaaggttcctctccccagatgactctagcttgtgtcatgttgacaaaaacaaaatcaaaatatcataccaagacacaacctacacctggcagtgagattttcatttgataacctatatctcctgaacatcaatgtctacccatgcaaggtacttctgtccaagcccccttttatgtacactatattttacattttcaatgggcttacaaactaaactagtgggtttctgtaacaaattcttcgggcatcctaagttttggctagcccttccttacccctttttccccttcttactccaaccccgatccccacttaaacttttatttaaacagtacaaaccaaacttgttctatgatgctcagagtctaagcttaggaaatgcttgtttgtgaagccagagagatggttcaagaaagcatttgccatacatgtcttagcaatctaagttcactctccaaaccaagcataaatgtagaaaagagaatgcattccacaaagctgtcttctgagttccacatgcatccatctacacagcatgcaccacacatacacacacacacacaaaacaacaacgacaacaacaataataagcaataaaagaacaccacttgtttgtgaagaacagcttttaatttctactttttacaagcatggataataatacctctaatagaacgtgttaatatccatgtaaatggctggaggtacagcttattgacagagcatttgcttagtatgaaactgtggccataggctcaattccaacaacagtatctcaactaaaacataaaaatattgtatcatgtcactccaaactaaatagccttttaaacagtatagcataataatttcggtaaaaaatataatcacacaatttaatgtttgctgattatttatttattcatttgagtgtttctaagtgggttatcccatttaatcttcacaactttaaattcctaaaattagctccaattattttatggctctgattagcatgaaacaattgtgtacattcgcaagatacagttcgacccattaccatgtgtacagtgtgccaatcaaatcaaggtgtggtatccatctccttgtttcctgtgattgaggcctttgagcttatattaaagctcttctcatttatataatgttgaaaataaaatattaggttattgtgagatattgtgatgtagaatagtaaagtatatttcttctactgatctgtggtttggttagccagcatctgtctaggatgcttcttcaacctttctaccttttagcattcaatagcatcacttagatccaacaaaacaggtctatgttaagtaaccagccatccagtgtactagtcagctattactgggtacaaaatcactcagaaacataattgcttaaaactttgttcccaattgtgttggtcagcattttaggctgggcacaattgggttggttcatctatgttccactcaatgtctctacttgaaggaactcagtttgtcgcttgggtctcaaatccgaacctgagatagcttgcctcatcaaaagtgtgtgtttaagacgcaacatttcttgacagttattgcattgaaccatcttacccagaatgcaaatgtacattccaagttgaaacctaagaattgtgactttagaacccaggtgtgtaaccaacacacagtatttgccaccaaaagttctagacacgcactattttctatttatggttttaactgtcaagcaactgccttctgaaacagcacaggccttctgaatctcatgtccacacaattcctttatgacagaaaatcccagggaatgtaagatagacataagaaagtgcagattaatggcaggagattctttttcactcattatgaaagagactgaactttacataaacctctctagggatgcagctaataccaaaagcagcattaatgcattaaagatgacagtattacctaactctgtgtaagactgtactgttaatacacaaccctccagtgaatgtgaaccttgtgcctgctgggttctccctctggcatctgcacattagccaggctttcttagcatggcacaaaggagtgttttaaggttgatgctaatatatgtatcacagccaagtcaccaatggccaaaaaaaaaaaaaaaaaaaaaaaaaaaaaaaaaccctaatagattattgaacacagagagatgctgattgatactggaaaggatagagatggtcctggtcactgtgtgaagagaaacagccattggcagggggttaagttaagtcccttactttgaatgcatttgtggcacttgtctctttccagggcacagagtgcttttacgagttttatctctgtaagatctgtaactagcagtgaaccctatgtgtccccagatgatggagaaatgccttggatataatctgagattcatatttcctactgcatttttttaaaactccacaatttactaagaaaaagaagaggaggagaaagaggaacggggacagaaagaggaaggatgggagaggagagaaaaggagggagagagggggaagagaggggagaaaaggaagaagagagataaaggagagagaagaaggtcatccctgggtaaaaataaaggcatgcttagagaaaacagtggaaagaaattagcttaatgtggcactcaatgattctctgttagtatcattatacaatggatgtcctaaagagacacactgccacagctattgtcacaaaagcccatttatagaaaataacaaaaagaatcatcttaataaaacattttgccccgagcaagaatgtgcttcctgtacaacccgtgagaaaggacaactgcttcacagaagctgagctgtgaccttgctgtgggactgtacctgatttaatgccactgaaagtcaagtcatgggctcccagaggtgcagaatttgtcctgcctcatggctttgtttgccgacagaggtgcttaaggcagtgtctttccctgtgattatttacacatgaggctgcaaggaattcccaatgaccttgaaagtttggccaaagtcatttctcacagaaagcaagtctcttgagggacatcagaactttgaaagattttactgaaaaggaagagggattcatgtaccatctataatgcagcagtgtgtgcttccagatacaagtgtttcatttgaaacaactctaaaaacaaaggtgacatttgctcaaagacaattgaaacaatgttttacaatgttaaaatgtccggccagcaaagagcaaactcactacttctaaaagtctttttgatgtccagactgaggtcagagggctcctagtgtattctgaccccatatagtactccctgtgagtcaaaccacatctattctctacattcatcactgattggcacatctttacaagcaacattgtgcttcacaaattgctttttctttctataaattatctcaattccttgaggcaagacagaacatacatggggataactatttgacacgggagcattctcacctcagactctcttgtcaccagtgataggaaccaaggcagcaacttgagaagtcacattttcccttagggacctccattcacacaaacctgggatttgtaacttcaccacaaaaaaggattgcaggatggagcacaattgaagaatttattaaaaggcctttttttacatagaccacaaacacaagagttaataaacagaggctctcagataaataatgagacatacattaatgtggatgtgggtttcaccaggaagagttgcaattgggtttctttacagtgggcctatataggagttcagtggctctaaagttacagctcaaaaggttgctaagcactcctcacatcactcagagagtctggcttccagcaatgctaaaagttgaagaatttccttcaagaggtagaatttttgacagggacagactgaaagtggagtgctacgaacccaaggtcatacatcatctcagccctaaggaggtatgacccactcactgtccttgacaagacagcttttggaaaacatatattgtctctgtaaatgatttgggcttcctcggtggtatctgcagtctttcgactgtctgcaggataggtaaggttttcttccctcctgctctgtgtcccaggtccctataatctctctgtcttgcctcactctgatttgctcattatcaggaatgctctgaatgttggcaattgagttttaaataagaaggccattgtccttagtttataggatttatcttctagaatgaatatatatataaatatatgaattacatgtagtataatgccaagatataacagatggttaggcggagaccacagccatctaccaaggggttctgagcagttcctcatatcttccattagtgcaaaccctagaactgtcctggaacaggagcccgcatcacatcctgttatgactgccaccgactcagagagatgcatacaacactgctttcttgccctccacacatgagctccaacagtctggtgcagaggagtgattctgtgcccatggattactccagaccatcaacaaggattaatgtcggtgtgtggaaagttcctttcaagcacgctttggtgatgacaattctaggtgccagcgtgaatttttgagaccagcagatcaacctctcctaaatatacaaggtcagggagaagatggataaggtcagtgctgcagaaataactgcaattctgtgtagtgtcttataaattagataagtaagaactaaacaaggatttcctgactatgcctggtaatgaatatctgcaaagaaagatacactgaatgattaagtcaatttattaatgtgtgtgtgcttgtgcacgtgtgtgtgtgtgtgtgtgtgtgtgtgtgtgtgtgtgtgtatttatagaggtgcctacagagctcagaataggggttcatatttcctggagctggcaagttgttgtgagctaaagctcaaactggtctttcagaagactattcttaaccactgggctattgctcctgcccacagttaagtgcattagccaaataaccatatccaaaagcatgaacgtggtcaactcacaggaaaggctcacagtggaagcctcaatctccctccctctgatccattttcagtactcatttcagcttccaagcagaaggacataatcgtatattttacagttctgagcccatccttcattcaaattactgctgcccacaagtgagattttgaaaacaaaacaaaacaaaacaaaacaaaaaaaccaaacaaacaatccagaaccaagcctatggaaaaccctggctctccagaagtccctgtgtgtagacattgatgtctcggtgaccaatctattaccctccaagtttctttgttgattttgtaagtcccagtacctcaaaatggtactgaatttagagacaggttctttagggggtaaattcagttaaaacgagactgttaggacgacctcaagcccaacaggagtgtaccaccatgtgctcctgcaatgatgaggaccttggccacaaccttggttttgtgtatgctgggtaaacatagcactagctgtgctacatcccagagcagtttctcataaggtgtcaggacacagacacacataagagaacattaggtgctagggccctaagtgtcctatgcaaaggccagatgtagccagagtggcagagatgaggctgatcacagctcactgggctgagagggtttcctcatcacagagggcacatgtatgtgcaggcgtgggctgccttgcccttccgtcttccatgagcacagacacagcaagaagactctccacagacgtgggtgtttctgtttaggttctcagcctccagaaccaaaaggaaataaaaccccagtgttaataatccacctggtctcaaggatttcattgtaacagtaccaaatgggtcaatatagagacagaggtggacaaccacacgtaggagcctagcagaagccaccctgatgatgcatcatcaacctccagagttgcatctccaacctccagagtggaaagaaattggctgccagtggttaagccatgcagtctgtggtacttcgttaccacaactatattaaggcaatgtccacccgagtcaggaactctgctaccctggatattgcctctatatcagcctcctgtcccaatgtccactcctacccctacctcagaggtattgatagagccttggggaaaacaattactttggaaactgctggaaaataacaatttcaccttacttttaggagtatttaagaggagagagcttgtatgtgttataaaacctagagaattatcttctaaatcacagctctgactgggtgaggctggagaagaggggcgggggtgcggggggggggggaactgtgcagtttctgtgaagttctgtgaagccctgaggtaatgagtcttaatccttccctggatgccaaagtgatgaatctgttgtcagtgtgattacacaccattaatgcagtgctagggctgaacgccatcctaattctctgacccagagcctggatgtgatgctgagtgcatatgagcaggtgcgagatcaagcgccctcctcagcaccaaagatacatctctgttatgctagggactgattgtagctattcatatcttagtcttcgtgtgcatgtgtatatttgttaaatttgttcgtgttaggacaggcatgtgtgtggaccatggtaagtttgtggaagtcagaggacaacctcagctgtgagtccacactttttactttgtttaagacagggtctccttgttcaccactctgtcctcctaagcatctggtcctcaagtcctagggagtctcctgtctgattcccatcttaccatagaaacactggaatctcatgtgtgtgtcaccagcacccagctttacaggagttctggggatttgaactcaggtccctgtgcttgtccataagtggtttacccactgatcaatgttccaagcccataccttggttttcaataccaaatgactatgacattataggaaatagagatagatagatagatagatagatagatagatagatagagatagagatagagatagagatagagatagagatagagatagagatagagatagagatagagatagagatatcatcactcttttaatgttgaggtcttataaagtatacacgtcaatcttaagtcataggggcaaggctggctttttcttaaataatgaagctctcatgtctagtagcagtgtgtttacatagttcaccagggtttcccctcacttctgcttttgtatggaaaagaggcatcagagtcaaatgtacaatgaaagcctgggcaaaaaatggcatgagactcctctgtgacaggtaaagtggcaaggaaaggtgacacatgaggagaaatgtaaacctcgcaggctcagaggaaacaccacagcttttgagcagaaatgaagatggatgtgcacgtgacccacaggggaattcaggactccgtcttgggttataaatagtagctgccaccttttatcacattcttaaaatagtcccgagcattaacagagaagaacagacaattgaggtgtatcgtgacagattttgtcaatgaaaataattaaccttcaacacaagaagaggagaagagagagtgggaggagctgtgaaggctagagctgggaacacgggagcaagagatggatgctgctctaaggtctccatggacacgtgcgtgaaccatgatgggggatgggagtcagtcataggaacaacatggtcatacgacagatgttggcacagccctcactgcaggcagcatgctgagctacactatgcatatgagttgaatgaagaatcgtccatccttacctttctggggattattgcctaggaagtgattatgcctctcttgcagggcactgggaggtttggtcagaggtcaggaggagacatttgagtgatttggaagagcctcagggaaggagccatatttgatatgagtcttatgagaagagtaaggttgcagcagatacagcaatgaataaagaaaatgggacagttattgacaataaatatagattcagtccctagatgcgtttttgtgcagcaggcttttactgattcttctagatttgaaaaacgttttaaaatcattaatcagaggaagaaaaatggaatctaaactttccctaggaggttaagagttccaaagaattctcaactcaactcacaagcaaccaggcaaagtcatcgttgctgcaggtgcaaactagtttgcaaaggaaaaaaaggtgcactgccaggagactccttgagcagcatcctttatgtcttccagtgccaccccagccatcctcagcttcttggtgccataacaaaacaccaaagggagagggtcgatttgagaggtttcactccatggtccattgtcctcattgtttgagtcaggatagcaggtcttgggtggtatgtcaggtcttaggaggtatggcagatcttagaggtatggcatgtcttaggcggtatagcagaacattataggggacagagcctaaggaaggtctatcatataaaacaaaggagacaattttaaagctagaaggctccttagagatcttagcaacattgttaatgctttcagtgctacatgccaggatcccaaggcccttatcatgatggtactgggtgattttagactgagccacaattaagcagacctgagaccatgtcctgggatgtagcttagttgtagaacacttacttagcatacacaaatccctgggtttggtccctggcactacataaactgaacatggtggtccaccctataatcccaggcactcaagagttaggaacaggaggattagacgttcaagatcatcttggactacatgagatcctgcttcaaaacaacaaaatgggaactaaagaacgggctggagagatgtctcggtaacatgtaattgctgctcttccagaggattcaggctcaactcccagaaccgtcatggcagcttacagctgtccttatctccagttccaggggctccgatgtttttttctggcctctactgtcagtggatacatgtgataaatatatacattcatacatacatacatacatacatacatacatacatacatacatacaggctaaacactatgcacacaaaacagaaaaatgttaaaataaaaagcaaaacacaaacaaaaatcaggggtcattgtccaagttgaagtaagactgtggcttagagcatctcaaacatagaaaagctggaactgataaaactgaggtccaaagtcattaactcttaaattttacattggacttgagtaggcactgatcaggaccctgttgatgggctgtaaagtccctcgattgattgtctcttcttttgatagaaagctgtgagtgggaggtgctgtgatttgccctgggtcattcatttgtgggtatctgctcttgtgctaaactctacctctagtgggtaggatatagctcagatagactgcttaatcagaaggcacaaaaccctagcttctattccctacaccaatagaccagatgtgaccagaggcagtattatcctatctccaatagatagatagatagatagatagatagatagatagatagatagatagatggatggatggatagagagagagaaagagagagagagagagagagagagagagagagagagagagagaatccaggtccaggctcccactgtagatgtttctccaattctttgagctctttagggtcaggcaagagaagctgactcctacttagtgagatactaagtaggatttatgattgggtacatgagtggttggagcaaggaagaagttacaacctagagggaaaacacttacagccccaatctcaaatccaattcatttgttaaaataattagtgtgtgcacatacacagagcaaatacataagcacactcaggcacacacacacatgcacacaggcacacacacagaggtatacgcatacataagcacacacacacatgcacacaggcacacagaggtatatacatacataagcacacacatgcagtcatgtacacacatgcacacaggcacacacacacacacacacacacacacacacagagagagagagagagagagagaaagaaagagattacttgtttgatgcttgttgaatcctacaggctctaaagaggtccaaaaagaatcaaaacacagtttttattacttccagaaacttctaggaacattgtaagaaaactttcttatgattcaagttccccattcagggtaattccactaaattcccaacctgaagaacaggaagatgtactttttgcttgctcgagggttgacataagatgtttcgattcaatccctcccttaattgtataaccttgtggcactcagaggaaggctctgactcgtctggcactgtccaacctctgtcgagccagcctgccccgtggcaggtgctcccatctgccaggcagagcaaatgagcagtctagactcattatctcagccccagagtctctgagcgtgagcttggagctcacaaaaaaaaaaaaaaaaaaaaaaaaaaaaatacaaaatcagaaggcggcatgaacggttcatgccgtagcctgaccagtccaggctgggggtcttacaagaagcagagaaaagctaccttgcatgtggctgtggcacattttaattcacttcactcagctgtctctattcctgttccctctggcttattggcggctgacacagaagctcagagcaacagcatagcttccttcctgtgtaaatagagagaatggggtgctacatttccggggttacctggaacaagaagtgcacacctttggctcagggaactctacaagtctgctctattaataaaaattggagttaatccccatcagttttcactgggggttactgcagaccagagtggccatcctctatcgcaccccaccccaccccccaagcatcgctacgctggctggctggctggtgtgggagtgccatccagaaagagctcaaacaggaaggtggttttttttttttttttggttttttttcttcacacctgggtggttaaaattgagcaggccttttctgtgtgctaggactgttctgagagagaactgccctggtagagacttttcctcattggttgccacatctaaatgggggccccattttacctatgagacgatggttcaagtggcttttctaggggtacatagctaatgtgaagggaagaggtgagaaccccagactttgagattttaggataggttttcttgacctccgtggactccaggagggcaatgtacgcttttaaagtttctatggctaattgaagcatgctgagtcaggaaagtaggcagtaaagagaggtggctgtggtgtgacactgtcctagaggggttctgttgcctggaaagttcagagggacagcacgtaaggctagctacaaaaacagctctgccagctcctgcagtcacatttacccacctatcggcatctgggtcttgaattccctatcccactgcaacggacagtgctttgcctgcggtgtgtgccccctctgaatgtgtgccgcatcgtaagcccatccatagtgttagccttcatttcctacgctgacacggactcctccatttcacaagagtgcaatctgttgcggccaaagcctgatgtatacctgcagagaaagctgatagtgcactctaaacagatgtcttgctatcgaaagtagagaaactcattaaaccctcagcgcccatagtggatagatgtgatcgcgttaactgtcaacgttagagaatctgcagtcacttagaagagaagcttaaagcagacccatgagggttgtttgggttagccagtgggcatgcttgtaaaggacgaccttgcttaggttaatggggcgacaagatttaccctaaaggaagatggcaccaccctgcacttgggtcctggaagacatagaaaggagaatatgagctgagtaaacgtagccactgctctctgcttccagacaacagatacaatgtgaccaactgccttggcatccctgacaatggactgtaccctaaaccctccctccctcccttaaattgcctttgtctggctgtttcataacagcaacagaaacggtaactaagaccacgcgtgagccttctaaaacccaaaaccccatcctttagtgtccggaaggcctgcctgccctctgataccttccatccccatcttagggttctagccactgcctgtcttctaacccctgcaatatgtctgtagtctaagcttgcagggtgtctccctactgactaccacacacagagcagtctctctgtcccaggacacatgcgctatcttactaaaaccagttgctggcacagttcatgaccgactgccttcccaccatcctggcctcctagctgtctctgtcagaccgtttcccttccctacctcggactccacagccatcattttttctcccttcacacatgtccttcgttcccttgcccttgctacactcatttggcaaaatcccagtcctggttgaagttaactgcccagtccccttgccctcaagcccatgaggttaatacagctggcgagatgtgtacagtggaagttacttttctttttcttcataaacatacacctcagtgagcctaagagcaagcatgatacatctcctagtctactgcagaatgcaacgtccctttcctctctgtttctcatgccccatcctcctcctcagctgaccttatgtctgatttcactcgggggaagggtggagaagcaactgtgtaaggaattcctcactttctcccctaccagctgctgtgccagccctcacacatccacctacagcagcccacagtgctctaccacagttgaactgtctttcgccttatggccttcagctgtagcccaatggcagaaccacagtctccagtctttcagagcctcctctggatgccacttgtctaccagaaccacgccctctttctgcatgtctacctgtgtgctctggactctcttcccgatctacgtcagtcagccctcaccccacagcaagcacctgagagaaatggtttgcaagccagaaaggttcattttgtctcttggcttcagaggtgtggcttccaggaaggctggatttgatgttgcatgaggtgaggcaggatggccttgtggcaagaatgcagaacaaaggctgtttatctccaggcaatcaggacacagagggaacacaggaatgggtgggacaccttatagcctagggagacatactgctgtaatagggcaggaaattttattgttattatctttggcttagtgtgtctgctaaacacaggtattcagtaaaaaattttgctaaatattgaatgaaaaacgtaattttaaaatatttttgattcattttattcactcacctccatgtcctatagcaaagtttttcagccttttaaaacacaatgggccttttaataaactcatttgaaagccttgtatatttaaattgcacaatagcaacagcagccaacacattcaggacccgatgatgttctaataatggagtttatccctcagcttgaacaaaggcaggtaccaggtgttgtcatgactctgagggcactccaaggacaccagggtggaattcagttcaaaaggatgggttgccagatttccaactgggctcgatttctgtatgtgtcaggacttctgacacacctgcttggagtgggctcaggacaaagccaagcaaggacaggcatggacaaggaaagggggtaagtcatctctgggcatagttccattatttaacattcacgaaagtttgctttgacaaatacatggaatctctgatcagtgttcacgcgttttcctggaaaagcatatctaagagagaaattctgctgtgttctgctgactgcttctgagaacaaaagaagaaactctgctctaggaatagacaatcaacaaccaaagtcagagaacaagtcagagggtccaggacatcactgcaccacaagcttcaagtacagatgagaaagaggctcagattcctgtcagactgataggagcacctatgctttatgtaatctgtccacatagaataacaatagtgcattgactacttacgtagccatggattctgcggtggggccgttaggtacttgcatgtcctataagtacctaaggcacattaccatcattctaacactaagaacactgagaacactgaaacccagaaagaccacagtgagctcagaactccaagtcaagtctcttgacactgtgttgatcctcttgtatgaggatgaagcacctaatcgtaagcatgcagcttggaaaggagaatgggttggggttagcaactgagcatcactaacaggtacaggctccaacacagaactgaaggccactcaggacacatgtccagctccaaaatatggacacaatccgtgatacaagtctcaagaccttgactggacggtacctccaacaaagccttcaagccaacttgagtatttcagccaagtcctggcagaagaaaaggagacagacacatggaattcatttgcacagagaaagaaaacatcctggcactgagaactatctcctttcttcatacaatccaagtctgcctccataccctgcctagctattcaccattatcctccacctccctgcccaggtccacctcagcacctggagcagaaccgacctgctgtaatggcttgagtcctgccctcttcttcctccccagcgtgctactcagggccatgttcaaagtttatatcagttcctggaatgcataagcccagaataggcagaaactaagccatgtgacaatatgctctcattgctaatgtccttaaagaaaccccaacacctgactgactcactgacccaaggtggcaaagtcaaaacacacactacaccatttttgtctgtgttgtttgacactcacttactcctaacatttccttggttataaaccaacttcagcacattggaatcctcacaggaccataggaggcagatcctcctacccaagtcaaagggacccccatgtcacacaaggatatgctggttctgagaaagtaattgtgctcagtattgagcatacctcctcacactgggcaagcgctctcttctaaactatgttcctagctctcttttatttctccttgagagacagcctcacgaagtgtacaaactggaatttgctctagcctaagttagtctcctacccgtggtcctgcctccatctcccaaataactgggattacagagctgagttcccagtccctgaaagagataaattctctttagcctagctttcctcgtgtggtaactttttccaattctgtcttcagagctatgggaatggttctgtgtgtgtctacaagtcacagagccctctgaatcttgaatttctgtctgtttcattgctgtttggtaaatggcattgctaagaaaactctggaagccatgagaggacatttacatgaataacaactctagggtctgaacaaagaatgaactgagggacaaggacaatggacaggcaaagagatgcgaccaggagggaatgtatgacacacaaaagaccctccttccctttgctgtctttcatgagctcctcctgacacacttccaacctggagtttgtgtcagagctgagtgaactgtacctcatcagaagacagaaaagacatccaagtaggaagaaggtagttgaagggagaggctctgccgtgttgatcacatccagacatcttttgtttgacctccagacttataaaaatgtttgatcagaagggatattgattaccctgggaagcattcgtacatgctagtcatctcctttgtgatgtagtccagaaccagcaaccctgagggtcaccggttcctggagagttagaccttgtcccttcaaggagcttctggttgctgggtggtagtggtgcatgtctttaattccagcactcagaaggcaaaggtgggcagatctctgtgagtttgagaccagcctgatctacagagtgagttccaggacagccaaagccaaggctacacagagaagagaggaagaagaggaggagggggcagaggaggaagaaagggaggagggggaggaaggaggaggaaggagaaggaggaggaggaaaagacgggctgacaaatgcgcattctcagatccttatgtgttaagatcctttgagaaagatatcttggcttaacatgggaatcgacagcaacctgacttcccttactgggattgatttaagagcacaatagacttttcttgattttcgttctaaaataaattcccccttgattctctctcacagttcccacaaatcttggtagttgtttgttttttgttttttgttttttttttttttttcatttattaactggctccagaagatcaccagccgcattagcacatattactagtgtaatatactattattaagtaaaggctcaacttataccaggaaaatgactgactattaaagtttttagaaactacatactcatattaaggtctcttggatgaaaaaggaagttataccctacttttatttctgccttctgcaccctgcttaacctataaggtgtcggttaaagcagagatgaccaaaagtcaggacaagaaccccaagcacttatagtgacctgagatgggaacactccataggacagtgggccagcaattggccactccagagcttctaacattcaaggacatcacctgcacctctttcccaaaagacttgaatgagatggagtggaggtttcaaatggcccattcacaagatgccctgtccttgagaggccttccagtggtttcacggggctttttgccacgcggctgcatgagcaaatgcacagactgagcttggcaagtaaggaagggaggatagggcctgcccagacaacagggttgttaccaggcagatccagagaccttgagaagccctggagcatctcctgctgcacacaaattagcagccaattgtttccattttctaccttcagtgggaataaggctgcctgcagcattcccaataccagtaatattacagcaaagcttgttggggagagataaggttagagagctggcagggagtggggctgggtctcttcctttaatctgactctacctatgtctccctaaggatgagcaaggtctctttatggcccgtctggctaaaggcacacattttcttttacacatccgactgctatgatgacagcacctacaactcccagcaaggctttctgaaacctgcatgagctgtggagagacagagagatggaaaaagtgcacttgtgcctgtatctgcacatggaggccagaggtcagcatcttttttttcttctgttgctttccacccttttgttctggtgttgttctgttttgagataagatctctcactaaacttgagcttgccatttctgatactctgactggctggcagcaaacaccaggcattgacctgtctccacctcaaagcaatgtcgacaggaatgtatggttaaactcagtgtttacatcgggattgtggatacagacacaagcccttatccttgtcaagctcacccactaaaccatctccatagcccaagagttttgatttgccattttgaaaactgaaaacataggaaaataaaaacatagataaaatactttgcaactaaatgaaaaaggactattataactcaatcttcatatagtgatttgtaatctggttttgtggctctcccggaagtcctttctctaatacctttcctctcatggctcttagcagctcagtgcacacctgtctaagtaacttaagggcccacattgcccatgggctgctcacatctcactcacctgccttgttcagaggcaatgagcccattgacaatcttcatccctgtagccttaataatgtgtgtcctggtaagggaagagtggcctacaaggctaaaaaggctgttagaataaactcccctgcccacttctgggaatgccaacagaggtgaaggaccctgaggaagggcataggcagctctgtttgcctgagaacagaaatagtgcccgtcattagaagttctgcaagacagcgcttgcaaccgcagcagagcctgggtctgcatcttcatggtagcttcccaaagtcttattatggatacagtcatcgaggttttattccaaacctcaaacatcacactccgggcagcaagagaccaagtacagaccctgtgtcaaagaatgtgtgtccttatgaccctccaaccgcactaactcacaaggctacaccttctcactaataaaatatgctgagcacaccaactttatagcgttatcttaagaaatatgaacttagcatagaatgttacctttatgcatatcttcagagctgtctatttggtactggaaaagtacttgatgtgcttttcctggggaaagctatttctccaactcccagcatccctgatagttctttgtgtagtagtgaggtcttgtgaccttcccccatctagttagaatgcctcttgatgtcatcctcatgcaggtcgtgtttaggcagccatgttggtaagattttacgggtgtagtttctgacattcctaggagatacaatttcatagcaagttcactgttcctttgcctcttataatttctttgttcctctcttccgcaataatctctgagtttgagttatattgtaaatgtattgttgggacttatccttgataatttttaaaaactattttgttacgtgtgtgtgtgtgtgtgtgtctgtgtgtgggtatgtaaacatgaacaggaagagatcagaggacagagcatgtgagtcagttctccccttcactatatgggcccaaccaggttgactggcgatttctatagatagaattggggtcaccagacttgtgtcatacgcctttaacagcttattcatcctaccagaatcctctcaatgagttttaaaaatggctaacacagtcaatggctttctcaattgggtgtgactagaattgagctaggagcctgaggttctggcttagtttttattgtcaacatgacatgacatagaacaacctctcagtggaagaattgcctcaaacaaattggctcggggctatgtttctgaggaattctcttgatgattactgtgggaggactcagcccacatgattgacagcatccataggcaggtgggcctggcttcatccaaaagcaaccagagaattgtgatagagagcgatgggtgtcgaagccaatgagcagctcctctgatcctgcttgagttcctgctctgactttctcaatggtgaactgaaacatggaagatgaagcaaaccctttccttccccgaattgcttttggccatgacattcagcacagcgacagaaagaaaaccgggatgcctggccgtgtctgtgaaccttgcatccccacaacagtggctccatcctcttcttgcctcagcctggctagtgaatgaactcctaagtctgacacatcacagggcaggtcacaaagctgatttgcacactgctgttctccattcttagtcttgtactttcccaatgttctaagcgctgctggcgtgatcacattaggctgatcatgctcagagaaagctacaagttgagttttcattttaaccttgtcctctcggctagcaatacgcaacaggatgctgggttgtttttttgtttttgtttttgtttttgtttttttgtttggttttttttgtttgtttgtttgtttgtttttggaactgggcagcagccatgagctgcagtgactagttagctttgagatcaaaaatacccagactggctccctgtactgaactgtgtggctgagctaaattcacttttgattcatgaaattttcaactttgaaagggtttagaaggacacaattcagtcataatttcaggggcatcaatacgatgctcttctggatttttttttttcctttcagcttctatggtgattaggaaagacaacggtacaccaggaactagggatatagcttggtgaggcaagcttttggctagcagagtcaaagccctcgataccatccccagatcacacaagtcaggcatggttgcacataagagatggagtcaaaagataagaaattcaaagccatcctctgctacagagtgagttcaaggagcctgatacacaagactacacctttgaataaatagataaatgcacatgaacttcacagataagaaaacttggtgctagaagagagaagtgatttgtctacagtcacagtaaagaacctgggtgagaaagagtgtgagtctgagaaccccatagaggtgctgctattccaccacaccaaccttgctacttcctggtggcttctggggcttgctcatagtgatgggaggctggggttgcgttttatagttatttttacatcgctgtatgtaagtgccttacatatagtagacaatgacttacatgtagtggaagccctctgtctctaaatctatatctatttatatctatctatctatctatctatctatctatctatctatctatctatctatctatctatctatctatttattgctggaacaaattctggtgagtttggagactcagggattttcttttaaccatcaaaaccctagcttaggactcagggttttcttctaccattcttaccacctcatgtattgagtcaaacctggcttaagtcattgctgttcatagcctactggtctttagctataatgtttctattatttctattgccagagtctcccgagagttgctcactttgatctctgtttctttggccaagtgcaagggcacggcgtgtggtgtgttagttactttcctcatcattagaaccaaatatctgagaaggggagagtctaagggaggagggacctgtgtggattgcagtctgaggggaaacagtccattcttggagggcccagcatagcagcaggaaagtaagacagttgtcacattgcatccgttgttaggaagcaaagaacagacaaatgggggcaggttacaaaacctcaaagcctgtccccggtgactcacttcctgtattgaggctccacctcctaaatgtttcacacccatacccaattgctaaacttccgtctttcctatctgtaagacagaaaacagagacagaccaaggtgtgtgtgtgattaagagagaaccgagtgactgtcacatactcaatgcataagagtcattagtagtcatcatttggctcaatttggtaccttgtttgtttgtttgtttgtttgtttgttgctatagcaagagaccacatttgagtattatttccttttatcgcttctccatgaagcatttcttaaagagtcttcctcttgagggcagcaaggtccagtagcaatactgtgagaatcacaaatgcaagccagaagtaatttcaaattgttggctggctatactgaataaaagaaaatcgtttagatgagttttgatgacttactttagttaacttagaatatcatataaaaaaaaaacaccaatgaaatatgttcctatcctttttatagcctcttcaaattctgctatgtgttttacttacaggacatcccagcatacactgaacacattttaaaagctcagtggcctgctgtgactaaaactactctttgctaatgtccctgagtttgcagtcttagcaaatgcttagccaaaactctcttctgtgtgctccatttattacctaaccaaatgcatatgtcgtttccatctggaaggcctccctttttgttcagccttctctttcagaaccttgcatgttaggtggttccccggggagacgtgactacttgtgccaggttccccctggatttgtggtcacagatggagaggaggtgtgttgattacaaggagaaaaacaaaaagggctctgatgtgggaaaagtccaggtttatattcattgtatcccctggcaccatctgtcctgatgtaggcatggagctgtagccctcccacaggttagtctaaaaaagccaaagttggtgacaagacagttcatgagataaaggcacttggcaaacaatactggcagtctgagttctgtccctggaacctgtgtcaaaatgggatgatagagctgactccataaggttgccctttgaccttcatagatgtgccatggaatacaaactcctaccacatgataataaatgttaaaaaataaataaacaaacaacgcttatccttcttattattaatttccttttggctttttcatacatatgtgtaatttgttttgattatatccaccctatcaccattatgtgttcccctccccttcccactggaccccacttctcaaatagcatcctttctacgttcatttgtgtctatgtatgtatatctatctactgtgtttaattggggtcccctgcatgtcataggcgagagggtatttataggaacataaatgtgtgtatttatgttcctactatactatatactactataaatagttcagtctatcactgaagatgtcctcctccagcagccattaactaccaatggctcttcatggaggggcatgttcccattagttcctcgcatgatgacagaatgtcaacaggacccaaccttgtgagatcctgtgtaaataagcacagatggtgtgtgttcatgattgtaatggccgtgtctatgcagaacagagcatctcataacatttttctccatctgccagctcttatttctgtccccttttacatgatgttccctgagacttgggaacttgatattgatgacctacttaggcctgtacatgcaacagtgacttattctcagtattttgaccaattaggagtttctgcactgatgggaagtctttcatgggcatatcaactatgacaccaaggcatgaagctagcccatgccggactgtaagttttagaacgattggaagacaggcaggaggcaaaacagctattcaccactcatccttgccagatcatgaacactggttccatttttaaattcagagattaatatttaatattttactctaccttgtttttgcacatcatctcctgcctgacagaggtattgaaatgtagatggtaatattttgtcaaataattattaactctaaaccaaaaaaatttttatctcctcaccacagagtttttcaaaaatatccccacagtctggcaagtgctgccatcttcaaagttttattctgaagaaacaagcagttacgtgtaggtgcaagcaaaggggaacctacgttcgcaattcactatttcctacataaattatcctttagtctttgcaatctctgcttagaagtcaaaatagaaactcccctgggtgttaccaaaaagcgttgctactacaatctcacgctcttgtaaaaccactgtgagatattgattgtaaacccagctagcattcttccataagcaactcctaaccacttcactgagaaagaaacaaagaaaatcttaacggacacacacatctttaaacaggaaagtggactttaacacaaaaggaatgagaaatgtctttgttcatccggtccatgttcatggctaaagtttctatgataagagataaattagcaagagaaaaacatgtagctggatttaagataagttttcatgaggcagaaatctcctgtacatttgtaatactagttttggtgaagaagtgggtagcattggagatgtgtcattggacagagcctatagcttatagtaaggaagtgtgaggagtctcaccaggcctggctgctcacactcctttctgtaccttcagagataaggatgctccttgtttgttaggggaaagcacttctctcatgagagccttactatttgtctctagagaagatcagaaaagttctttctgggttgaaagacatgcatcagaggaggacaggaaggtgaaagtattcttcctgtctgtgcagttcgctcaaatactgctaccttaggagggagacatgtggagagccctcctacagggagggcaaggggtgtgcctttccaggctatagctctataacggtgtgcaggtgtgtagtgcttctcttccattgtaagtttccccaaacacaaacaaatacaaatataatacaaatacaaactgtaactggtgagttaagagtgtatctgaacatactctgtctggttagttcagggaaccttgcatttaaaaaggaaaaatcgcgtctcaatgagcttttgatcatgagtttatgtagatttgagatttgatttagaaaaccaaacactattcaaggacaaggtattccagtgtaggttacaaaggaaagcacaaagtaacctgtatttccatccaggaatctgcacaaggttgatccttggcatcagaatggaggtccctctctacatctctggctgccaccatgacatttcccaaattgaagagggctaaccttggtttacttccacaggaggacaaagaactccatgaataacaatgcagaaagtcagatcaggtattcttgggtcacatcctgataaaaggaagattaatgttcaagcccaaagtttcttttgttgaatctcattatacttttatgctagacctgtgcgtaggagtagcagtttctgcattgctgcccggtgggaatcaagtagattttactaacaaggacttttgcagagatagctagagagatgtgcattctgcagaaagctaagtgtcctgctgtttgtgacaattagcatcctgcccaagtgtcatgtgaggagacctgcaaagggcactgcagagagagccacagagacctgagcagtttcactgagagatcagagctttctttatttacctcccaaatccctccttttgttcccaacagcacagacttagtgggaaaacactacagaaaagaaaagttttaggaccattcagaactgttaaaaaatactacaggacactggcattctgagttcttgatcctcttccttctttccttccttccttccttccttccttccttccttccttccttccttccttcctttcctccctccctccctccctccctccctccctccctccctccctccctccctcccttccttccttcctttcttcctttctcttttgtttacctttcttacctaaaaacatccttaaaatataagtgaaattttttttttaaaaatcaaacacaaacttttttggaaaataaaagctttcttcttcttcaagcagaaatcacgagtgaatataattggaagggaaatacccatacccagcacaagagagatcttcctactgagaatgctgaggactgcgggccgctgttgctaccctgactcaattagcgtttgagtactattcctgggcttgtgaatgaaatataagggcaggaaaaagatcaggcaaaagtgagaaaacccagaaatggagaattagggacttactcccctgattgacagctccctgctttggtttttacggttgagatgagattctcagaatcgacggccaggaaggatgaggttgatgagactcccggtgcacaggtggaaggtgttccggggccaaggttttaaggtttagctttggacccgacttctgccattttatgtctagaatagccagagctgcttatgggtgttataccctgaatgtttaacctccaagtgtgtggttataccttcatgccaactttaggagctttctcattagacattattgattgatgacaccttggattctgaattaagccacagcacagaaaataacaattaacttactggaagatagtcaatttatagtgggtagagtccatagaatagaacatagacaatgcagaactggataaatgacctactctggggctgaggggcccaggacattttcactgtaaagggaaacctgctcccttggaggcctgtgtttgtttgattgtttatttttctatctgagattttagaagccatgatatgaagtgaaaaatggagggagggatacatgaaggtagaatctctaatgtttataccacaaattaagcttctagcccaaattccatttttttgtgaaatctttaaatttagcagtgcttttatatacattaattattacagataagacaaaaaattatgaatgtaagaaaaaataattaagaggagttaaggtgttaagtgcagtccatgttcctgaagccagcatgtgttggctttgataccagagcttgttgctccaggaatcgcaaatgtttctacagagtccttcacaggtaaaagaaaatccaaaagaatgtaaaatgtagagaatagatggggacaaaactatgaacttgggtatagcaatccatgcatttaatcccagcactcaggaagctgaggcaggaggattgccgtgagttcaagatcttttctcaacatcagcactttgggtgtaaaacaaaatatttacagaaatctctatgcctcatacatttttaaataaaaaaattctaagattctaaaaaataagaaaatattctaagccttatgagttccaacgtaaattcctattactagggtctattcatggcattctttcatccaaagtagcaataaaaaataaaatagaaatacatgctaagactatagctcagtggcagagtacactacagaagtgtatgctcactctttagttgccccagattcaggaaatgagaaaccatttttacaataagataaaatatacgacaatatgtaaaatgcagtgaatttccacatgagctgtgcacatccttctgtgtgctgtcaatcacctgcagggtactgctgacgcttggtacaatgtaatgctgtgtaagtcactgtcattctgcattgctctagggatagtggtaataaaggtcgatctttctcttttcaaaaactttacttattttcactccctgactccagttggtgctatcattatgcactggggcatgggaaacacacacacacacacacacacacacacacacacacacacacacatctcaaagaaaagtgactctccctcctcctgcagctatcagctatccatagctcttagctagctaggactgaggcctgcagagcctctctcccctccctgctggcattgtaaaggaacgtgatcttgtgtgggtcttaggcaggtaaagctactgtgtgctcatgttggacctagaagacagcatgtcacagccctgctccagcatgtcacaaccctgctccagtatatcacagccctgctccagcatgtcacagccatgttccagcttgtctcagccctgctcctgcatgacacagctctgctcctgtcctctgtatctttgcctagagtcctctagaactataaatgttacccagcagggacagtttcttggtcatttcaagaatttctccatttttttttacaaccaaattgtgtggtgtcgtaaagaataaggtcttagcattcagttatggtaggcaaccaagaacaacgtcaatagcccatactgttttgtatgcgttggggacctccctaaccaataacttgtggaagggtatcccatgcacggcactgtgattttcattttatcactgttgtggatgggcctggtgttgtttgtatgttgatgctaattctactctcctgggaggggctgcagacgaggagtgagtcatactcaggtgacttcttgtgaaccaaccccctaaatggttaaatgattaaaggattaaggactaaaggagccagtcactgggagagtaggcgggacttctgggttgtagaggggaagagaggaagcaggaaagagtcaggtccttttgtatggggatcacgtgaggacaggatgtaattgcgagtgtctcccagtttcaatggcggatccatcaggatttcaccactggaggatttagatttaataaggattaaattaggattttagttgttgtgtcagcaattgtttctgaactaagtttgtgctgcattttctttcatgcatcggctcttctgggttcaagagagaaaggtaaggtggcaaagtgcgggtttgcctgatgtgcaccacaaaggaagctcgggctgtcatggtagccacccaacagtggaaacctagtgagctgagtggagacgtttcaggagctccaggccaaagagtctctatgagataagaacagcccagccagaccgccaaggcagagagttgctggctcaagggtgggaacttgtcattcttttttaatatttctcacacaaatcacccatgtcttcttagattagttagcatcgttcactaatgtggtatatgtctatccaatttcatttttttctattagctcatgaactagtgttgtttcatgaggcttttccatactcccttagttttggttactccaccctttactctctccctcttctactgccatctccatctctatccccagttaaaccattacttcccagcatacaccctctgttctttcacatcacgtgcgtaccgtctcctctaatcatattcttggattgaatacagtatgttcctaagcagcccttccatgcacacacttcattgtggttaaggactcctttaactcttcttttccctcttcccatcacaccactaccttcctgaccattttggtcaccagccagtgttctcttctctactttaattttagttgtgttatactattcctactgtatcccaacacacacacacacacacaccaatgatctgtttctagtctcccagattccatgtgtactccacagaaaaaacaaacaaacaaaaatattggaagctagggccctcatatggacatatggtgtttatcttttgtagccttggtaatctcacacagtataattttgttcagttccatccatccatttgactgcaaattctatcattttatattctttatgcctgggttaatacttcattatatatgaactgcattttcataatccattctttagataatgaacatctgactcaattccacttcctagctactgtggatggactggcattaaacacggatgtgcacgtaggatagtttctttcagtggctactattgacccacagttggtcagacccatggacaccattcctgatgatccaaagggctagtttataaattgacttgctaataatgagcatgttaataatcatgatattttaagaacaatttcctcttcctttataatgatttgggcagtgttcaaaggtgtgctttgacagtagtaacacttaccttgaatttgcatagctgtggagcaaggtcacccaaatgaccccatttaataccaaatcctgtgagaaatgctcaggtctcttttcttttctctgagaagaaattgttaactgcacaagtctatgtgtcttgttgacattttagagaagtaatggacattgactacaaattgagtcttccactccactcatgttatccaaaatatttattctacagcatcttctttaaaagtggaaatattacagtagaaactagtgagagagagagagagagagagagagagagagagagagagagagagaggagggactctatacgtagctgtaccttagctcatagctagctagacacacatgaaatgcatatttaaaggaagttgggagtgtttgctcaaatgcttgtgttcttttctttcttatgtactgttgtacttctcagttttataaagtagaaagtttgactgaactgaggctccagaaatatcagataaaaataaggaaagatgctgctaagagcacacccaagtgttacttctaatgtgatacaactgacatttggtgcaaatttagatcatgtacatttaaaattatataacagaaattattaaataatgtagtaaaactgtatacagttaaagatctatgctttcttttttttaaaacaaataaatgtataaaacagaatttcaaagttatcaatgcgagtgaatacaaattgtaatgctgtccctgagcacggttaagaactattttatcttttatgtgataataatatgttcggtgctgcatatatagagaatggctgacaatctctcggtagttattttgttgcgttagcaccattatagttacatgtagccttcttacattctaaagcagtttttatccttacatcaactcacaatattagcctgaaaacaatacccaaaataatttggcacaaagacttgatgtgctaaaacaatctaaagaaagtcaaaacactgccataaaacactaaacagagacactctcagcaagagcaagccattctaaacctaagaaacaaaagcaggagaaagaaggagagagaacatagagggcaaggcaaagaatgggtggaagagagagatccagggatgaggagtggaggaggggaggggaggggaggggagggaagaagaaggggggggaactgccaagatagatggagaaatctgttctctttaagggtagccctctgggggaaattagcctaacattattctaatgataaaaacatttagggccagatcactcacataaactaggggcctccttttgaaaggtttgcgtgtaggtgcagctcattggagggttcacccaaggaagatcttgcctcatggggctcctggttgaaaggaagcttagacaccatctgctcagaccaacttgcaatccaaacatagaagcctctcggaaaatgttctggtgcctccctgtctcctggccagtaagcctttgacttcacagaatgttttcatgttcataatctcacctaatcttctagataattctgtgcagatataacgagaaaaataaaaccctacattaactgttcagaaacacagaaccaattaaactagctgacataatttaacactgcgttttagtttttatttagtattgattttccgtgaactaatttcacatcaccatctaaaatatcaacttcccttaatgttctattttaaacttaaactcttaataaataggtgagtatgtccaaagtgtggacgtcatactaacacatcatgggagcctacaatctatcatgttgcctctccttacagaacacagcattctaaatcccctgcctgtgttgtggagaagagaccctaaaagacgcagtcagcaaatggcccttgagatgcaacagctcagctcttgccactcactaaccacaccctcaccatgaggagaggggtcaggagagaggaaagttcactgtataaacatgaggacctgagttccatccccagcaaccaagttgtgcctgttagcatcagtcctgatggcagggccagagacaagaggattgctggggtttcaagacagacagccctgtctgaaactatgagttccaggttcagtcagagattctgtctcaagaacgtagggcagagagcaataaagcaagacagcaacagtctcctacacagtctacacatcaaacacacacacacacacacacgcacgcacgcacgcatgcacgcgcaccacaacagaaaaaaaaagtgggagagaaggaaaagatggaagaaaagggagagggaaaattattcttgtattgaaatactctaaaatcaggttcttaaagcacagcatttgcctagctgaatgtgacactgagccctggctaacctacatagcaagagctgaaggccctccccgcaggaattctctggggcaaccaatctaagctgacttagtgctgtttgcattctatgtgtgtttttcaaagcaaaaaatagatttcatctgatggtttttctttgaaattccaatagcattcacttctatataaatgtcagtgctaaaaattgttagccatggcatatgaagtccctctgagacttcactatcatgtccccatcttctagagaagcagatggagttggtgcgtgcattttacaccgaagagtgtctaacgcctggttccaagtgcacaagtacgttctccttcctttaatcctgcctcagcagcttcatcctggctgtttcctttatcagcaacatacagattataagtagccatgtgctaattttgtaagataaccatatatcttccttccaaggacaagatcagacagctgggacaagaggataggaactggttcatcacacagaccactagttccattaaagttgtcacatgatgagagaaaatgtgaaaatgcagcaggataagaaggaaggggggaacgaggaagatgaaatgagaaagaagcaggggaagggggactgaacagctgtagtgataacagttttccagctaccggacactttagactcgccataggccttgaatgcgtggctacacttacgcttccgtgggtgagcacatattgactcttccggaagaagcattattgctgtagagccaagtcctctcaaaactctgagtgactcaactcagtgatctcaaatattgatcatgagatcttgacaaacgggcatctatccacacaattctaaaagctttgagctaaaagaaaatccacagggggcatgtctaaggtgaattacttagacaataaaagaaatacctttctttagagaccagtgaacacaagcttgggacacagaaggaagtttcttgagactataaaactgttattcgaaatatgtggcttcagcagtggataaagggtttgtgtttgcataattgtattttgtcctgtccatccttcatagattacagtctggtttcaagaatggcatgccctatgtttaatttgcactataatttaatttatgctcccaaaatgaatgttccatgatagttccctgagtcatggtagttcccagagagacagatcatcttgtaaaagacaaattctactttgttatgtgataattgtaaaatatcccagacaccattctgtcttagttggggtttctattcctgcacaaacatcatgacctagaagcaagctggggaggaaagggtttattcagcttacacttccatactgctgttcatcaccaaggaagtcaggactggaactcaagcaagtcagaaagcaggagctgatgcagaggccgtggagggatgttcattactggcttgcttcactagcttgctttcttatagaacccaagactaccagcccagagatggtcccacccacaaggggcccttcccccttgatcactaattgagaaaatgccttacagctggatctcatggaggcatttcttcaactgaagctcctttctctgtgataactccagctgtgtcaagttgacacaaaaccagccagtacaccattcctatatgtattctgtgtgcagtggcacatcacaggttcacactcatctaggtcagggctgtccatatgatactcaccataaagctgttccttaagtgttcagtagtcacagatgtctggtcacacagtagctgtcagccttgctgtgggcaaacatcttctgatctgtaaagaccccccatgaaaaggggagaaaaagagagaaggccctctgtcctctcttacttatgatgggagaatttaagactcaggaggcaagaaagagggcagtaccccagttcatttcctctgggtcactccagcccctgcaccttcatggggtttccacactagaaagaaaggaatgcatgtggagggccaggatcctttctagctactacccgtggctaacccctgtaaaatgaagctttcgcggatctccagagtcacctcattcctatttccacctccccagagatctgtcaacaccacaaccatcagcatgaggcttcctttcccttcagactcaaaacacacactttcttttgagcttctccctatctaaagttctctgagtcaaaatcccaggccctttccatgagttcccatagagcctctgcctttaacctaaacactcaactcgggcttctcctgcagcccacatcctgggaacctgcttgctaactagattccacattgactgtctggtggtttcagcacacactcttgggcagattcctcgcaaatctctggcctgtcaggtcagcaatatgcatatatgtttggctccttggacatgtgcctgggcatctgcttcttatatcaaacgacaaagaggaggatgaacaaaccctataggagccacgcttctacctataagccaagtcctgggactggaacagtctctatggagatttggggaatctgtcaggatcaggcctgactgggtatcaaataatcataataagatcagctttaccatgaacaggaccagacgctaaagcactgtgcgtagagccttgcttgcctactttctgatgacacgtaagagtgcgccttgctcttatgaaataaatgattacagaaatgttgaagttggagctgaatcacataggaagcaaggtttgaaaatgagttctcactacacacacatgccagaagggctatgcaataatatttgtattttgggaaagactaaaaaaagagtgctttttatagttgtctattacagtctcgtcttttctaacaaaacttttgttaattattcattcttaagctttgaactgctacttataatcagtatagctgaaataattacatttagcacaaaacacccaaattggggtaaaagccatctccttcaggaaatagaatgggaggagagaccatgccttaatactgctaaatgtatttacttagaaaagaggaaacagggggcggggagagagtgggagctttgtggcgtggggagcagatactgatacaattataaacgtggaaacatatttcaaacttcaacttatcaactccctgcttccatttttctcattgctttcaaatcaaaaacacctacaagtcttcaaatagggaatgagaacttgaggggctggctgggagtgtgcacgtatgtgcatatgaaggccaagagtcaacctcaggtgtccttcttcagctgtcagtcatcttgcttactgagacaaggtttctcataggcctggtgatccccagagatcaccagtctttgcctctgccatgctggaatttgaaacaggttactacatccagtttgcttgtttatttgttttttaatgcaggttatgagcattgaactggggtttttatggttgcatgataagcaatttaccgactgagttgtttctgcagcctggaaggggaactcttgtcctttgacctttccatgtggtggaggccaggcacaagctgctgctccatcatacaccctgcttgctcttcatttcctcacagcgttccctgagcttggagtcaggatggaggctggaaatattggtccagctctcaaatctccacccagttcatgttctgcaaaacccttccagccttcacaattcagtgctttcatttgtctcagagttgtcacaatcccaaacgcacaatgttttgtgattaaatgaggtaatgtatgcaaaatgcccagtgcattttgtagggcctcctcacatagcagctgttgtttcttcctgtgattgggggccattagctctgttggggcagtattcgcctctgtcacaggccagccttttggggggcattgagaagatctagagcatgcagaaagtgcacactgttctaaaacccaagcaggtggctcagcaagaaaagtctcgctcctcttccagagctcacgatctgacttccaatcaatgcgggtatgtctgagcctttgagaacaccaagaaacgaggatgatcttcctcgctcatctcaataggccaggccccagcttcttccccagctacaggagcagctgtggccctgacctggcccaactctaccagcaacgttctctcctcagccctcccagtcccctctgagtttaccctacagtctatgtgtgcaccatttccatgtccctgtgaggaccaaggctctactccaccagtgatgccctgacttatgggatgtgctcacacagaagccccagagctcccaacagagggagcaaccaatccatgccttcgattacaagtaccagtagaaacccaaaggcctgaaagagggggtgagagcaagcggggctacaggtctgcagactctactttcaggaaatctggtggaagggaatcaatcacactactagagctggtgttctagtagacacacttgctatttaccagcagtgagattctcagtgagagagctcagtgctttccgcgtctgtgtaaatgagaggcagatgttagcattattatgatggttcactaagatgatagattccagacaagtgtcagtactaccatcttgaaacgtcaaatgcattgctccttgtgttaatttgccctctgtgtggcaaagtccccgagggagtaaacttatacttaggaaaggttaaatccctgacgagttgatccattgtttgggtgcctgctgtgacatgaatcgtggtggaatctatggaagagggaactgctcacttgatagtggccaggaagcaaaaggggccaaggtctcaatgtctctacctgaaactcacctctggagggctttctcccactttgacctatcttttaaagttgttccacctcttggcaactctacggcctgggaaccaagcctttgacccatgtctctttgtgaaacattccaaattgaaaccacagtacagcattgcaatggctgctctgaattctaccgtcatggcaggggtcagagtgagagaggcactcacaactctcttgagatgcttctaccagctgtgctgtggtgattaccatcatcccacatctggctgcccattaaaaccattgaagaacttttaaaacatcctgaagatacattatattccacagttctcaggccctctgtaaagcaagtataaacatcaaatatttttaaaataattctagtgtgtagccaagcatgagaaccattaaaataacgacatctgtgctttgtagagtaaggtgtttctaagaccctgggtcctcctaagcacatagaaaccagctcatacttgacttctgtaagtggctagttaaaatggaactgaagtttagcatattttgagcaggtgacaaggtcttggatcagctgtcttgagttctccctctatgatagtctgcacaagtttagccagtcatcagcatctgtcccataaacgtcttctttgtgtgctgctttggtagtgctccaaactgctccctgttggttgctgctcagttcatgaaacactgtgtcctgaaattttaatatgaaagtcaactgtttcaccaaactatagttcccattggctgtgtgaggagggctacgcctcttctggggtgtctataatcttctgttcagagcttctggcttcctgcacgtaggcacatcctagttccctgagctagatatgatcccaaggtgcctgtatttccactggacttcttggagacaggagcataatttgctcatcttggtaactctgtgggcagtggtggataatgatgatgcccatgacagcagccaacatctttaagctctaataccatgtgcgtagtattgggttagctgctgaaagaacaaccttctcaatttaattctcatgacaatgccaccaactggtcatctcttcttatgcctaaacacactgagccactaaatagttataaaacttgcttaaagatatatgaatagtctgactacagaggtcacactcactgtcattgaatggaccttataaacaacggtaatgccagcaatagcatcacagttcaccaagagctctctcttccagcagctgtggtggtttcatcccctactctcttcattcttaccctcaaggctcctggaaaacaggctctgttattggtcccattattattaccccttacaaagaaatcgaaacttagtaacaagttaagtaactccaaatgtggtcattgaggatgaggtctgtcaggtgtgtggctcgtaattgctaagcagtaaggcatcggttaatggagcgctgagcaaatagtgagcgaagaagtggatgatgttctcgtgttgtcctctatccacgcccttcttaccaacattctcagccagcaccgctggtttataagaagcttaactcccctcataggtcaaaggaaacaaaaatagcattgtacaagttctatttaagggaggaagaaggaaaatcaacatgaaggaaatgagtctctgcaaactcccagatttggagctgaagccaatttgttagtttgcaaatgcaaatgctgtctccactttttactactctgttttatgcctttaaaattcaaacaggaggcttaacatctgctcagtgtattaaaaagtcaggagggctgcaaacaccaagccggagactgcttctggttgctaggcaacaagtcttcccgctttccagacatcctggcaaaatcacctggtcttcagcactgagaagtgttgaattgagcattcagacataggctacaagtgttgcaactgaaccacaaaagaaggaagcatgcctttccagggcttggcctgaggattaagagctgctggtagaaactgctttttatctatggcacctcagaaagtctgcagcccgcaatacaaatcccagaaaggaatttgacatggaatcctagctgtttcacctgtaaacacggtcaaaactttctccttctgcaattctgatagggatggaacaagacatatgtggggctgcttgaatgagaactggaaaagaaaccccgaattctatacatgaaccagggaaccctagattccatgcatgaacaggagaagattgtgtttaattttgtacaagttttctgaagctagctaacagtgcagggcaatagcataaattggggtaacccaaaatggttactctacaaatgggtgtttgtatagcaaaagtttctaacacaaccaccagcaaggacaatttctgagacagatatatatatatatgaatgttttaaaatattatgctgttcatttggttaagttcaataacttcaaataaactatcagaattgcaggttagaagttcaacatattctaaatagaaattaaaatctgacacattgatgttaatccaaacagctctggtcttgcttgccctctcccgggctttcttttgcattgcttatttaagcggctccatatataccttgtttatctccatcacaattccagaagcaaaaagttttgaccacttttattagtaaagcaactggaatcccatgtcaaaatcctttctggaattccaattgggtgctacagactttttgaggtgcccgggaacatttcctttagagcgtccctggagctctgctcttgtccctgacacaatcccggagctactcacttccaagctgggaggtgaaccaggattgtgagagacgatggagaaaaccttactggagggcactctttgcgggtacctagaagaggcctgagatgcagaacacttgtcagctagaggaaatcagaggcctagagacaaggttgctatcaatggcttccttctggtgtgtgtgtgtgtgtgtgtgtgtgtgtgtgtgtgtgtgtgtgtatgtgtgtgtgtgtacaggaagcaaagcttggagatgtttcagttaagtttattttaccagtacttccctttataatgtcagcattagaattcagtctcctagtttgagatcttctccttctgctgtttcctctgtcacacccatcatgaattcattcatctttctgacccacatttaaatgtgcactgaaggctcgcttctggatgtctgagcagctggagatgcagtgatgagctgggaggacatggtcctgtcctcatgcggatgttgtcaatagggtaccaatcaaacatccgtaacattccagaactatgtgacttgcttcctaccttgtgtttgctaactttatgttgcactcaacaatcactactgtcacagaagtcgaaactgcgagtccctgggagatgataatcggtgactccatgacgattgtcaacggggagtcggaattcaaagtaagggcctgtgagatagctcagtggataaatcccttgccatgcaagcctgatgacccgaatccaatccttggaacccaaagaaaggtggaaggagagaactgattccacaaagctgacctctggcttccatgtgtgccatgatacaggtgctcacagataccccctcccccgcacacgcacacacaaaaataaataaatacggacatttttttttttaaattaattgcaaacccagttcatgaagaatgcaacactttgccaccatgttatcctgtctctattttcatcgtgaagctaaattaccatagagcaaataaaagccataataccaaggctggcatttggtacttatttctgttccattgtcctacacagacagaaactaagtaatcttgggttccctacacttccacctcgtccaaagctccacggtcttgacaccagattgccctgctactggccttgccctactggccctgcaggacagctgggcactaactctctaagaaccgagaagaaagacctatgatattccagcagagatatgggtcctcgtgctgccgattgccacaaacccaatgagcagaaacagacggaactccaggtgcactctatgcaatctgagtagacagcaggataatactgcacagtgcattacagctcattcccagccagcaggctggggcgtagagcttgggggaatggaggcaaaggcagtcagtcactccagagcttagtctcttccctctgctcttgtggtcagctatgtttctgagatttacgtgtctgtgcctctcttgtggccatccctgcactatttcctcattctatggatgtctgggctcaggtgcttctcacagtactgagtctagttagcatttatctatatccaccttgtattctctgggggcatccaggctgggcacagattaacacaaaacaaacaaatcactaacatgtactaagccagtaagaatatgtgtgtgcactttcttctatacaatatgaagtataaatgtatgtgtgtcacacatgtgtgcaagtctacccttactcatccctcccagcccttatcgaagtatacaatctcagatacaagtggaattccagcttagctttatctggggtttaaaggcatttcgaagccagagaggctccttcctcgatgccattggtccctccaaagagcaggagaaccctgaatcttaggaaatgtgcagaatgttcacctagaacccaagggatccaggcatcactgctgttatctatggcctgaagaaatgaggctgggacaaacttttacttaactctccatttactagaaatattctatcggatctagttcaagttagaaaaccctgactcagcataattgtgctctgtttgagccaattatctgtccaagttttacttccccatctctaaaatgagaagtgtaaactccgtgtggttatagacatgacagaaaattaattgtacactctcaggtgacaccaagcaactctggctttcctcaattccaaccgttctccatcagataagatgtctacttatgttcctgaaacttacacaaaatctgatcttctttctccctggatgttgtagctataatcttactaccttgccacttaagttttaaatatgtccacctcaagggaagtcatactgtatatgaacatgtatgtaggaacatgccttaaggaaattcacttctttgtatgctagcctaaaaaagtgaattttaaaactgatttcaccttagctactaatactagcatactattctatgtgcaccagagattcgtagtgcatctgctgaattcttgtctcttcttctcaagacatggcagtgagattaacatcttaagggaactaaccacctagatgctataatttagagatgttgtgtgtaaagggtgcaatttggaactgattcaaatttgtagtgttttggtctgggagatggctcagcaattgagaacaactgcttctcttgcagaacaccaggttcagttcccagcaccaagatggcagctcataaccgtccaaaactccaatttcaggggacccgatgccttcttttggccttctcccatagcatgcttacatacatgcaggcaaaaaactcatatacataaaatttaaaaagattttttaatcatatattttgtatacctacctcatgatagcagtgaatattgttccattagtagtatatgtcctctagaaggaaaccaagaaacaatagccagtgtgaagataacatgactcaattcatcagatgttgccaggtgacactggatggtctgggtgcttaagacaagcaaaaggcaggcaggaatgttgctcttctggcacttagtctagtggagaaacaccaggagtgacaggtgacatttatgacacacatacagcaccagacgttgggacaaatgctgttttcttaagaaccccggagcagctgatttcattcactccgtcttacagaagggaacctaaccccaaagaggctatacctgcctatcttcacaaaaggaataaacaccaaagccagaacaggccaaccccagagactgttgcttcaaccacagtacaaaggtactttgtatgcaaggtggggtttccagcatgtgttgtgttgttcagagagatttgactaaacatttagcctgttttccacagcacacttgtgacctggagtaccagagagtagacttcttcccttggagctaaaacgggaagagtgaaacgaaaggccagcacatggctctggaatgggacacagaatctactttgtctttagaatttgtctcactttacatagtaaacactgaatttaagggaaagtgaggtggaagttgcatgcatttttctggggtagccatgaacaagtgtctcctcactccagatagggaaccagcaacagactaaaggaattattctagccaagtccagtttgagggaccagtgaatttattgggcttacttacatgagaatacatggctcaaagaggaattgcttccaggactgtaagggtcgcccttcaaagacagccctaaagagtctcactggaccaagaatgataacttccctataactatagttaaccacctagattcaggaggctagtgctccctgagcccacaagttgcaggaacaagaacacaaacaactggaagaaagtacaggaggaatggctggaataccaggtgagagtctaatggtcctccccacaccttcctatatgggaatgtcaacacactcagcattgcgggtgtctcaagggtagtcacaactgtgtgaatttagacagtgataactgctgtgctaagaggacagtgttccccatagggtgagtgatcttaaacattctctgtgtccttgtacaatcaagatggtggctgacatgaggcctcacagaacgccagtgactggcacgtgatggtcactgcaaacacatcgatttcactctgcattgggttattgtcctctcacatcctatgtggacagacacacagagtatctgcatccagatcccccaagtatctaaagacacagtactctcagtcatcagaacagctctgtgaggtcggtccacgtagaccccctaatggccatacaggtgctgaatctatgtaatgctcaagtctctcccactctttagagattctgtccaagagctctagaaacccaaccacagctataagctatcccatccacagagccacatgcagttggaattaacatacaaggaactatagtgctttgccgctgccctctgtcacccattctgcagttccaaggctctctgagatcctactactccacctggtgaaccatgctgtggtactttcaggctaaactgtctctagatgatacctttaggggtactctgagaatgactgagtgtataaaattgcagccctttgaggacgcttgtactgcagtgcacctgtcacaccccagaatgtacaggtgtctcagcatgaccctgtggaggaggcatgtgcctgagccggttcattaaagtctgcttactttttaagtaacaataaaattcctcatcatacatgaaatcttgaattattctggttaaacttaaggtctcactacaccatttttctcttgtccatgagaaatgaggtccttccaaaaatagctactagccagaaaaacctttgatattaattttccaaagaaaagattcatggttttggttaaattgcttttcccttccttcaatcacagaaacagacaaagaagcaagcagggggaggggtggggggacaggagggcaggaggcaggaatggggggcagagggcaggaggtgcgggtgggggcaggggtgagggcagggggcaggaagcaggggtgagggcaggaggcggggtcgggggaagggggtaagaggcaggggtggaggcagggagcaggaggcagggagcaggaggcaggagtgggggggcggggggcaggaggcagaggtggagggtagagggcaggaggcaggggtggagggcagagggcaggaggcaggggtggagggcaggggtgggggcaggggtaggtgtgggatgttcccctctcctcactgcccctgctcatggtttacattttctttccatctttactcaatttattcaaccagcaaatataccttcaaacctcccacccattcattcagtcttgtaacctaaacaacagtccttgccctagagacagtcacagaaggacagacaacaaagcagacacattgcctgggcttcagagtgtgggcatagccaggcatggtgtagagagaaaaaaaaaacctcttttccctaagtcacctggggactcctccaagggagtgcctttaacctaggtcttgaaggcatgtgagcatgtgaccagtcaaaactggggaggacatctgggaagaggaaagaggggcatatgctagggacagaaaaagcactctgtggtttgttagctacagagccaatgagaggaggcagcccagccatgttaccagggccagggtactgttgcaacagaaatgtttgaggttgaataggcttgtaaatagtaacctatggccaagctgttttgccccactgtggacttcaccacaacagtgaccttggcaatcacagctggagtgctcctttgtctagaaaaggcatggctagtgtttcaaaactctgggtccctcactgagttgtgtgtcagccctggtggtcaaagagcacagaagagacaagcagatgctggcccccttttcagaggtaaattacagaggggttttgaagatagcagcctactttcccatgcgagggcttcaaaagagggaaagagtttggggctgatttgaatagcagcttgcgttccccagagctttgtgctgtgctaagcaaagtggctgattgttgcctcgtgtttttcagaaacagctgtctgtctccttttagagctctattctagggggattgcaagaaccacgggagagtttaactcttaaacactcagctccgttcatgtgaactggggatgtatgaagagttgatactgctctgcctgtctgcctgtccgaatgcatacatggattgtctacttgtctgtctgcctgtctgttggcctgcctgtttggctgcctatctgcctgtctgcctagctataggctgcctgcttactgccctgtcaggctataggtctgtctgtgtgtcttgtcatgctgatgattgagacagattctaaaagctgtgtcctgcggatccacacagaggtttcatgggtgttgctccttaatgtccatgttttccgcaccgtgatggattttccagtgttcctgagcagtaatgatccagcacttatatcaagtagggacaggtagggcctctcactgggctgctttcctgtcctctgcatattaatataaatctagaagccatactgagctgctctggttagatttattctctatacccagttgagacctgtgccttttccatgggtgattatttattaatgtttaattaaataatgattaatttttaaatgctaggtgcttctggcatatttagatgccacgcatgtttagttgatagtctggtcttctgctaccagcagctcaagttacaacttccctttcacagaatgtgacagctatacagagcagactgatacctgaggttcctgggaacagtggctcagtttttcagaatcttggtgatctaagatctgtggtggtctgtgactccgattgtccctaggataagctgccaggatatccccattttctcctgtgtcatcaatcctttccctagttggggagggagtgtccttacctaccgtcatccatccctacctgagtccacacatctcatttaacaaagaacgatttatccaactgtcagtggtccttctggattagcaatgggctgcttcatcccagtgtctgagtcaggtttctctagggatcagaagaaacagaataaatatatattaataggggagttattaagttggcttatataacatggcctgggtggtccaacaatagctgtcttcacaatagagaggctgaggatctggtacccactagatccacaaggctggctgtccccagtcagtcaatcttatgccaaagatctggaggattcttagagagccattcatctctagtccacatgtgacggtcaatgaagctaaattctgatgtcatggacgccatggtgattgttggcagcagcaatggcagtgaggatatcagagtcgatgaacttgtgacatcttagagatgtcacccagggatgaccctagatcctgtccatttggcaattaccattaaccatcacatcaagagatagaagaaagctgccagcaggtagatcctacatcttagctgaatttctgaactctcttccacttattatttttgacgtctcagtgccaaaggttttcacagcactgacactatcaaaggtttgctactgactctctccacgttggagctttgcctgaggaggactctggactgatatgtcaaggacttactagctatccacgtgttgtctgtcacagccttaagctatagttttcattttgcagctagaattacaaaaataaagaaataagacatatatttattccagtaatcagaacagtagatacacattcccactgttacaatacagtgaatacaatagtttgaactattttataaattgcaaagactaaagttattgaaaacaaaacaacgaaatgattttatgagttaaatatcatgccctctccccctttgattactaagaaactgaatttcaagaaaggcaatgctcatgaaaatacagggcttattataggcacagccagacctacagcctacactccttaccaccacaatgccttggaatatcttggggacagggggttcccatgcatttatacagtggtcactttgaaggttctagagcatctgagctagatggtatctgaccccaggacagactgggaaacatgttcatgagcatcacctctcccaggatatggttcacttaagaaaacggcttcgtatccatacacaacataatcagccctccctttaggtgccgccttacaaacataaagcattgtttagggtaataaatcaaaaggccagcatgcccggcttgtgctgatgttttctttggacaaattttgatagcattaagaaagtatgagctattcaagttccaggatttccatgacaacaaaaggacatcaaacacgtttatgggggtggggattccgtgggtgcacatgtttatgatataggtctcaacaccacaatgtttctaggtttaaatgaaagatctaaaagaagcagctagtgttctcatgttatgatgcttggcttcatttgtcctgaggtccatttggatcggggatttgtgaccaacactacctggccatgttgttgaacctgcctctaatcccctcaggtcccacccaggactgctcttgtgcctttatttatcccccaagctgacattgtcacaaggttttcctgtccatccaagtaatggtgaagctaagtgcagctacaattcaggctctctaccttagcacggacaccaaaagatcaaaaccctcccaccctgactcctcaccccaatagcagggagcaactgaagcccagtgcttcctctgcccacatcaagcaacacaactaattttatacctgcaattaaaacagcatcaggaaaccatcttgtcagtcaacacagtaatgtgttttgtggcctcttggggcttgcaaagcccacattatgagcttctttggtgagcatctgtacacctacttcacagtctgccatctattatgagagaatacttaggtgtatgatagccccagggtcaccgaggagcaccaagcagattactgatgggtacttccctcaagaaacaaagggagagccagttccgatgtcttctccttacaaaagactctttgtcctgatggctgctgagatttttaaagtgagcagagctatggaagcctggcctctgaacatgatgtggctgttgcacacattaactcacagctggtgtgtttacctgcacaagttcaaaccagttaggaaccccagcatggaggacagaggagattctgatgccctgcccctagctgaggagctaatgataactgatagatgtggaggcaggaagtcacttttctttgcatggaggtggtcacaggtatgctgcccaggttccaatgggtgaccccacccacatgagcgtatgggaaggacttactgggtttggtggattgtaaaagtacaaatgagacatgaagttgagagactctgcttcaaccaatatgataaagagggacagggagactcaatgctaaacacacacacacacacacacacacacacctacaggcatgtatatgtatgcacacatacacatctcaacgtgcatatatgcatacaccacacatacacaaatacacacactctgaccaagtgcatgagattctatctatctctacatctgtctaattttccccttcaagaaagtcacctttttgtttcagagttaagtagaatgggctcatttgctttgccttaccctagaaatggaagatctgagttaaagccggtgagggcactggatgatttcatctctgaggcaaatgagttcatctgatagggccttgctttccagatctgaggccagagacgttgtagattatctgagatttgaactggactacactgggccactgcttatggccatgtgctaagctggaatgatacaggggctgagagtaatattttgggttcagtgcacgatgctgcctcttctgggggattcttggtgaggtgctgcagtatatgacagtctgttatttccctctctcctcttccctatttaattacctatccaaatatgtggccttactgacactatagaaagacaagtctctggctcaataaattcaagttgagcatttgaggtcctgggtgtaatgggagctattcctccatgggaccaggcaaatctctgagtgttgataaggtaggatttaatgaggactgtagatggtcactaagctgagatagtctcacattctccaggccagccctgtgactcctcctggacatcagcaccctggttttagactggattaggatcatttaaggagcacagcatcttacagctcagcagcatcttgtattttcagtacttgacttgcacctgccctgacgtttcctgaagcttgccctttcttctcccttcaccacatccatcggccctgggatggcaggcattcctgcaagcagaccagtcacaggctacctagccctgtgccacgaggcaggcagtcgcaggaactgtgaacatccccagtcactcagtttcagtgttctcttcagcattcagggacatcacacttgaccttgatctccagggactaggaaggagggaactggctgcataatgcttggatggcagctggccggactgcacttgggttgtcagccactgaggagtgatcaaccatcagctcagagggcagaggcggtactctgcctccccggctccctccccgcatttgaactcccttcctctcagactttctccttacaaaacctgacactgctgtgctcatgagcaaacgagttcatgatgtttatatttcttctagtttgacataaaagtcatgatcacaaattagagacagtagattagtcgatttctcttactccaaatccaaatattccacttttcctccctctcatttaaaaggaaattattgagttggctaggtagcttggagccacctcaataattaataaagccgccataatggcgcttttctggagccttgtgagctgagctgcatccccaggaccaacctggtgaaaagaaagtagcaatccccaaatgctgctctctgacctcacattcatattatgccacatatatgtgcattcgtgtgtgtgtgtgtgtgtgtgtgtgtgtgtgtgtgtgtgtgtgtgtgtgtgcatgtgtgtgtatataccagtatagccgaattacggtactccgtcaaatctactaatttctatctttgttatagaatcatcccctacctggagccttgaataaccctgccctctactcatgccttttctaaaatgctacataaaagaattccagaggtcacctccaacctcgtccctacctgtggcttatcccagtgagcatgatggacttgcattcattcatgctgaatgaccagtttctgccttttgctactgagtagcgccttacaatagtgacctatccttccttgcatttgggtaggtttaattatagtactacaaataatcttctatagtcatccgtgtttacacttctttggaactttgagttttactctcctgaataaaaggcccaggtataatcgttgagtcgttaagtaagtgtatgcttggttctgtgagaacctgctctacaatgctgtttttatattccttcctgactcagggggatctcatccaacctgctaaactaggtggccatcaaagcccttgtgcctgcctgcctctgtccgtgttgctggaaccaaagctgctcaccactatgcactgtttcttgtgtggctactggagatctgaactcagttcctcaagtgtgtgcaccaagccctttacccactgaggcatatctccggctccttatcttggctttaattcacatttcccatgtggctgatgatttgatcgtgtgttctgtgctaattctgcatcactagtgaaaaggcttgcacgttttaaaaatcagattgttcgagttcttacttttgatattttggactgtcacaaactctggatatgagttctttgccacctgtgacttacaaacgttttccttccattcagagctgcttcaggttccttctcacgtgaactgtacattgtgagtgcatcattctaggaactttgcccgagtcctgtgcttttcctaagagtttcaccatgtccatctattctagtcactcgtgtcctggaggaggaggcaagattacagttcttcatttgcatggaattgtttcagcacctttgttgaaagaaaaacatcctctcttcactgaattttctttctacttttatgaaaagaaatcagttggtcattgttatgaaatgccccagcctctcctgttgaagttagcattaatccatggcttagttcatagctgaccgggctttcagaatgggctcagttgcagcaagcgcatccctcctatcatgcctttgaagggcagatcttgtctggacccttccctctcagtctttgcctcctggatagcgagctaagcacccgtcccacccaccgcaggctcctccacaccttgaggaatcaggaacctcagccttgactttggcctgtagcagtgcagccagacactgactgaaactgtgagtcaccacaagccttgcttcttttaaaccgctttgctcagggacgttggcacagatccagaaagcagcgtaacctggctctcgttatgaagaggttctgaatttggcacttttgtctgtgtgtctgatcctcaccaataccacccagatttgatcccccgaccctcatggtaagactgaaaacagaaatgtcatttctctggctttattatctgtttcaaaactgcttcagatcttcttcggctttctacataatattcagagatgcgttgtctgtattcaaaacattctgccagaattcttatggtgatagaaaaagcctgcatatcagtttgggagtaatcaacatgtttattataataggtatcagtctatgaatgtctttattttgtttttcagtgttccatggtttttaacatataaataggtacatattatttttgacattatttttagcaactaaagtagttggaggactttttttcctggactcttacaaacatatgagttggctttaattctattatggtcagaaaacatactttgtattatttcaggtgtttttcaacttgttaaacattgttttggtccaaaatacggtccattgtgatgtatttgccacatgtgcttaaaaagaataatttcctgtgcaatgactggacaggtctctgtgctaattctagactgaccaaggtggtgtgtggcattgcttagaacttctgcatctttactgattttgtacctatagtttctttaggttgttgataggaaaatgaggaatttccaactacaattagaaatgtgtctgtttccttttattacacttatcttgagtgtgtctagatgcacacatgcctgggtaagtgtgtggaggatgtcagctctctccttccacagtgtgggacccagaaagtaaccttaggtcctctagcagggcagcaggcatctatctggaccactgagccatcatctcagcagtcctggatgggtctgcagcatgtttaagttatatcagggctttgttttgtgtattttcaaagttgttaggtgcatacacgtggaaatctattactcgtttttactgaattgaccttttatcatgaaatgaacctttcctaagccctgataattgatcctgtcacacattaatgtagctaccccagagctctctcaattaggatttgcatgacaaggcacttccatacttccttagcttttactacctgcattattttgtctgaagttttttttttcttttcttattatatttagtttttagatgtgaggtgtgtacgtgcatatttgtatgtgtgtgagtatgcatgtatacttgtatgtataagcatgtgtacacatgtgtgtgtaatagtgtgtgcgtgccatggcaggcacatgtaggtcagctgacaatttgagggaatcatttctctccttccagtcatgagagctgaactctggtttggtgctaggcacatttaaccactgagcatctctctggcctttaaaggaaatgttttctttttttcttttttaatgttttttattagatattttcctcatttacatttccaatgctatcccaaaagtcccccataccctctcccgccactcccctacccacccactcccactgtttggtgtggcgttccatgtactgaggcatatgaagtttgcaagtccaatgggcctctctttccagtgatggccaactaggccatcttttgatacatatgcaactacagaccagagctccggggtactggttattcatattgttgttccacctttagggttgcagttccatttagctccttgggtactttctctagctcctccattgggggccctgtgatccatccaatagctgactgtgagcatccacttctgtgtttgctagaccccggcctagtctcacaagagacagctatatctgggtcctttcagcaaaatcttgctagtgtatgcaatggtgtcagcgtttggaggctgattaagggatggatccctggatatggcagtctctagatggtccatccttttgtctcagctccaaactgtgtctctgtaactccttccatgggtgttttgttcccaattctaagaaggggcaaagtgttcacactttggtcttcgttcttcttgagtttcatgtgttttgcaaattgtatcttatatcttgggtattctaagtttctgggctaatatccacttatcagtgagaacatatcatttgagttcttttgtgattgggttatcttactcaggatgatgccctcaaggtccaaccatttgcctaggaatttcatgacccatctagcaggtccagttattcgaggatctcgaggggacctcctcctaagaaccaagtggggggtagagagagacgagggccttgtgcgaataacgacacggagacattctggaatgcatcaaagcccccaaatgtattagccaggcccgaggtttaaatgcacaagcaaaaggggaagtgcctttcagcaggaggaatgggcaaaggaaatgtaccttagcaggagggatggggcagtggaaagagaggaagtacttctcagcaggcgggatggggcagcagaaatttttttggtgactacacggggaagcaggaacttggtggtagcaggatacatcttgaggtcaggacatcctgcgctgactttctcggagaggtgcgtcccgtggcctgcttttgacccccttttcttctcaggggggagaggcccaattcagagatcaggacaatagtgttgccttaatagctcccaacaatttcataaattcattctttttaatagctgagtagtactccattgtgtaaatgtaccacattttctgtatccattcctctgttgaggggcatctgggttctttccagcttctggctattataaataagactcctataaacatagtggagcatatgtctttcttaccagttggaacaacttctgggtatatgcccaggagaggtattgcgggatcctccagtagtactatgtccaattttctgaggaaccaccagactgatttccacagtggttgtaccagcttgcaatcccaccagcaatgaggagtgttcctctttctccacatcctcattagcatctgctgtgatctgaatttttgatcttagccaatctgactggtgtgaggtggaatctcagggttgtttgtatttgcatttctctgatgattaaggatgctgaacattttttcaggtgcttctcagccattcggtattcctcaggtgagaattctttgtttagctctgagccccatttttaatggggttatttgatattagtcccctatctgatttaggataggtaaaaatcctttcccaatctgttggtggtcttttgtcttattgacggtgtcttttgccttgcagaagctttgcagtttcatgaggtcccatttgtcaattctgcatcttacaggacaagccattgttgttctattcaggaaattttcccctgtgcctattgaaagagtaataaactcaatgctccaaggtatgctaatcataaagcagatagcgacattccttcctccacccacccgcttcctgggttcaaagagtgttcattcaaagaaagtcaccctgaccactactggaacccactatgcaaaggtgctattgctaggggctcttagattgttaggggctcttagaaactgtcttgagagataacctgacacttgtgactcttaactggtatttttggtattttccaacaacgcccttcccacctccttgagttgtggttccttcctttaaatacccccttactcagctactcggggcaccacggtcctctacccctgcgtggtataagactgtgggcccgagagcactcttgaataaaaatcctcttgcaatttgcagcaagaccatttctcattggtgattttggggtgtcgcctctcctgagtcagaacgtgggggagtcctcacgttgtgggtctttcacctatatcttcgaggctttttcccactttctcctctataagtttcagtgtctctggttttatgtggagttccttgatccacttagatttgaccttagtacaaggagatgggaatggaccaatttgcattcttctacatgataacagccagttgtgccagcaccatttgttgaaaatgctgtctttcttccactggatggttttagctcccttgtcaaagatcaagtgaccataggtgtgtgggttcatttctgggtcttcaattctattccattggtctacttgtctgttgctataccagtaccatgcagtttttaccacaattgctctgtagtaaagctttaggtcagacgtggtgattccaccacaggttcttttatccttgagaagagtttttgctatcctaggttttttgttattccggatgattttgcagattgctctttctaattcgttgaagaattgagttggaattttgatggggattgcattgaatctgtaaattgcttttggcaagatagccatttttacaatgttgatcctgccaatccatgagcatgggagatctttccatcttctgacatcttctttaatttctttcttcagagacttgaagttcttatcatacagatctttcacttccttagttagagtcacggcaaggtattttatattatttgtgactattgagaggggtgttgtttccctaatttctttctcagcctgtttattctttgtgtacagaaaggccattgacttgtttgagttaattttatatccagccacttcaccgaagctgtttatcaggtataggagttctctggtggaatttttagggtcacttatatatactatcatatcatctgcaaaaagtgatattttgagttcttcctttccaatttgtatcccctcgatctctttttgttgtcgaattgctctggctaggacttcagtacaatgttcaacaggtagggagaaagtgggcagccttgtctagtccctgatgttaatgggattgcttccagcttctcaccatttactttgatgttggctactagtttgctgtagattgctttttatcatgtgtaggtatggaccttgaattcctgatctttccaagaattttatcatgaatgggtgttggattttgccaaatgctttctccgcatctaaggagatgatcatgtggtttttgtctttgagtttgtttatataatggattacattgatggatttccgcatattaaaccatccctgcatccctggaataaaatctacttggtcaggatggatgattcttttgaggtgttcttgggtttggttagcacaaattttattgagtatctttacatccatattcacaagggaaattggtctgaagtcctctatctttgttggatctttctgtgctttaggtattagagtaattgtggcttcatagaatgagttgggtagagtaccttctacttctattttgtggaatagtttgtgaagaactaggattagatcttctttgaaggtctgatagaactctgcactaaacccatctggtcctgggatttttttgtttgggagactattaatgactgcttctatttctttaggggatatgggactgtttagatcgttaacttgatcctgatttaactttggtacctggtatctgtctagaaatttgtccatttcgtacaggttctccagttttgttgagtatagccttttgtagaaggatctgatagtgttttggatttcttcaggatctattgttatgtctcccttttcatttctgattttgttaattaggatgctttccctgtgccctctagtgagtctggctaagggtttatctatcttgttgattttctcaaagaaccagctccttgattggttgattctttgaatagttgttcttgtttccacttggttgatttcacccctgagtttgattacttcctgccttctactcctcttgggcgaatatgcttccctttttctagagcttttaggtgtgttgtcaagctgctagggtgtgctctctctagtttctttttagaggcactcagagctatgagtttccctcttagaaatgctttcattgtgtcccgtaagtttgggtatgttgtggcttcattttcattaaactcgaaaaagtctttaatttctttgtttattccttccttgaccaatgtatcattgagaagtgtgttgttcattttccacgtgaatgttggctttccattatttatgttgttattgaagatcagccttaggccatggtggtctgataggatgcatgggacaatttcaatatttttgtatctgttgaggcctgttttgtgaccaattatatggtcaattttggagaaggtacaataagatgctgagaagaaggtttatccttttgtttcaggataaaatgttttctagatatctgttaagtccatttgtttcataacttctgttagtttcactgtgtccctctttagtttctgtttccacaatctgtttattgatgaaagtggggtgttgaagtcttccactgttattgtgtgaggtgcaatgtatgctttgagctttactaatgtttctttaatgaatgtggctgcccttgcatttggaacatagatattcagaattaagagttcctcttggaagattttacctttgatgagtatgaagtgtccctccttgtcttttttgataactttgggttggaagtcgattttattcaatattagaatggctactccagcttgtttcttcagactatttgcttggaaaattgttttccagcctttcactctgaggtagtgtctgtcttttcccctgagatgggtttcctgtaaacagcaaaatgttgggtcctgtttgtgtagccagtctgttagtctatgtctttttattggggaattgagtccattgatattaagagatattaaggaaaactatttgttcctttctattatttttgttgttagagttggcattctgttcttgtggctgtctttggtttgttgaaggattactttcttgctttttctaagtgtggtttctgttcttgtattgttttttttttttctgttattatcctttgaaaggctggattcgtggaaagataatgtgtgaatttggttttgtcgtggaatactttggtttctccatctatggtaattgagactttggctgggtatagtagcctgggctggcatttgtgttctcttagtgtctgtataacatctgtccaggctcttctggctttcatagtctctggtgaaaagtctggtgtaattctgataggcctgtctttatatgttacttgatcttttcccttactgcttttaatattctatctttatttagtgcatttattgttctgattattatgtgtcgggaggaatttcttttctggtcttttttggagttctgtaggcttcttgtatgttcatgggcatgtcattcattaggtttgggaagttttcttctataattttgttgaagatatttgctggccctttaagttgaaaatcttcattctcatcaactcctattatccgtaagtttggtcttctcattgtgtcctgcatttcctggatgttttgagtcaggatctttttgcattttccattttctttgattgttgtgccgatgttctctatggaatcttctgcacctgagagtctctcttccatctcttgtattctactgctgatgctcgaatctatggttccagatttctttcctagggtttctatctccagtgttgcctcacattgggttttctttattgtatctacttccccttttaggtcttggatggttttattcaattccatcacctgtttagtcatgttttcctgcaattctttaagggatttttgtgcttcctctttaaggtcttctacctgtttagcactgttctcctgtatttctttaagtgagttattaaagtccttcttgatgtcctctaccatcatcatgagatatacttttaaatccggctctagcttttcatgtgtgttggggtgtccaggagtggctgaggtgggagtgctgggttctgatgatggtgagtggtcttggtttctgttagtaagattcttacgtttgcctgtctccatctaataatctctggagttagtttttatagttgtctctggttagagtttgttcctcaggtgattatgttagtctctatcagcagacctgggagactagatctctcctaagttttagtggttagagcactctctgcaggcaagctctcctctagcagggaaggtggacagatatctggcgttcggacctgcctcctggcagaagttgtgttccattcaccagaggtattaagatcccgtggagagtcctctgggaaccttggggtgtccgcagactccaagcccaaggtgccctggtgctggtgatggtgctgactggaagggacttgtgaccctggtcaggctgggttttctgcttccctaattaatgctgtctcaggtcctgcgtgattggattggagcagcagttgtgttccactcaccagaggtcctaagatcctgtggagagacctgtggggaccttggggtgtccgaagactcggtgcccaaggtgtgttggtgctggtgctgactggaagggaccaggaagtgtcttttacatacaattgcttcctttgtttttcaaatccatcttaatattttttctttgatgtccttagatcatttgtacttaatgttattgtgaatttattttctaccattttattacttatttcctccacttcccatttttttgtttaccattcctggaacattttgaccatttgagcatttggggtttactggtttactttaaaaaaaaaaaaaaaaaaaaaaagacaaggccttactgtatgtttctggctgacctcacatttatgatcttcttgcctctgcctccccaagacctggcattacagatgcatacctcttcctgtctgtcttcaatttaaatattttcaatacttaacttcagtgtatatgatctgtgcattgaggttattttatttatgattactggtgcttctgctgttgatggatggtgtcacaacatacatgtggaggtcagagaacaaacttcaggaatcagttcttgacctccaccataagtcccggggattgagcctgggtcgtcaggcttgtctggtaagcactttaccagctgggtcatttttctgccctctagtgtgatttttactatctctaactttatcgtgttaatgaatgttctgggtagtaataaaacatataatgttattatttttttcaactatcaatacttaagaatctcatgaggaatatactgcccttctctcattgttttgttttgtttgttttgttttgttttgttttgttttgttttgttttgtttttcgagacagggtttctctgtagaccaggctggcctcgaactcagaaatccacctgcctctgcctcccaagtgctgggattaaaagcatgtgctaccacgcccggctaccttctcccatttctggtggtctctttccctgcatgtctgaaagtatcttaattgtgcttcttattgccatgatataacatatcaaaagggacttggggaggaaagggcttatttcatcttaaaacttctaagtaactgttcatcactgagggaagtaagaggaggaactcagaaaaactaaagccgaggccaagggcaaacactacttactggtttgctcagcctgctgtcttatagcacccaagaccaccaacccatggatggtattacccacaggagctggacccacccacatcagttgtcaatcaagaaaatgtccccataggctttcccacagcccagcctggcaggaacattttgtcaactaaggttccctcctaccaaatgatactagcttgtgtcaagctgacataaaactagccagttgggtttcctttcttattttagaacaggtctatatcaatagtcttgctgtttcttgtagttgaaaatgttttcattccatgccattcttgaaggcattatttttattgaggggaaagttctgagtcaatgggtttgtttgttggttcctttcttgcatttccatgtctcttctctagtaaacactgaatctgaggcgcatcaagctggctttcacagatcagagtcctagccccattcttctttgccttcttataataagaagtcatgtcatacaacagacatccggatatccattagcacctctactgctcctacgtttcactatagagagacttttctagaaaatacaatacaatgagtgacttggcactggtgctcagctggtagaattcctttataagccctgggttcagtccccagcaccacataaaaccagtgtgctggcacacatctacacagatctgcggaagcagacacaggaggatcagtagtttaggtcttccttgactatatggtgagttcaaggccagcctgggctacttgaggtactatctctaaaacaaagatagaaagaagaagaaaaggaagatggagaaagaaaggaaggtagattgaagtgagcaaaaagaaaagaaagaactatccacttctgattactttagatctgtgtcagtgtagctcacaattctcagtctcttactaatgtcagtaattattctctcacctcagttaattaaggagtctctctctctctctctctctctctctctctctccagttccagtttctcttcccttgatcttgacatctattgtgaccaagttgtcaaattatcttggttatcaatcactgtttttaaagaagataattgaacaaaaaactctcccatgaataataataccaagtggcatccctcatttgggctgctaatcaagcagtaattaataagttagtaatagcacaaatcttagtctgcttgttgaagtaacagggtatacctttttaaatgccaaggaggaaaaatcatttctaatttttaatatgtttcaaatctgtccacaggcctcaagacatattcccccaaatatgagattcttatatgccaagaataccttctctatattcctccatttcccctgttatccttgataatgttaattaggctttaggattaggtcaaatgtcacatctttttaatatgttcttcttcatttcctcttccttattgtgttacactgaacaatgggcacccaaagataccatgttctatcgtcacatcagaaattgttttaccatatttcacagaaggtactttgcagatctgattgtgtcaatgaccttgagctggagagatgaccctgtgttaatctggtaggcccaatataatttgcataaagcacctaagtggaaaacatctttctggctagatgaaaatgttacccaggaagaacggtcataatgatgcaatgttgctgactttaaaggtggaagaggagagcaataagaagaagaaaaaaaaaaaacagtgaccaacccctagaaacttttcaagccatggataatttcttatggcagcaataggaagctaacaccacccgtccaggatgggtgagatgatgctttaaagttcttgttctgctccacacctactgctaatgatgggcttttcacaccatcttgccaccatctgcttccatgcctatttcttgcaacacacggtgcctggaaagcaggtacaggcttcatgtgggaacctggcttcttgatttcctccattcatcacacataataattattgagtcatctcttcaggatgtccaggctccaggacagtctctgattgtggtggtgcatattaatattgctctttcattccaagcagcctctggactacagtttttattaatgaatttgtgcacggatcagacataataaagataagtgactcacttagacttggaccccaacagcattgagagcttgagatctgggagtcagaggacatgaaagacatatttggttccatgaaaacctttgcagtgattcagtgaggctatttggggaaatataatgggcaagtcagaggggggaacacctgcagaaaagagatggcattgcttatttttatacagtgaacactaggcaggaacatcgagcaatggcaccttccatcagacaaatgtctgcttctgagctgtgttgtgaatcatgttagcactgtctgtcccagaggcaaaagccatgagatggattccagaatgaaatgtcattctctctcattcactgctccctctacccctacccacagctacagttctgtccctaaaacaggttgtcttctatggccacactctacattgaaattaagagtgtgtacatttcagacctcgagccttatctactattgagctgagaacatcttctacttctggaaatttcctcaggaagcaaccctgtgtcatcatgtgcacttgcttcattttcctgaaagctcaagcctctcacctcaggatagggaaccaagggaacatgtttcggtctattaaggcgtatctagtctcagataagtctctttgttgtagctgttttgtttggagtttcctagctaagtctttttttttttttaatcctagataactcttaaagagaaagatctgtgtgttattctggcctatgacataatttttcccaaaataaatataggttaaacaaagaagctacctccgtggtaccaggtaccaggcactggaaaactctgtgcagccattgcacaaggaaaaggaaaagggtgctcgttaagtttgccaagggagcacaagtatagaggaaagatggagaagcaatggttcctcagtcctgtactattggaataactgactaaaatgtacccagagctaatgaatgagtaagtcagccgaatgcatcccgctgtctggatctcaccagatttcctctgctgtttcatgtaccgtacaatcagcatgctcccatctcagagcattgattaggaagatgggtaaaaggattgtgcctgacagagtcagggtctgtggctgctagcaacccaacatccaacagtgtgtttcattcattttgtaccttcttctatttttttaaagtctccagtgtaatctatgatctcaccatctttatctcttcccactgttcctttagcttcatgctatcttgactttcatatttcatgggatgagattttcagttacggcaatgctcagcttaagtcagctgggtcaaaggtgcctctggaaagcgttttcctaagaaatattggagaagggctgggtttgtattctatttccaggtatatttcacaccttgcttctgcttggcttcttagctatatttaagcagattgggaggttttctttgcacggtagttatattagtgacttttcttactgccgggaaccataccagacaataagcaaattaagggaggaacagtttccatatctcaatggtttgagaatacagtccttcaaggctgggaaaggcaggagcggctcccaaccgcaacagtgggaaagcccatctgtgtggaccaggaagcagaggaagagacatacaaaggaacagtgccagctacactcagactgagccttccttcctcagggaacctctctggaaacactcctagcagtggcttcctaggggattctgcatccagtcaaacagacagctgagatgaaagcgtcgtggtggccattcccaaagatttcccggaagatggattacttttctgactgcacacttttgcctcaagacatttgtccatcataccacattagattatactgcacacacacacacacacacacacacacacacacacacaaaaccccaactttctcagaggcttagaataaataggcacgatccctcctgtcccccacataccctctattgatagctgacaggaatcttttcagtatagccactgattgggatgctgaggctgacaacatggccattatctcagcaaaatgaaaaggagacttctatggaatctcatagcaacaactaagaccacagcataatcagagtgacatcagttcacagtgtgacatccaccacctgccacagggaaaccagattcccaaccaaacttacatggtacacaacaataatggccattggttgtgtgttgctgtagagccctgtgccttgatgttatcacatgagcttcaccttgatgttatcatatgagcttcacatccccagttgcatgccttgcccgtgatacaggtgcttataataagaattaggaggcagaggcaactgctcatggttaacagcatatgctggctgagcacccgactttggtttccagcaaccacattagatggctccatggctgcccataactccagcttcaggggttctgacattctactctcctctggacacccacatgtacatggtgcacatgcagagacacacataaattaaaatataaattagtttgagaaaagagagttgccaggcactggtagcaattaaggcagaaaacatctgtatattttccccttttaactctatttatcatcactacatacacaaacatctcctcattcaaccgcagctattccaggaatttcctaatttgtcttcccggtttccataaaggcatttcttcaatagcatttggaatgctctttcttcaaatgtaaatcaaatcaaggcttctcctacctaagacttgtctatttctactcaccaaacatgaaaagaccaactcttcatgagtgcttaggaaacatccaccctgctgatgtgacatctgcccttgccaatggctcctttcttccatcttcaaaagccaagcttgttcctgcaatagaaccttgtgtcacatctgcctggactttgttggttttctctgcaacccaccaagtggttgacatctctttgtcactcttctttcagccctacctgcagatgggctgtccctcaccacatacgctaaagccagccatacccttctgttctgactgccctgcattctcccaccaggtatctaaatggcagttatgtgtcagacactacctcagatacttaagagctctgtgaccaaaatagaaaagtatgtcctcttagcaacagaaaacctgtgataaatataaaataataaacatgcttttttaattcatttattaaaagatggtactaattcagagccaaacaggagtcttttagccagaatgcttctggcagcattgagacgtcactaagctcactataaattctgccacttccacgtgactcgtcctcagaattatagaaaaccatgataaggaaaagttcctctctgtagaattatttctgcacctcagtcaagcaagaatgacagatttggagtgttgccaccttgaagcactttaggaactttgttatgtgggtattataacacaggagagacaggatgccacacatttttctgtctgttgtaagtgggtagacaatactccaacaacgaaaaaatagcttagcaagagaaagcttcgattggtttatttaatttattttaaatatatttaattaatgaatttaataaatttaattaaattttcacgatgcagaagccctcagaaattaaagcacaaacatctggaagattctgcattttcgtgcttgggatcaaggaagactacccaaccatgtagaaatagatgtgtggagggcactggtgtcatgaacagactgagagggcagcctggaaagacccatctgctcaggtccgtcttgagctctcaagagcatcccttcctcccagcaacgaggcagggcaatctggaatgagggacttcaatagagacagaagaaataaagtggtattatatttatgtgtgccttgcctgagggtttccagaacacagtcactgatataaaatagcaaaagaggtgtgtatagaaccaaaaccagccagaacttgcctctagcaacctgaaatcaccaatacatgtaagcatgatgtaaacacttatcatatagaattagacaacaatggcaaagaacactatatattctacacagatgtgattgtctttccaaatatttttgatccacagatgtttagatccagagaaagcactcatgcatcctaaagactgactctcttattgattcttgtgtttcctcagtctcttttcactaaagtaaaacatgcttaacagaaaagaccttgatttccactgacatcgctgtgactcttagggatgagcctggagcctggtatgtgctcagaatttcttgccttaatgaacctctggatatctctatgagaattaatcctcactggcctcatcttttttaaatgcaattccttgcccagggcctttacttgtgctcaaatgacagataaataacacagctacgttttaggttttattccttaggttcctgttctgggaacagattctgcaataatccttcattctaatctttatctactacaagcaccctctaagtttagtgtgacgatggtatcagtcatctggtcatggcatactaacttctaaagactatgaaggagcacttgttatcatttttaatgccttccacagatcctctcaaactttgatagccaaagtgcctgagagtcccaggttttgtacagaagttaagatatttcacttccaaagaacttgctatacttagcccatcgtcaatccagtactcccttcatgctttgtctctatgtcaaagagtagtgggtcaaattcaccttcttggctgctctaacacctcattaaacagtgtgctgagataggatggtagtccactacttgtggcaagctttagtgtctgtctacacaccatctcaaagaaggtaggaaggcactttgctatattataaaatggacaagtggtggaaagccatgagagagaagtgagcagtccacacctgggcagtccagaacgatgttcagagctgaaagggcccatgggacaccctggatcgcagctcttaaacaaacataagctctataaactaggtaggaggagacaccaagaaccaaaggttgtaacaaccgaaggaccaaagtctcaggtcaagttgctgtctagatgaaaatgacactggtttgtctctttaagtctacactgcttgggtgtgagcaaatgtgagactggcttgccttgagactaagagaagagtttaggaggttgtgttagtatgagttcaagttccagggtcctcatgattcaccataaaacaacttgacctttctaagagcatttcccaaatctgactatggtagacctaaactggtacatacctaagcagagggaaatctatttctgaacattgtctccactgtgcatcatacacacggcatgctgaacttggcactgggtcatgtcatccctcaatatataaaacaatttgaaatgaggtggttttgcaactattattacaattcaaaagtcagaaacagacagggtgcaaaatacaagctaagagcttccaggttaaaggagatgctattggagtaagagagacaagtactaagttgctgaaaaggaagatttcgggccaagggctgagtggtagagcaatgcaaagatactttttttaatggagagattaagggaaaagaaagggaatgcataagggtagataaaaataaacattaaaagaaattaacaaacccaggctggggaaatggcttagcagtactgtacttgcctagcatgcttggggacctgggttcaatctacagtccaccaaagtacaaaacaagcccccaacgacaacaaaaacaaaacccccttaagccaacaaagcacgggagcttctacaaaagcagcacaaagggcagagaaaggcccttgacccaagaccacaagttcagaggtaaccactactcagggtggctcagctgtactcgtcacatgctgaggacagatcatattttccatgtgtttcatgtttgctatacccaggcccatgtcacacaccctttgagtgttcgtgacacctctgagacttgaagaataagaggccttgccagaatcaggccatattgtggcagagaaaggcacaggctcctctaataggccctcagccttctccagaactgcacacttacttgaaactatattcaagtgtggcaaagaaaataactcccaattaaccaatatgcttaattagacagaaacctctctgttgtaccacataagaggatttggtgatgttactaaatagatacctagacttcaggggaagagagaggacaaaagatgatattagtcaaagggcccagagctttggctagggcgccagactaaaagataatcttttagtggtaacaacagttttcataagatatatatttcaaatttgataaaatattttttaacattctcactatttggggaaagataaattgatgtggtgatgagtatatccatttggctggctctttctatgatgtcaacacatggaattatactcctccaaacatgcagttgttagtcatcaattgaaaacaaataaacagtacatactgccagaatgcagaatctgtaaagagattgccttgcaaaaattaggtcctcagtttaattcctaaaacctgcattgaaagtcaggagcaatggcttgtgtccataatcccagcgccgagagagggagacagacaaagcctagggctcgctggccagccaatctaatgaaatcagtaacccccagtcagtgagaaaccctgtctcaaagaatagggtggctggctcccaagaaacagcactcaaggttgtcctttggctttctcatacagacatacatacatacatgcatgcatacatatatacatacacacatatatacatacatacaaatgcatacaaaacaagacaatagataaattcaagcatagcttttctaatgtgttagtaaatgagctgtgtgaccaccagcttatggtgagtggtgatttgaactcagaaagtcttggttctactctgcagttgttttgccagaccatgtttcctgccttcatgcctgctagagcctccttagattcttcccccaagagcagtctgtactctattttctgaatgttgccttcctgcagctaaataggaatgtccagcacaggctccaggagctactgcaacacctgacaggacgccagaggcccattcacctctgcccacgcggtaagcaggttgacggatggaactggatgacattcagaatgagcactggctccagagatgcctggaaatgagcctcacgggagacagatgccaaaatcacacaaacacctgccaccaaaagaagctgagaagtcagagaaaggaataatgctaaccaagtattttcctcacagacataacaagaatgctaaatgttttaaatgaatcatagataccgaacacttggaaccagctctggccaggtagcaatccaaggtgtgtgtagataaagaacatcgcccagccccgtcaaagaacagcaaatgtggaaggataactgagacctggaatttgtctcccaaatgccacagctaaacatggctgtgatgcctttcagcaaagtcaatgttgacccccccccccccaaagcaggcactgaacggttctagataggcattcagaggattaaacaggctttcctcacattttaacaagtacagttataaggagggttagtttactacccaaacctcttcctcgtcacttttcagggagtgttacagtactcttcatcagtgaaaaggagatcaaaggtgaatctaggaacctgaatgtacagatgtaaacttgtttacaatgtcaagtattcactcagtggtttgttgaatcaacagcatgtgttaagtatgtgccagacacctgtgacacaacatactctctgcccttaaaaacttccccataagtggtgaaagtagacatatatatatatatacatatatatatacacatatatatatacatatatatgtatatatgcatatatatacatatatatatatacacacatatatacatatatttttataaaatttatatgtatatttaatttttaaaatttttttattaggtatttatttcatttacattttcaaagctatcccaaaagtcccccacctgctcccccacccacccactcccactccttggccctggcgttcccctgtactgagacagataaagtttgcacgaccaatgggcctctctttccactgatggacaactaggccatcttctgatacatatgcagctagagacacgagctctggagggtactgggtagttcatattgttgttccacctatagggttgcagacccctttagctccttgggtactttctttagctcctccgttggaggccctgtgatccatccaatagctgaccgtgggcatccacttctgtgtctgctaggccccggcatagtctcacaagagacagctatatctgggtcctttcagcaaaatcttgctagtgtatgcaatggtgtcagcgtttagaagctgattatgggatggatccctggatatggcagtctctaggtggtccatccttttgtctcagctccaaactgtgttcctgtaactccttccatgggtgttttgttcccaattctaagaagggacaaagtgtccacactttggtcttctttcttcttgagtttcatgtatttcgcaaattgtatcttatatcttgggtattctaagtttctgggcttatccacttatcagtgagtacatatcatttgagttcttttgtgattgggttaccttactcaggatgatgccctccaggtccatctgtttgcctaggaatttcataaattcattctttttaatagctgagtagtactccattgtgtaaatgtaccacattttctgtatccattcctctgttgaagggcatctgggttctttccagcttctggctattataaataaggctgctatgaacatagtggagcatgtgtccttcttactagttggaacatcttctggatatatgcccaggagaggtattgcgggatcctccggtagtactatgtccaattttctgaggaaccaccagactgatttccagagtggttgtacaagcttgcaatcccaccaacaatggaggcgtgttcttctttctccacatcctcgccaacatctgctgtcacctgaatttttgatcttagccattctgactggtgtgaggtggaatctcagagttgttttgatttgcatttccccgatgattaaggatgttgaacattttttcaggtgcttctcagcattcggtattcttcaagtgagaattctttgtttagctctgagccccatttttaatggggttatttgattttctggagtccacctgtatatttaatttaaaaagaaaaagacactaatggaggtatacgtgaaggcttgatctggtgcatgtaaaatataaactgatatcaggaagtcatcttggaggtgactgcattattcaggattcgaatcaaatcctacaaagtagagcccagttgtaatgacttctgtcaagaaaactcaagatattcacatagaggaaggctgtgcaatactgtatatgcatcagctgatgtcattagtgataacttctcaagtttatgtgctgatagaaatatttcttgaaactagacagaggtttaggtgtgtgatctcagtgctcaagaaagtgagacaggaggctctccagatccactcctcctcagtttcccttcagtaaagactaggcctcctgggactagcaaccaaacatggcataacagattgcaataagaataggtatatctcctcatattaaggttggatgaagcaacccagtatgaggacaagggccccaaaagaaggcaaaagagtcagagacagcccctactcctactgttaggagtcccacaagaagaccatgctacactaccataacatatgttcagacagcttaggttagacccaggcaagctccctgattgttggttccaacactgtgagcccctttgaccccaggttagttgattctgtgggttttcttgtggtgtccttgacccatctggctcctacaatccttcccctctatcttcctgagctccacctaatgtttggctgtgggtctctgcatctgtttccatcagttgctggatgaagcctcactgatggcaattatgctaggctctagtctacaagtataccagagtatctttaggaatcatttcattcactttttttggccagtcatgtttagttctatcctaggagcctctggttcctggccctccaggcaatgtccctttcttgcatgggtcttaaactggaccagtcattggttggtcaatcctacaagtcctgcaccaccttttctgcagcacatcgtaaaggcagaacaaattctaggtcaaagattttgtggctgggttgatgtacgaatctctcctctgaaagtatctcctggacacaggagacagacagttcaagctccatatccctccttactcagaatcttagctagattcttgggagtttccattgctctagatttctagctcacccccaaaatgtccctcaatttccattcttcccaaggcttcactgtgctctcaattcatccatggaatatgaatgcctaagcacagagacttcctctgtcctgaacccagcaacagctagtaatcacattaccctgaattacttgattagagtctgttcttcctcttctccatgtaagtgccatgaattcagggatcaaattggtccacaacgtccttgcaactaatatttactgactttcattctttcccaatgtgtaggaagtgaaattccatggcaagacagtagttttaattaagatgtataatttccaattgcccattgtagatgatgaggggagggagggcttagattaaaacaatgtctttagttagataacaaggaaacagtgtgtggtggggagagacagaaggaacatgagcagggacatcagagtgagcaggtcagtgtcacctctcaggccacaggccgtgtgactcaatgtgacttcagggactttagtacttacttttctcattgctgcaccaaaagtcctgggaaaagcaagttagagaaggaaatgttttatttcaactcacagttcaaggatgccatccatcatggcagaaagctatggtggtaggagctggtcacgttgtatccacagtcagacagcagagaaagatgggtgcttatactcaccgcgatatctccttttcattcagtccaatatcctagtctgcaaaacggtacccacatttaggatgggtcttaccttctcaattaacctaatctaagtaagccctcacagacctgcctggaaatgtgtttcgacggtgactttaaatccagccaaactaacaattaagattaaccatcataggtgctgtctctgaacctcttggcgggactgtcactggtaaatctagaattataacacctacttaccccaggtgacacattgaagcaaagaactctgtggcaaaaacaaaaagcactgcagaagcaacttcatggtcacacagcctcagagataagaatttattgtgttgtttaagtgttccaaagaattttcctctggggaaaaactccagattcttttccccattgcagagctaaaggaattcctcaaaggcaaatgaattatctagttcaacagcctgggtctcaccaaattttccagcaaattagcaaggccagtggaagctctccagagggcagataacttaacaggatgttacccttcccttgcattctggatgatgactgaacattatttctgaaggtggaaacgctaaatcttcctgacctccagaaacagtgtgctattattagaacataggcaaaaggaagaagatgcccttagcaagagttcatgggcacaagtgctcaaggggcaggcagatagcataaagagccactcaagtccaatagcacactggagatgacacaaaactggtccaaaccagaggcaaagaagatgatagtaacgatgatatgacccatgggtaacagttaggggaagcagactatgcagccagcctgatgatgcagctagatctcacataaatggctcagtccacatggatgtgggacatcaaccagttattaataggttttgtcactttctaagagaatgcaaaaattcatgctttgtattaaactttctggtttcattgttaataaacctccttctttccctcccgattcccctcctccaatactactatcatcaactctgtttcttcttcctccctctccttttctcccttgaaaatcctagatgtgctatgcaaagcacagccttagatgcccagccagtaagccatcctcaagagtttcttcattatccaccatatgtcattgtcatagttacttttactctttttcattggttattttatttatttacgtttcaaatgtccctggttgatattgttgttcttcctatggggttgcaacccccttcagctccttcagtcctttctctagctcctccattggggtccccgtgctcagtctaatggttggctgcaagaatctatatctgtactgctcaggctctgatagaccctctcaggggatagctataccaggctcctgtcagcaagagcttcttggcatctgtaatagtgtctgggttaatgtctgcatatgcgatggatccccaggtagggcagtctctggatggtttttccttcagtctctcctccactctctgtccctgcattttctttagaccggaacaattctgagttaatattctgagatgggtgggtagccccatccttcaattgggggccatgcctaatcactggatatggtctctacaagttctatctcccctttgttgggtatttcagctaatgtcctccccattgggtcctgggaacctcttgcttcattggcatctgggactttctagtggccacccacagtttcccatcccccactgcctcatccctctgttaaatttccttaccctctgtacttctcccctgtcttcccctatacctgatcctgttcccctttccctccccctcctctctccctcccaggccccttcctccctctacctcctaggattatattgttcccccttctaagtagaactgaagcatccacattttggtcttccttcttcttgaactttatatggtctgtgagttgtatcgtgtgtattccaagctttttgcctaatatacagttatcagtgagtacacaccatgtgttttcttttgttactgggttaccttactaagaatgataatttctagttccatccatctgccttcaaatttcatgaagtcatattttaatagctgtgtgtaccacattttctgtatccattccactgttgagaaacatctggattgttttcagcttctgactattataaataaggctgctataaacttagtggagcatgtgtccttgttttcaaaacaaccctgaaattccacctcacaccagtcaaaatggctaagatcaaaaactcaggtgacagcagatactgtcgaggatgtggagaaagaggaacactcctccattgctgatgggattgcaaactgatacaaccactctggaaatcagtctggctgttcctcagaaaatgggaaatagttctacctgaggccccagttataccactcctgggcatatacccaaaagatgctccaacatataacaaggacacatgttacttttactcttgctgtgacaaaacaccctgacaaaggcacagtttatcatagtggagaaggtcattggcaaaagcctgagctaactgttctcaatgcatcgagagtctgagagcataaggagttggtacttagcttgtttctgtctcctcattcaatccagacaccaaacctaagaaaggttaccacccacagtggacaccacatcaactaactcaatcaagacagtcccccgccaaactgatctagacaatttctcatgaagactcttcacaggtgattctcggttaggtcaagttaactattaaaagtaaccatcccaaggttgtttagttgtgaggtgtgtgtgtgtgtgtgtgtgtgtgtgtgtgtgtgtgtgtggtgtgtagtattagatacaaatgcagcatctgattcccttactgctagacaatggacctttgaacatgggtgttgagagcctgccatcgtgaatgtctaccatagtgctaatgcatccatcatctcttttgccacactcaacatcaggagttgtggatgctgactaagctccgttttacaggtgaaaaatcacaggttcaaaggaacaagaaaatttaattttctgaacaacagacctgagatacaaatcattcatctttcacaagcaatgggtctacaagaacttaataagacaagactcagaagctgatggactgggtaaaacatgaaatgcaaagaaaagatagtaggagaaatcatactgcctcggaacatagcaggtctatatgttgaatggatcaacttgtctttgagtctacagtcaaggttacagcatcagctaagcacctgctcttgaacttccccttcattgtaggtgggaatgtgaatcctgctggatatttaatccagtctctttccctcatttacagaatgaatatatgcactcaaagggctatgctaaaaagcaatgtgtgcagcctgggtagaatacctagaagactggaaacttagcaaatatttacttcttttgtgaggaagtggggacatcccatgtgtgtcttgtcacattgatttttaaactgtttctctcaggcctttagtctccatcctatcaggcctcctttactttctcccaataactgtgtgtggctcgttcctaataagcctttccctctgcctttcccaagaagacccctttctctgcatccctttctcttctggactgagagaaaaatggaaagcccttgtcttcaaggagtttccactgtcatcatgggactcagactctgacctatccctcagcttggaaaacacaggatgtagccccaccacctggggcagatcctgggctcagggtgatggcatactgtgcaccaccagttgttacatggtggggaaacaaacttgccttacaagctatttaaatcctcctggaataaattccaactacatcagtgcaaagctcacaagataggtgtggagttgcctattaattatagagctactcgactttttaattaatgggtaactaatcagcacccatccagtgcttaagatcctcattacagaagaataatagcaaattttaacaaatccatctttcttaactactgtagatgccctgatttatgaccacagcgggcaggtggagggaatctaaccaactgttaatatccttcataaaaatacatttcacaaagaaacgatcgaatcagaagtcacaagcatcttgtaaaggcgatttccccgtcagcacgtatttcatggagtaaagccattaaaaccgctctgtggtgaatgggtagggaaatcagggacattcattcacaaaaagtcaaacgcatctcacactcagaaaatctccactggaacatgcggcattgtctccagcaagacagaaatctgcatccagcctatctcacctgtgcacaccccagtcctgcgtcataactcccctactctgatgctgactgtgtatatataagcagcggctatgcaataataaataactctagtggtgttagccactctacaagcttgattgtcatttgacctcttacacacttagaggacccaagggaaggatgactttctttttttttttttttcaaactgaaagcttaagcaaaattctgaatgtcttttgtttggattctgtaagactggaaccaaaacagaaaacaataaggccccactcaggcaagtctgtccctggaataattaacatctcctctgttgaaatcgaggctcatctgcatcctccctgcactgttatgaggcagtcagctggggcacttgtcagctcagtaaacaggggctatcaaggaaaaaaacccaaagtgatgcctgcagagacagtgccagcatatggttggggacaggtgatccctaacatggtgtagaattgctggcctcacacacactagaatattgtttcaatatggtgtggggcttccttcccaccactgtgctatggtacatgttggccaataggtatccaatcctaccctggtagggggatgctggaggttgggactaagttacttaggctgtgtaacagaaatgtgggtagagtccaggacaaagtaagacacgtcgtttagggaatggtctagggctaagctgagtactacagtgagtgagatccctagaaggcaaaggaaaggatgtctaccgtagaccactgtgcctccacacacagcacacagaaaggctgtgacaatagtccccttggctccaactctctagagagtagtttctatacatatttcaagtacactaaaatgagtcaactctagatgttacggacatgaactcaatacttggactttcaagacaaaaaaattacaaggcctttgactgtgatcttaatgggatttagaatctacatggagacaaacctttgggaagtctccagaatgatctaattaagtatcccatggactgagtaagcacaaaagtgacagacagcaggtcaagtgcctgcactcatctctccctgcttcctagctgtggatgcaatatgaccagctgcctcaggctcctgctaacggtgtctttcttaccatgatgaagacagcctcaaactatgagccaaaataaatcctctggtggctttgtcaggcattttgtcacagcaatgagaaaattaaaacacaggagtaacttctcgtggccacagcagatatcggaactgtgcccatctctcaccttcaccctggcaccaccccttaaagcaatgtctacctcccaaggttataggtgctcctagcagcttagcatcctccctcatttatcccaggaaaaagcaaacacaggcccttaggtgctcctggaagcaatgtgaatcctgtgctcttgctgttggcaaaattccgcaggcacacacaggcttagtcagagaaagcccctggttcctatagttctctctattagtgacactttccgatctctattcctcgtcctagcaaagttcctctgactatgttctcaaagctaacggatttagtcacctgagggcaggaaatgcaagtgcaaagcttgtgtgagggtgcagcctgaaaggttggcttttcatttacttctgtctttggagctcatggtgttataagctcaggcattaaattttaagcatttgatgcacgctgatcaaaggaaagccaaagaagtgttgaactgtatcgaccgctgctattgctacacattttccaaaagaaaagcagcagtattgttcgatgagaacgtttggttatgaaacatctatttctggggattcttgcaataccattaacagattttacatcaccatgtgtatgcttctgacactctagaaggtcatattcattgcaatcattttctttagtgatggacattaaatcttattttaactactgactgagatggagggagactgtaatctctttgagattactatgtttaggagaaaatacatttaatgcagcaagttaatgacatgctatttcaccttaaatgaggctataatggctgttttgttgttatgcatagtgtctgataaaatttgttaacaggaatgtagaatgagaaatgtatcttcattagctgtcaaatagcacaaattggggggaggggctcacttcatgactatgacatcatctttttgttgaagttccttttctgagattaaataaactgatatgtcagaaatctctagaaaaaaattcatgtcagtcttagaagaaagtagtgacagccagggagacagttcagtcataaaggttcctattgcctggcctgactaccaggactctcatagtcagaggggaaaaatgactcctgaaagttgtcttccatacaggtactgtgctgagtacagacacacactcacacacacaaataaacaacatacacacacacaataaataaacaaacaaagtagcaaacattttttaaaaagtaatactattttacattcttttaatgcttcctggtttcgccacattcacccactgagtattttaggagggcttactgcgtgttgtagtattcaatggacagtgatgaccagatcaaacaattctgttcccatgggcacaagtactttggcaagccatcaagacagaataagagttgatatccactgtgactatcttccctatgtctcctttgtcataggacctgggacagagcctcacttcagccggtgtcagagcaggaatctttgaaaagatctagtgtattccaagatggggagacatcagcactaccagccttccccagacatgtgattgggccccactctgttttaagctgccctctctctagtcctgggctctcctgctctccctttgattttctcatgctaatacaggtcagcacagaggcagtaagtaatagactgtgagcaacaagcagattccagagccagaaaaacctagtttacatgccaattcgaccaactactagctaaatgatcatggaggtgttaactaagatttctgtgcctcagtttccacaaccataaagataccaatagaatatatttcataatgttgttggattttgatttaaaaaaaaaaacacttagcatgttgcttcttgggcaattgcaagagctggaggtgtaacttaggtggtgaaatgccttccaagcatgcatgaaaccctgggagtgatccttaacacagctgaaccgaaaagcagtgatgtaggcctgtaatggttataacagcagagacagggtatcacaagttccaggttgtctcctgacacctcctgaactggaggatagcatgggatgtattagaccctgtatcaggaagtcagacaaaatcagtgggatagtggacaggggaggaaggcttgatgggtaagcgtgctctctgtccaaatgtgaggagctaagtttgatccaagaacccacataaaaagttgggcatgcctgtgaccccccccccccagaataggggggtggggcagaaacaagtggatgccaggagtcactaacacccagcctagtcaaaatggcatacttcctggttcagtgcaaggccctgtttcagaaaggcctccacacacccatatgatgcaacacacacatatacacacacataaacacacacacacacataaacacacacatacacataaacacacatacatacacacacagatacacacatacatacacacacagatacacacacatacaaaaacaaacaacaataaaaacactgacgcacgatttgtcgaaacatcaagcacagctgtcaaggttctctatgccaatccatccaatcctcacaggcccataaggaaaatactatcttcattttgctgagtgagaaggcagcacatgagagaacttaagccactgacaatcactgagctgataacaattcacatccaagttaccccaaagctgtaccaacaggacagttgcttagtcttgtgcttgagccttgaaacctttcttggtatcaaaaactgttgcccgaagagcatttctctccaggtcaccatgacctcccttgaccccgatgctttttcacagctgtgtagtttcctatctcaaatcctacctcatgtatccatggcaagtgccctgggctggcttccccacctgatggcagatgtccactgtggctgcaggcagtgaagttactgtcatgagtatggcaccagctagccatggaagtgggcatgcaagcaacatggctgagtcttctaaagtacccccagcaaccagggtttccagcagtctgatggttaacctgtcagacgtaggtagaactacaatctaaactcggagcagggactgagtagatacctcagtccctgtggcgaagtgtttgccacacagctgggaagacctgagttcaatctgcagcaccatcataaaaagccaagtgtggtgtcaagtgctggtaatcccagcactcggaaggcagagacagccagatcttggggcttgctctcaggccagcctaccgctacttggcaagcccaagaccaatgagatatccttcctcaaaccacatgatgaacaacacctgaataagacatgtaagtttgctcttcaacctttacatacatgcatacctatgtgtacacatgcatacgtgtaagaaactcgtaaaaacttccatattccctcctggatatttctgtgaacacagagacctaattctgccggtcttgggtcgctattacactcatgcagattatagcatagcagcattgtattcaacaatagcaaatgaaaagaaagtaatcaatgagcacactgtctcctgggactcatctgctttgaaaacaggctgttcatctaaatatagcaaattctttctagcaaacattcgctcttttccctctccattcttatgtcaagcttccctgcttgtgaataaaagagaaaaagaaacttctcacagaccatcttagttggtgtcctattgctgtgaagagacaccatgaccacagcaatacttataaaggaaaacatttcattggggctggcttacagttttagaggtttagtccgttattgtcatggagggaagcatcacagcatgcaggcagacatggtgctagagagggagctgagaggtctacagtcaattggcaggacagctggaagagagccactgggcctggcttgagcatttaaaacctcaaagcccacccagcgacatactccctccaacaaggccacttatagtaccattccctatgggcctatggaggccatttttattcaaccaccacacagatcataccagctaaaacaatgccaaatgtcacaaggcacaaggcttgggaaataatcttaaaacatcaaagtccagaaatgaaaaaatgatggttgaagagtgggtacagggacctgggcagtgtgggacaatcctgcttcccatgcctctgtgaggagccctacatactggcacattctcagcactggactttgagctgtggtttttccctgggcctgcagaaagaattctgtgcttggtgcactcaacagtcaagaattgatgtcctcaaacagaagccagctactgaagattgagagcagagcctcacacttgatattaccttggaacaaaaactattccttagcaatgcacgggccttgtgtcttagtgacactgtgtccattatgctgaaatattgactgagacttgtcctctgctagaagagaccagacaagtgcttgtacttaagaaactcaaggacatatatctctccctgatgagtaataatggctgtaacaatccaaggagaatgtgagttacagatacaagtgatgtcaaggagaacacaaagaacttcattgataacattccattttatgaacagtgcgttcaactacccagaggcaccatggtccaatggtgatgaagcagtcctcagagacgaacagacctgagttcaaatctttcctttgccactacttagtttccttatctctactaccaggtatatttagacttatcacagaactataacaatataattaaattaaaatgcatcagggaaaaatagatgaattaaacttgtcttcttcactttcaaaaaaaaaaaatccttagaagaccaaattcttctacgacagggtaagttagtattcgtaacatgtgggccatcaaacggcagtacctggcacagagctgtaaggccctttcaccttcagagcatgtccacagcagaaatgtcatcccaactctctctgaagctggcttcccctgaccctcctcacctgttccataaggtgaacgagaatgtttctggacagctatctaagagaaaaatgtcacctaggtatcgtttggcgcccctgctcatcctgtgacccgcacactcactcccggcatttcagaaaagtcctgtggaaggagaagtcaaagactttgaagagctggatgctggcactagcaagaatttctacagtttggatctaggagatgcttaaagcaataaacttagatcactaactcacttggcattgctcggcgtccttagtgcacaggattaattaaggagcttctctggagttttcatggataaattggggtgaaattatgacagctgagaggaacggattggaatgttgctgaattggatttgtcaggagtatttctaacctctgggggaaagagactgagttaacactttagctcgttctctctctctctctctctctctcttgtttcaagttttattcaatgcaactgaatacatatatttctttttttattagatattttttatttacatttcaaacattatcccctttcccagtttcccctccaaaacctccctatcccatccccctacccctgctcaccaacccaccaactcctgcttcctggccctggcattcccctacactggggcatagagccttcacaggaccagggtcctctcctcccattgatgaccaacaaggccatcctctgctacatatgcagctggagccatgggtccctccatgtgtactctttggttagtggtttagtccctgggagctatagaggtactggttagttcatcttgttgttcctcctatagggttgcaaaccccttcagctccttgggtcctttctctagctcctcctatggggaccctgtgctcagtcagtccaatggttgactgagagcattcacctctgtatttatcaggtactggtaaagcccctcaggagacagctatataaggctcctttcaggaagcacctgttggcacccacaatagtgtctgggtttgatgactgtatatgggctggatccccagatgaggcagtatctggttggcctttcctttagtctctgctccacactttgtctctgtaactcctcccatgggcattttgttctctcttctaagaaggactgaagtatccatactttagtcttctgtcttcttgagtttcatgtggtccatgaattttatcttgggtattccaagcttctgggttaatatctgcttatcggtgagtgcatatcatgtgtgtccttttgtgattgggttatcttactcaggatgatattttctagctccatccacttgcctaagaatttcatgaattcatcgtttttaatagctaagtagtactccattgtgtaaatgtaccacattttctgtatccattcctctgttgaggggcatctggattctttccagcttctggctattataaataaggctgctatgaacatagtggagcatgtgtccttattaccagttgaaacatcttctgggtatatgcccaggagaggaattgctggatcctccggtagtactatgtccaattttctgaggaaccaccagactgacgtccagagtggttgtacaagcttgcaatcccaccagcaatggaggagtgttcctctttctccacatcctcaccagcatctgctgtcacctgaatttttaatcttagcgatcctgactggtgtgaagtggaactgttgaagtgggttgttttgatttgcatttccctgatgattaaggatgttgaacatttctttaggtgcttctcagccctccagtattcctcagttgagaattctgggtgctcttgcatttggagcatagatgttcagaatcaagagttcttcttggcagattctttcctttgatgagtatgaagtatcctttcttatctttttgtgacttttgtttgaaagtcaattttatctgatattagattggctactccctgtcattattggtgttatttttatgtttgcgtggttatcttctattggatttctggaaagattactttcttgctttttctaaggtgtagtttccctcctgtgttggtgttttccatctattatcctttgtatgacttgatttgtggaatgatagtgtgtaaatttggttttgtcatggaatatcttggtttctccatgtatggtaattaagagttttgctgggtatagtattctgggctggcatttgtgttctcttagggtttgtatgagatcccccccaggtgccaggcagtgatggtgcacacctttaatcccagaacttgggagtcagaggcaggtggatttctgagtttgaggccagcctggtctacagagtgagttccaggacagccagggttacacagagaaaccctgtctcaaaaaaaaaaaacaaacaaagagcaagagcaagagcaagagcgagcgagcgagcgagagagagagagagagagagagagagagagagagagagagattcccccaggatcttctagctttcatagtctctgttgagaagtctggtgtaattctgataggtctgcctttatatgttacttgatctttttcccttactgcttttaatattctttctttgttttgtgtgcttggtgttttgattattatgtgacaggggagtttcttctctggtccaatctctttggagttctgtatgcttcttgtatgttcatgggcatctctttctttaggttagagaagttttcttctataattttgttgaagatatttactggccctttaagttgggaatcgtcactctcttttatacctactatccttacatttggttttctcattgtgtcctggatttcctggatgttttggattaggagctttttgcattttgcttttctggtgtgttggggtaaccagggttcaccatggtaggagaactgggttctgatgatgccaagtagccttggtttctgttgcttatgttcttgtgcttgccttttgccatctggttatctctggtattagctggtcttgctgtctctgactttgacttgtccatccttcaagcctgtgtgtcagtactcccagcatacctgttctctctaggaagaatttgggtatggagagttgtagtatccagtcagctctggggtgaagatagaggccagaaggatcctgtccctaggtgatccttggttcctgtgtcctggtggctctgtgagtgtccttcttgggccagcaacttgaagagaagtggtggccttacctgggttcgcaggtatgtagacactctgggagaccagctctctcctggtggtatttttgtatgcatctctgtggcataggatcagctacaggcagagatggaaacctaaaggctcctgttccaggctgcccctcggttcctgtgtcctgagggttccaggcaggtttctctgagaagcagtggtggtcctacctgctcacacaggcctgtccatgctcctgggaggctcgctctctcccggctttatttgggtatggagccatgtgacagaggatctgctataggcagagatggaaactgggaaccagtctcttcttttacttcggggattacacctagagtaactatgtaagatggcagacagggctaagcatggagctcagcaggtggcccagttggtaggatgtagtccaagcatgcacaaagccctggtttcacctccagagccaaataaagcagggtgcagtggtgtacacttgtaacctcagagttttagaggtggagggaggaggatcagaagttcataatcagcctagatgacctgaaatccaccccatacccccccagagtggggaaggagggagggggagggggcaatttataaacaggattctttcctgtgacaaacagagtaggacttgtaatgagaaatactctcaaattttggagtcagatgtgacaactctcctcataactaaagaaataacttgggtaagaagttaagttgggatgcaaataacacactgacaccattgccaccgtcttgttagctgacaattttggaagaggggaacacaaggagttaacatcaagggtctcgagaaaaaaagtacagcttagacaatcattttttccaaaatgaatcttaaggtgaaatgatgttataatctcaggctacaaaagtcatgtgcaaaaacctatcctgtcagcaacctggcagcagcaattcttccctgatgaggacattagcacagctactcaaccattcagcttaaaagaggaactcacagcatagtttctagagcctgctccggagcttaggctggcttagctcgcttcagctccccttggcctcatccagtctgacatgggttgaaggcatctgtgtgcagactcatctgttaacacacacagcccataaacaaccagatagactttcatacccactcacagagaccgtagagttaggcttgccatcagaacctgattccacaccactctacagatgcaagaggtttatgggtctcccaacaggcaggacctcattaggtaataggaagggtgcttcttatcctaataatcctgaaagagattgaaactatgtccccagagttatacccacatcaactctaatgggcaaattaattttctgtttcatggactgatcctgtccctttcaacctgcatccaccataggccattcctctctatgaatctacttatctgaagagaaataaattcttctaccccaagaaagaaaagcacttccagataggctacccaagagttttgagtcaggcaactcaaataatagtttgttgagtttgggttttctgtttatttgcctgtctgtctgtctgtctgtcttacctaccaggagcacagaggccagtcacttatttcacactcagtaagtcaacagatttattgcttgcctaccttactttgggcacagtatatttttaaatgttctgagattaaaagcactcacaaagcactatgaagtggattttctccttttgaacagctggccatggtaaatgtacacaagggtgcaatgggggaggaaaagaagtgtaatgttcttctgtagaatgttctagaattaagccatccatgtgctttactgtgagagggataactgtgctcctttgcactgttatgacacatggctgacagaacaactcacggggaatgaggtgtcagaggggtttccacccaaggtgacaggaaaggcttattgacctctgttcaagtggtagatcaggaagcagagagacccatccaggaaccagaggcaggaataatttcataggcctcaagttaccagatcaggccagcctcccaaaggctctacaaaccaaggatcaagtccttgaaacaagcttccatgggacatccagtttcagtgaccattccagagacctagcggctcataccaagtctgtcacagaaaatgctgtgccaagttcaaccacaatacaatctatcaatggtaatttcatcaggtttctgccacaaatccatcactgcacagattttcctccttgagattctcccaggaaccataggaagaaggaattagacatagtgtcttcttttagagatcagcccaatcaagttagctgtaggaagcacaattaaagtcaacaaatatggaagccaattcatattgtaaatgatcactatccaccaaaagttccaatctaaatggagaccaggcttgcacgtttaaaacgctgagatgtgcaacagctgtagcaggtgctatgcagctgtgaatgcaggtgcagcgtgcaaaagctcaagaacctccgacctattgtggaaggaatgtaagagctggtgtctgcagagaagaccgtgcagtggcagggactggcagggaaccccaactcagcacaatcaagaagctgcttgtgggtgcaccctaacaagccttaccatatggaaaggggttgtttttcttttctgagatattgtctcgtgtaacccaggctgatctcaatctcgctgtgtagccaaagatgaccgtaaactcctgatccttctgcttccacttgcctagtgatgcgattacagcaggtatggcccatcctgcccactttataccatactgagggcctcataccggctaggcaagtactctcgtgaataagttgcatcacaagctccccaaaagggacagttgctatgaaacattggtaggaaaataaattgttgggacatgtcccaggaacatgggagcacatgaccacctccagaacagtatggcatagctgcagcatgaggtcagttaggaagtatgatggacaatggtgtccaaagagccagatgcagccaagttgtggaaagagcttacagtctgtcttgaaggcaactgggagacattaatagccattaagtgcaagtcagatgtacagttaagactggaaaactgaaagaaatacagtttgtagcctaagatgccagttaggagtctgcagcaacagggccatctgagatgctgaaggtaagggaaaaggagcaagagtgcggagcccattacagtgaggtcctctgaatggctgatgcaatgagcagggtagcaggggaaaggacatctctgaggaatgccaaagccacaagcagcagcaggaggggagctggagatgtcatttatgctgtctatcttatggactaggacagagtattacatgagagtagaaccagtgaagacttagtctgaggggccaaagttaaacatcatacagagtttggggaagtactcactgtgggctggagccaggatgggtctccatatttgccaggattcctgaggtaaggtggggaaagcaagacttcattccttctagatgtctaccacagaactactttacactagttgactgtgctcagatgtctgttgtgttactaaacttcaacatcaaccaggacggtgctgacatgaccttccccccatgagaattacatggggtcccgtgcagtctcagcaataactatgtctatgacaactaaagcaaccacttaaacttataaagtacttcacatttttaaaaacactccagcactcctccaacaactatctctggaactcacctaacatgggaagtaactacagtcatgagactgcttatcgtggagcttgtgcctgggaagagtctgcctctgaaaacatcctgtgtgtccatagggaggtctcttaactcttctgtgccttgtcttcatctcactgtgtgatagcatggtaatagcactgaatcagctaaatactgaaagcatttaggatctgttcattggcaggaatctgatgagactttatgggtacctataggctggttttaagagcagttcctataggaaagaatggagaaacttaattttttggttttccatttttcatatatggttttgtatgtgcggtccctcgtgtgtgtccatgtgcatgcgtgtggaggccagaggtagatatctagaaccatcctcaatttgcttctccaccttattcattgaaacaaggcctttcactcaaatccagagctagctgtcctttcccttcccagctggaatcacaggagcacccctacacccgcctcccatttacatggcttccaggaatctgaactctggtctggtgtttacacagtaagcactaaatggctgagccatctctccagcccaaggagaaggttgtctaaaggaaaaatatgcaatatagataactcacagtattttaattgctagttcaaaattttacaaactgaactgttaattcatgtatattttgtaggacatctagatgaatctatttaacgtttatataactttagtgagaagaaaacacagactctactttcttagtgactttcaggtactcgacgttgtcactggctgcagtcagcatcttttctgatggaatcttaagcttatttctgagtgaaatcacgaagccttcagtcactctctccccaaccttatgctgccacttccaaacaaataaaaagaaaaggccattgggggcaccaaggctcagtgtatccacgttcacaattgttcatcttcttgatgaatcaggacctttatttatgtgaagtggccttccaggatcctgccacattccctagcgatgcacaggattgtgctggcccagcttggtctgatccaggaacgactttactttggtctgattgctaacaggtcagacaaagctgcttacttcttcacttccaggtgatatgggggttaatattgactgtcaactcgactagctccagaatcacctagaagagaactctgggcatgtctgtgagggatcatctagactgggtgagtggagatgagaagacccatcctaactgcagatggcaccattccattcagagctggataaaataaagatagtgagctgagcaccagcatccatcgcctgcttcttggtgagcaccagcatccatcctgcttcttgcccgtgagaaacaaagactccctttctaccacaggggccttggagatgggatggtgagagtgggtgaagcaccttatttgtttatgactttgcaaagcctggtgtcactccagaatggaagatgctgaccaagcacagacgacagttttgtaatctaaatgtgggtccttcatcctcttcctcattatctgagtactcaggagagcccaatctcacatatcacctgggcttcatctttctctctgctgctcatgtttgtctgtttctttaaaaagaccgtgtgcagggtctaactttttatcccttctaattactctctgatactttcctattgtttcctcttggttgtaaaaagagtgaaagcaaaggccatccctttttgttcacatgtgtgtcctgtgggcatgtctgatggatcattcactatatcaatatgtcacggtgaaattcttctctggctatgtctgtttgggaatctaaatgtctctgatgtcttttatctatttatctaggtttggaaaattttatggtgtaatttcattgaataaaatttttatgagttcagtttttaatctcatttccttcttgtaccccagggcttctaagttttagtgtcttgatcatgtctaggagtttgtggccatgctgattttgtgtttttccagtggacatttggctggttggttggttggatgattggttggttggttcttttttgtttttgtttttccatccacattgctgattttctttgcccatttttttctgacccttttctctgcctccagctttccttcctggtcttaaattaaatctgcctggttgtttgtacttggatgtctccccatcactttggtagtaagtttctggcattttcacttagcatcttacccatttcagtatctttgaattcagtagttgagacttgtgatctttcagaggaatcagcatgccttacttttttcttgtgttcttttctccctcattcctcacctaccctgaaccctgtacatcctttgccttgaatgtcccctctggttttatttggggatcttctcagagagcatccttctctggagggctcatgccacagtagcagagaagaggaaccaagtggtttagcaacaatatcatcaagccacacaagagagaaacacacttaagatcttctaagataccagtaactcacagtgatcataaagcagaaaatgagaccctagtaaaaaacacactgtgatgttgacaattattaagttaatgtgaaagtagcagataaataatatgaaagaaaagaaaaggagatggtggaaaatagaggagaagtaaggttaaagaaatgaaaagaggaaagaaaaatgctattggaggaggaggcaaaatgttagaaaatagacaaaatataatttctctgtagtgaattaggcaaatgttcaaaacggagaataaaaactaaaaactgtgtttcttcttctgaaaatccttcttgccgtcaagagactgaacattgccagacctgcagccaagctaatgatatgccttgagatcatgtaagactgtgtgctcaacctgctgtcctactgtgtgcttggtctatttaagtttaaattggcattaaaacaatgtaaccaacttgactatgccttgaatttcccacttgcttttacaacctaagataaatgcatagcttaccccttaagctatgtattcatccatgccaggtccaaaataatgtatagccaacaggttgtaagtaacctgaagcagcaaagatcctataaatattaaaagcagtatttctataagttgataacatcggagtgcatcttttggtttctctgcacttttaggagcctcatccttaccatagtggttttctgtagttctttatttccttctgtccttcttagcctgtctgtccttcttagcctgtgacttttctacgagccagtctctaactgctcagaccctgccctagtcacttacaaggcttacacaagccattagactaattcctaatggaccctggttcctcattctgaatttacagcacaagatggtgatcttgaacttgtaaattctatttaaatgagactcaacacaaatggccaggagacaaggccaagtaattactgtaaaatgttcccaccctctgtctctggagcatcattctctctctgagaactcccccgcaatgtttctgcccaccatgcctaaataatgccaaggctttgactgcacaccataggttcacccggacactaaggtttatgctgtgttgaatctgtattggacaaggagctgaggtctactagaccaatcttcattagtagtttcccttccttaaagccaagggtctctgctggccatacttagctttgccatctctgagctgggcaaattctcttacctttccaagacaaaggagcttatacccactgagagtgtgcctagtcctcacaggaggttgtctcctgagtgcactgggagtctgaaaagcaaccacagcattgaggtctgggagagaagcagacaacctagctgtttgcaaagctttggggacatttaaagtgttccacacccctatgaaggcatggacctctcagttctgcagctctaaggcagagaacagcagcccggtggctccagaggatgatccacccactgacatcaggttcaagggtgtcaagtgctacttattcttagtctaggagatctgctcccatcatcaagggcaaagttacacatccattgccagagcagagcctcttgcagcttgttcttctttcaggcttgtcagagtctagttctctggttctgtgtaactgtctccagggcggggtctcattggggctgcagcagattatacacagactcccagaccatgatctcagactccaggagtagctccatttcgaacaacacgtcctctcttagggtggagcctgaccactgccctcccaatcctaggaaatggtgaactgggattccccttgttactgggccatccactgggtaagccactaagcagaattacaattggaggtttgtgaacacggagggaggggttggggggtggggggcgggctcttttcatgagagctgctcagcttgcctcttgggtgagagtttttcttcccctccagcaccaggctggacctttatcacatctagaatcactctttttcagtgtgtcctcgccccttccgtggtgattttccgaacctcttccttatgctgtgagtctttctgaacccagtcatgtgggacagtgtctggcccaccatctcccagttcctgtgcaatgagatgtaatgcacatgataaaactgtagctccttgcagacacactgattttaattcatctacaaaaatctcaaaatttgttgatagaccttggtagtggatgccacgccttcctcttcccactcctgaagcagttagaatagttcctggaatcaggtgggcctatctaataactgtttgctaatatggatatcacgggtccatggagtgacattggtcaagccagcagaattctaaagattcagttcagcgggggagtcacaaatgtgcatctctgagatcagtgggagcggatgctgtatcacgagtctatacaagttagaagagagagaatttacacatgacaaaggctatggcagaggccggatgtgcagtgacttttcaaggtcatatgactagtagcaatgtcagtgggctagagagagttctttctggctagggctgcttggtccctgcagcttcaaaggcagcttgtttagcatggttggcccttgttcctggctgcaggatgtaagcagagtgactaaagctcctcccctacagtgtgtgtaaatggccaccacatatcccaccttcaggcatctgctttgaggccataaaagtcctgcaaagagcagatgggccctgtcccaattctcaggccagcagcagggaagggaggcatgaccagcacctcacagggtgccttctctttaatggccctgtcagcaacccagccatctggggctgcagcagcaggaaacaagcctctgcacctatatagcatgggccagcacccacatagcatgggcccagggaaaccctccatgaaacacctggtgagttcacggtagttcttaggaaagaacattaggctagaccaccctcatgctttcattacaccttagctttcttttctatttcatattggtgggaaacactctaaaagttgtatgttcaatcttttgtttgaaatttaatatagaatgcacttttagttaagtttgaatgcttttttttgtttgggggcaaggagtttttgttttcttttgttagttttttggggggttgttttttggttttgtttttgggtctcctgtaagcccaaactgatctcaaattcactatgtagccacgaatgaccttgaacttctgtaggaccagtttaatatggggctcagatcattcatcctaggtaggcacttcaccaaatgaccacatccttagcccacagataaaatcattttaaggacaagaagatttaaccccaatggggtacttctttgtaaccaagcaagaaaagcaaaatgtcaattatactactacactattttgaggttacccataaaagtcactaccagggcgttggaactgagagtgagtactggctgctcgatattctctgttctcatgcaagaacctctctctgttactgttcttccatgttatctgctcgtagcagttaggagttgggtaatagaactcttggacatggttaggccatcttcattaccctctacttctgaatctcacccagcactaccatcaaagctaatggcagacctcaaaactatcttccttcctagatgatttgcattccaggtccttcaagggaagaatggggaaagaatattcaccaacgataggcttgaaaacctaagacgcaagcatttaaaactccagtgtcaagacagtgctcctccagattctggcactgagtagaatacagtgtttctggcttagaatttgatgcagtcaatcaatacagaacggaagtatttaaatttttttgtttgttttcgaaatgtctttatatatgagtatgtctgcgtgtaactatgtaatgtgagctcagtgcctgagggggccacaggaaggcatctaatctaaagctggtgtttcagagttgagatcacctgatgtgggtgctggacacttaactcaggtcctttggaaaaccataagcactcttaactgctgagccatctctccaaccccaaaccttctttaatatgtaaaaactggcccaacgtctttttgcttgtgggtaatgtgctggaaattgcttcagctcccaacagcggggcagcactgtccacacaatttcttcctttcggctggttgtcatctcataaattcaaccacatccccagatggttcacagaagacatgtttaacccttccaaagcgtagtcacttctctggctatgataaattaacacaggaagcagcctgaggaagagaaggctcagtttcagagcaatttgagctgtctgtggcagagcaggcatggccccaggagcaactctgcctactgtgtgagcagtaggagtggcatagacagggaatcagagaacagctacaaccaggagttataagatcatgcccgaactgtctgcttctgtcagctagtccccacctttaaaacacagcaacacaacctgagacaaggcttctaaaacctgagactgtgggggacagctcagattcaagccacaacaccagcatggagcttgtagccaagctcactctgaccttgtctgagtgaagcttttctagcttctgtgggctggacatggtttgagtgtgtccccaagtgtgtatgtgttggagacttggtcctgtgtttgaggatgctgggaactgttagaacctttaggagtcagagcgcagggcaatgcaattagtcactgggggtgctgaccttagaaaggactaatgtagttcctatgaaagggtttgtagtcactcctccaacccctgctctctttggcattctgtctcgctgtgcgattaccccctctacattcagtgccaccaacagtcatccagcaagaggagagctcaccagaactgagcaggcctcagaaccacatgcttaagcttttcacactgtgagtccaaactgttctctatatattatgaggctttgggtatttgtagcaatgaaaaatgccaaacaggcaacacttgtgtttattctatgtgacatattacaactatacccttgtgtgtgtgtgtgtgtgtgtgtgtgtgagagagagagagagagagagagagattggagacagcgttgtgctgtgatgtgaagtacaaagtggtctccaattcatgatgcacctgcctcagcttgattacaggacaggtagcattttagcactgtatttgaaggccatgttaaacagtgaaactatcccttaaaagacaaaaaaaaaaacaaaaaaaacaaaaaaaaacaaatgtgttgctaaataaactacaaaaaaaaaacttttggagataatataattttaactgtaattgcttaatttcttgtaccttttagtatttgctaacttttctctgtcttttttataaattggtttaagaaaaggggaaaatcactaccctaggtgggggtgaggagcatacagaagttacgcaatgatagctatcgtgaggtcagactttgaaaattgacccaaacagcagatttaaataactaaatagattctataactaaaaatttctgtaacaaatccaccatcttctcctagataaatagaatgtagaaacgatccctatgttttagctgttcaaagaatgatttcagaaaacataaagctgaccttatcactatgtgtcatatttcccagtgaatagcacctcagaggcgccggggcagtggctcagtcggtagagtcttccacccaagcctacgagcccgattctgattcccagcatctatataaaaatcaaggatattttcaaatttgcaatcatggtgctggggggcaaagacaaaacgattctggtggctgcttggtcagccagtctagccaaactggcaaactctaagttttaatcggtgataaatcttatctcaaaaaaataaggcggcaagctactgaggaagacgcttgaggttgacctctgacctctacagatgtgcacataattatgtacattcacacattaaaagcacggagaaacttaacttactaataaagatgtgcgccttttcaggttctgcttgaaggggcttcacattaagaaatggggtgctttttttaatcccttgtgtatagtacaaagggaaaatgtcaggccctcaatgtgaatctgtaacccctgtatgcttagatagagatttggggcagtttctctgggtctgcattaattctcaacggggatgaattttaagtcattttaaaggaaacctccaagtatagcaaaataatctagaaacaggggtggcgaactacatactggctcctacccctcccttctgtgatgaaccatggtgctattgcatattctgctcaagaatgagcagtagaaatacaatattgtttctctaaacacaggaggactaaaatcacattaatcttaggtaatgccattccccataaatctttcttaacaggtattatttatctgagtcaatatttcctgcattctacctacagtctaccccattagttctaattctatgaaacaaaagacaaatcttcacgtggaagaaatgcagttgtatacaaatttagcctcttgcaaatgtttagaacaaggacaggaaacagccacattcttttccaaaatatcacaattacagtctctagaccacttgctaatattcttctctgaaaccttttgaactgaacccccacagttcatcactctcatctttcattttcttatgagtatgtcccattaaacctgcttaaagcattcaactgttttcctagttcaaagtccagattctaccaatgatcagcatggtcaggcctggcctcgcaataccctcttctggtgccagcctctgtcttggtcagtgttctgttactataaagagacaccatgaccacagcaactcttataaaagagagcatttagttggggctgacttatagtttcagagatttagtcaattctcatcatggcagcacacaggaaggcatggctctagagatgtagctgagagttccacatcagatccacagacagcatgaagacagagactcaggacttggagtgggatgtttgaaacccccaaacctacccccagtgacacacttcctccgacaaggcaacacctcttaatccttccaaatagtgctacttcttagtgaacaagtgttcaaatctataaacctgggtggtggtggagattctcattagaaccaccacaaacagcaaggttggtaataaaaaaaatggtaaataactgaaagagacccacctttaagagatgggagagagccaagtgttatgttgcacacccgtgatatccacactggagataccacagcaggaagattgtgggctcaaaaccaacctagcctctaaactacatagccagatcttctctcaaaaccatagaaacaaataaataaaaagataagaaagaaccaaatcttgaatgtggccaagggaagctcttgacggaagcagtggtacccatttcatgaggaaatacaagagaggtaaaagcagaggttagtggccgtgcagatgtgatagaaatcgaggccatctaccagggagctctgagagccttgactagaggtaaagaattaaattgaaggttccaaaggaaaagacattgaaaccaccagtgaccttcagatgagtgttgaaatttacagtcatgctttaaataagacctaagtcaagctgcgtggctcctttccatgctatgactactactatagaatcagaaacaagagcagttttcacagggttggttagtcagacaaggacaatgaagagaaaatgaagccaaggggttaggggtgtattcgaggggtgaaatataataaagactattaaatgaattaaggagcacagcaaagacaagaagcagaagctgacagatcttttcaagaagcagtgtcactgagtaggaggagcagtgtcttttaatcctcaataatgtcctgtaagaaatggaagccagacacatcacttcagagtggtgggtcaattactcaagttggaagtcagaggtcatgggccacgttatatccttcagcacctctgaggaatgtggcttgaaaagcccttcgatgcttgtttcactgcctaaacaagaggaaatcctcataaggaaggagacagtcacaaggtgatggtcattttcagggagggtgacaatgaatatctggaactcgctctcaagtgggaaagcacagcgaagtgcaagccatggtgacattactttataggaaacgacatcaaggctcaagaaaacagagtgacctaggtaagctagagcgatgaagctggacttccatgatttatggacctcctgttctttccatcaccaccaatttatcattttgctaaacaaacacaaactctacatcctatttgtcagaaacacatgactttgcatatttccatctttgtacaaataaactcaagggtcacagttgtgtacttaattataaactggtttgttaccaacaaagcagttatctttaacctattacaatatatatttcttaagtcaaggaatgggagttggggactaatgatgtagttcagttggtggagtgcttaccttgcgtgcacagaaccccatgtttgatccacaacactatataaaccaggcacagtggtgcatacagattatcctagcacttatgaggtagaagtaggaggatcagagttcaagaccatcttcagctgcattgcagttcaaaacagccaggaattcatgagactctgtctttaaaacaccatcaacaaaaattatgagggtcaggatgagtctaccttgaatattaatgcccagcacaaatcctctgacagcggtgtagctgcaagagcaatcctcagtgcaaaggctggaagttcttatgtctgcctaactcagagtaacttatacatgtattgatactaaccattaccaaagaaagggaaagcctcccctgccccggatcatgtgcttatgacaggagaagacagagatagaagcaaaagtttgaattgtcatttggttgggcggataattgtaccaacacaggccagctgtagcactcgtgtgacctcagagaaagcaaatcaacaagagcactcctaaataaagaacagcaattaaaagaggaactgtgtgtttattgtcccctgttcacatgtggagtggatatgtagtggggaattgactggctgaatcagtgttaacacacccaacctaaattgttccctgctgttcacagactctactatactaatcaggtaatggtagtcctgtcttcttgtaagataaaaacacagtggacagtcattcccagaacctacaatcctttttaagggcattgctgctaccatgaggcagccattaggtacttcctattgcttatcacccttccatgatgagccagtcgtgttagctcttctttgctgcgcgtggagatgcgtgactgaggggatgcctaacccagccttcttcattttctcctctataaagtgaaaccacctctcctctctccctggccttcctgtcccatcttttactttattttcctgaagaaaacctgagagatgataaacagggtaaatgggattcaacttgcctcctatacaacctgtcattgcttctcctcccacaacctcgcccacattctgagtcaggcacccaggcctgcttttcatcagctactagaatgagtgtgaggtagggacaagggtctgaatgtgtttgtacatatacagtttctctgaatgtgtacgttcctacgtagtctgtgtgcatgcataatctcctcctggaccccccctctctctctctctctgtgtgtgtgtgtatgtgtgtgtgtgtgtgtgtgtgtgtgtgtgtgtgtgtgtgtgtgtaaaacagtctcaaagagatgccaaaggcaggagcctttctgaggatccagcatcccacacaacctcttcatgtattaactatttctcttcttgttgtgaccaaatgtgcaacaagaaaggacttaggggaagaagaattatttttggctcatggtttgaaaggacacagtcatcgtgacagagaaagactggtagtggagcagtggatcattgtgtccacatcaggaggcagagagggatagatgaaggtgacccctgctctcctccccacccaacccctgcccacctctctttttattcggtgtaaaacctgagtcaatggtcttacattggcaggtcttcactgctcataacactgcctttttcctcccctctatctccatctataaaacctcattcgagatcaacaatatgagccctgagagagagaaacaggctcgtgcctcttcctctatgagatggcacatcacttaccccatacatcggactaattcatcacacaggacttttaccaacatcctttctcctttgttctagtcacatcactacagcattcacttgatctatttccccaggaatatattcactcattgaccatggcatgcagacaggatggactaaagcagtatgttcaaagattcctgtagtgaccactaagcattgttcttggtattcaaaccttgacgcctggatcacctactgcagcaagatctctaagctgtttccccatggctctactttctgtccttctccacaaaccccagaacactgagcgctttacttcgcgcccaccccagatctgcccagcacacccatcatcctagtttgcagcttgcaaattatatccctcaaagattgaaaagctccatcgtcctgagagcaacatgaagattacagtctgcagtctaaatgttggttttccatccaaggagtgacttggggatgagatgcagatcctgtatgtttttgttttctgtgctgtgaattttagaaagtaaaattcagcgtcttggctggcagaaacgagaaagagcagctcagcgggaggtatggatcttcaaagatcaagaagctctgctgtcaggacaccagctttgccctttcacttccccagaggagccctgcccaccctgtggtgagacaatgaggctctgcgggcagcaggtctgcatttccttttcacagatcccactgacctgtgtcttaattcccctcacataacattaagagtaattaaagaataatgtatctgcttcacagagcaaatgaaaaaggggccggctcatcaatgaggtgcttctaatttttcatgtatggcatgagtgaaaaaaacaaaaaacaaaaaacaaaagaaaaaacaaacaaagaaacaaacaaacaaaaaaaaaaaaacaagcaaacaaaactccagacacccaagcaaataaaaataatgagtggatggccaatgatgccctaggactgagcagcaacaccacagcaatttgcagttcccccgagggactggttagtgatccagcaaaacaaacccaacaagcaccaccaatcattacagctctgtcaccgtgccctgcaaccaccaccaccaccccaccctgcaatattgctgaaggttagccttcggttcacagtgtaagaccttgtcagtttctcaaatctgccttccctaagtgaccttatcaatttggcttcccacacctgctgtgtgtacagaccctgatttacccagagttgattagaaccatttccgatgctggacgttattttcccattaaggtatatatgacataaacataatttcaggttcactgagagtcctcaaagctcatgtgacccccatgaagttcattttgtcgtgccctgtggtttgtcttatgtgactagttcttgtaccttgagatggtaaaatgggaaagagccacacctgtctgcttgctgaggtctgacccagctaaaatcactgaagggatagataggtagatggtagagagatggaggggagggagacaaaaagaaggaaagaaggaaagaaagaaagaaagaaagaaagaaagaaagaaagaaagaaagaaagaaagaaagaaagaaagaaagaaagaacggagggagggagggagggaggaaggaaggaaggaaggaaggaaggaaggaaggaaggaaggaaggaaggaaggaagagagagagagagtaatgatcaacttaagtcagaagggtggtacatgcatatatatacacatatatatgtgtgtgtgtgtgtgtgtgtgtgtatatatatatgtacatatatatatatatatgtccatacacacacacaaacaaggaacctcaagttaccatgatactgggcatcaacatgttgaccagcaaagagctctcgaatgcctgggtgatcaggagaggatcaactttggcattgttcaagacaaggatgctgggaaccaggcagacctaccacagttgtcacttaattgcttttatttacatcataaatgtcgcatgtctttagtacaagttttgaaacagtaaatattatttttagccacctaaaaatactaacctatcataaaatggctcttagtcaaaaacttctccctaattcaaatatcaggtaaagattcatgaaactgctgaagagagctgcaggtcatttcaagaatgccccaaacagtttactaatgctgaaatttgcataaaacctttgttgctaggcacctatcatgcattatctcctttagacacagcaacactccacttacttagctggcttcatctaccagaggaaactggggcttctggaaaatatgagtgtacgtaacaccacagaatccaccctgggacctcaggctttggttttatgtcttgccagtactgggataaattgtgggcaaacaaagatactttacagacacaggagaagctggacagacactcataaaaatcaagcccactctgcttttgttttaaagagtgtctctggtcactcatttgtgactgtccacatctgcctgctgcattaacttcttttctcagtgctcttatcccacacaatcgatttaaaaagacaaaggtttatttgaggataccattcacaatatctggaatgtcaccatgtcaggagctgcaggaagatggccatgtgtacccatccagtcagagagagaagaatactaatgcacaattcctcttctactttgtattttgtccaggaatctagccaaggtgatggtaacactgttttagagtgggtcttcctacctcaagttggaccttcaaggtggacctgtcacttgatcctgcctggccctggtcaactctagtcttgattgtgtctgtactctcagaaaaattgctcctacccgtttcctggctactcatactccacacaccagctgtgtgggctccattgcagtcaatatccatcctgtcctgtgatgaggctctccctacaaatcctggcattggtctgcagcccttttggcatcttccttcctataaggcattaatgcttctagtgacttctatgtgagtccctttgctccagccacattagcctctgttcctcagaaaaagcagtgttcagactgtcaggtctgccttgacaaggactcctgttcctcttcttgccatagctgaaccctacttctgactaaaccctcctacctacctacttctggctaagcctcccacctccctctcgaaagcctccctcctttcctctgattaaacctccttacttctctccaaccaaccctcctccttcctctaactgccctctctccctctagctaaccctttcttccatgtttctaatcctccctagttctctctgtctaaacttccctctctctgactaacctccctccttccctctgactagccctctctctctctctctctctctctctctctctctctctctctctctctctctctctggctaatcttcctccctctggctaatcttcctccctctggctaatctcactccctctgactaactccctccctctagctaatctccttccctctgactaacctccctcactccctctgactaaccccctccctctagctaatctccccccccctgactgaccccttccctctaactaatctccttccctctgactaacctccctccctctgattaacttccttccctccctccctctgactaatctccctcccttcctttgactaacccccccctctgactaatctccctccctctgattaacttccttcccccctccctctgactaaccccctccctctgactaacctccctccctctgactaaccccctcccactaactaacctcccctccctcctcccctccctccttctgactaacccctccctctgactaatctccctccctctgactaactccctccctctagctaatctccttccctctgactaacctccctcactccctctgactaaccccctccctctagctaatctccctccctctgactgaccccttccctctaactaatctccttccctctgactaacctccctctaacttccctctaactaacccccttccactgactaatctccctccctctgaccacatctccctttctctgactaaccctccctcttttcctctgactatgctctccttttcctttttcctttttccttttccctttgcttcctttaggttcttcaaaaatgtcagtttattagtgaggccactagcatatctactgttcacagtctcaacacctgagtgatattttccaagtcacagtggccagttgagaggacagatttacaatctttgccttctctttatctctctttctaaatgtactaggttaagatacacaaaatttctgtcttgtctacaatttcatgttgctttgtggttttggggatctgtgtttttctctgctgtatgtcctgtgaaggtaaattagtgattgctttgtatacaacaggtttttggtgtgtgcctgttaacaccaatgtctgaggcaaattttaatgaacaagagcatagaggagagtgaggaggtgccttgccagtcagacagtaatcagttccctctgggcctaattgagcctggcttacttgaggactggaaatcagctggcctgagctatccttgaggtttcctgggactcagaagccaactgtgttcacaattattatgtctgttacttcaaagacttcaaatctttatacttggttgacagtttcagaagagatgatatggacggctttatgcctgtgaatcccttagacactccacatgggacttggaaacctgtggaccgagcctgttgtgatggaacactggctccttccagagcatagccttgtgtctctttccagtgctaggagtaggagggaagagagaagcctacatgcccacacccagctgcctcagagagccctgactgatctcggtatatattggatgtgtttcatttcccatttattattctcttgtaattttctccactcaatgctttcttagtgatcaatataacctttatgtattgtcagaagattatttctttactgaagtaagggctcaataatttcaggcttgattcttctgaatccaagtccagcataacaaagaggctgcacctcctttgttcagaacggtgcatttttaacagaacagggtgctcaccaccaggacaatcacccccaaatacagaccagccactccttcccccactcctcccactccctaatttaccagatccttatgcccttgggaactctggcagttcactagaatctttttttcttactgcctcggttatcaaactgcctgaagctaggcatctgcacactagaagccaccaacgaattcacattcagaagtaccaactgagggccagaaagatagctcagcagatagagatccctgcctgctgtcaacactgttcattccctgttactcacatgggaaagagtgagacaccaagttcctcggccattgcaggacagggctttctgcttcagttcacatcttctctgttcctagtactataacaaaatgccacacgctggtgacttctttttttttttctaatttatttttttaagtaggtattttcttcatttacatttcaaatgctatcccaaaagtcccccagaccctccccccgacactctcctacccacccactcccacttcttagccctggtgttcccccatactgaggcatataaagtttgcaagaccaagaggcctctcttcccaatgatgaccgactaggccatcttctaatacatatgcagctagagacatgagctccgggggtactggttagttcataatgttgttccacctatagggttgcagacctctttagctcctttctctagctcctccattgggggccctgtgatccatccaatagctgactgtgagcatctacttctgtgtttgccaggccccggcatagcctcacaagagacagctataacagggttctttcagcaaaatcttgctggtgtatgcaatggtgtcagcgtttgggggctgattatgggatggatccccgggtatggcagctggtgacttctaaaggagagaagttttctgagaagataatagtccaggtgctaaactggtgttagatgaggctttccctctgacggcatctgcttagggtaacgtcctacacattatagggaattctctactttcctctgatctctggagcagcctcagttcccgtgcttttcacatttagatgggacacacagtgagccaagagggtagttggagtgagctaactagtgagagaggggtggagccaagcaacaactggcctcaatcctcacaggagtggccttgtatttctcttcaccctgttgctccttccttatgcatacgattatgaacagagatttcggtcccttgaagttgaaagttcactagggaaagggcacaagcactctgtccacactcccatagccaggtcttcttaagagagtctcaactgacccaagttcaagcaccatcactcattgttctttatgccccatttcatggcctctccaattttattcatgtcttatctttgaggcctagatcaggtccagttgaaaccactggcacctagttttgatggccccttggttcatccttagagagctaaccttctgctctgtaactggaggaagaagcctagaaaagaaggtaagaccctggagctctacaggtacaaaaacagcattaatcctgctcacaaaaactctgttctctgaagtcccacctcaaaagtacccatgaaattaaagtggcattcagacaagggctgggcatgtagcttagtgagtagaacgcttgtctggcatgcagtttcaccaccagcaccaatgaaccactgtggtagtgcagtgcacaccagtagtcctaggaccaaggaaaagtaaactgggaggtcagatgttttctaggtcatcctaagctacatattaaatttgagacccatctgggaaagaagggaagggcagagagaaataatctaatcttaataactcttgataaaatagatttttagtaattatattacactagaaatattagattatttaattggaaataacttcttgagagaagttacctgccatcatcagacatattaagtaaaacatgaacattttgtaccaaacaagcacactgcagagaatgtggctcttgtcaagaaggctgttcctgacataaacacaaatttatttacaaatgacaaggcaaaaaataaaattagaccattcggcttgagttttgatacaagaaggcatggaggacagctcaaggacttatcttttccagactcctgggaacatgagtcaaactacagcatcctctgtagagccagaggaagatggatgaagtcacactcttcacctggactcctccaagcattatctgatgcctgggttaagaataagcttcactacccacaaatatttttaaaattcttccatgtgcacatgagagtatggccagcctggaaatttcttagcaggtatccatgacctgcggcacaggcagtttccacctttgttctcccagcatcttctacacttcacccaaaccctgtgccaaagctcctttcattttactctatcccccgtgttagtaggtgacacaactctctctctctggctcccaggaactgaactgcctggaaatagagttccaagcaattcaattcctctatttcacttaatccaattcgtcatccagttctgacccaatactttccaaaaactgtctgatctcttggtcatctttcattctccccctcagatcctccatgggttgcttctgtgacatttaatactgtttctactttcatccttatttaacttatcttcatcactgtcttaaatatgtgtgtgtgtgtctgacatatatgtatagatatataatgtaaatatatataatgtgatcacatgacttctttgaataaaatatgaaaatatgtaattgacatcaatgtaaaaatgaggggttggagagattgcgcagttgatgaagtgctcgctacccaagcacgaggacttgagttctgccaccatcacccacctaacaagctaggcatggtggtctgcacttaatctcactgctgggaagatagagacaggaggagagcccttacagctcactggccagccagccttgccaaatgtgtgaaccttagtacctagtgagagacgttgtctcaaaaaatgaaataggacccacccaagtttgacctctgatttccacatgaacacatacatggacatatgtgcacacacacacataaatttatgcacacaataatgatgatgatgcaccagacacaatagctcatacccctgatcccagctgtgtagaaagaagacttacgcagggaggtcacttgaacccagaactggacaagactccatcacagaaaacaaaaagtcaaaccaaaaatatttaaaagagttaattcacaataggactctagcttcttcaagataaaatgttgagcctctgcctacctttatagcactgtaaggactttcaaaagctgactcatccttcaattccccttatgaacctagcttcattaccagccagaaatgtgaacatcatctcaagatgcctaaatagaagacacaatagggttgtcatcttctgaccaaccaggtgacaatggaagagccatactcagaaaaatgaaattgtaaaggctccacataggctgctgagtgaacatcccacttactcccctcaccaactttgagaaggcaggtaacttctctatgctttagcttcctcgtcagtggagggggattgtagcagtttatagcacctgaaatacacagagcaccactaaatagcagatactaagattcccacagtaccttaggggagagagaggttaaagcagcagagcagggtctaaggaggtgaccagaataagaagaattaaagtcaagccatggggagaacagtcggagtacacagagttcacagagaagcagtaatctcaaaattgccagctgtttcaaaacatctggaacagaatcctgagtatagatgcaggaacactaatgggaccatggggagacagattctagctcatattaaggaaacatttctatctagatggagtgtcaaacaacatgatgagttggagccatgagttccataccactagaggcattagccggtagcttggcaactcctcatttagtatattccaaggggactaagcaacagatagagaggggaagtgtgagtctcctgtgactgaaggcttctatgtcactaatagcaagtgattgttaagttatagtttggtgcaactactacaaaatatgaggattacgtctgtcttctagttgatcagtcatcttgtttctccagtaacctactgtttcagtgctaaggaaatttcttagaaatgaggtcctggctggggagtcagagtggacatcaatgacatgttctcaggtggcagctgtcttgtccacactttctttttattggtagacatctcttttaaaacatagtgatcgtttccttcttctatttccttcccattcattaatatattttgaaagtaacagggctaaacagagtctgaagggacctttattttggcttaaagtatcattttaaagatttatttcattattgtcttaattagaggggaggggtatgtgcatatatgagtgcaggtgcctgaggaggccagaagagggcattggaatccctggatctgagggagttacagcaggttgtgaactgtccagcatgggtgatgggaaccaaacttgagtcccctacaagatcaacatgtactattagccatagagccatctctccagcccaatatcactttaagtgatgtgacaaaaaaactttgagaatttgcctcatcttcaccctgggcttattgaactgtgttctgagggcaaggccactggggaggcaaaacacagggagcatgactgtgcttatctcatgccggccattgggtgctggtctttagggaagcacggagacatagagttcaggtggtgggaaaatgcagttgaagatgtgggaaaccaaagctggtattccccaactcccaggtatctagtcactgctagaaaacagcacagagtagtcagaacgaagtgtaggggagggggagggagtccacaggcctatgacaaggccaggaccactggggtctttaggctgaggatagtgtctagcctaggctgggttgggactagggcttggctcattcattggcaaaggtagtagcggttgtctggaagctcacagaggccttctacgggagacttaggcagtggctctgaaggcaaaggccttctccatgctccctatggtggttggagatgaaagagacagtccttggttccaaattgtttactgttattcatcatgtaaatgaatatgtactgacttctcagagtgtaccagagattaaataccttttgtgggaaagaaggtctaggaaggggagcttattggctaacccctcagggcttctaggtgcttcattagcatggagaactctgtttttgggctacatggccacaggtcgcatttccttatgtgggaagtgtgacacatgttccaggccaggtatctggaagggagcagggagctgcctaccctctcaggtgtgtactcaagattccagggactcagacccactctaccttaccaggtttcctgccaagctccattgtcccacaagggctctgaataattagaagccttgctatccggtattattcatcttgaagagcccccaccctacatggtgactagtcttccttataaaacccctcattcctttttgggatattttcccccaaaatcttttttctcaaatcatcttagtttttaaaattgatatgtagtaattatatgtatttataaagtgtgataattccatgacaagtattcaatatgtgatgctcaaaccaggaagaaacatttctacctcattagacactgatcactggcttatactggggttctcaggactccttggttctttataacatataataagctgctgtaaaccatagtagtttggtaccctcttcatcctacccttcaccttaaccatatacactaagctcagaacaaagatgaaatgagcagttctaagttcctcatgaggtgatgagagaacagtttagattaaacttttgctgaagattaagaatgtctgtgtgggtggatggacagcatggttggtaacttgcttgccttgcaaacatgagcatccccagaacccacctaaaaaagccagacatggtagcctgagcttgcaatctcagcatgaaagaggaagagacaggtggattacaagtgctcactggcctaccagcctaggctacccgggaagttccagattagagagactcttaaaaattttaaaaaaaaaatcaaaataataagaaacaaagttaatggtgcctgagaaatgacacctctttccttcacactcacatacatgctcatccatgtacctgtgcgtaaacacacacacttgcacacgcgcacaaagaatggctatgatacaagttattttgtaatgataataaaataaatataaataataaaattcaaagtgggtatatcagcattgtcttagtcagggtttctattcctgcacaaacatcatgaccaagaagcaagttggggaggaaagggtttattcggcttacacctccatactgctgttcatcaccaaggaagtcaggactggaactcaagcaggtcagaaagcaggagctgatgcagaggccatggagggatgttctttactggcttgcctcccctggcttgctcagcctgctctcttatagaacccaagactaccagcccagagatggtaccacccacaaggggcctttcccccttgatcactaattgagaaaatgccttagagttggatctcatggaggcatttcctcaactgaagctcctttctctgtgataaccccagctgtgtcaagttgacacaaaactagccagtacaattgaccccttgtcaacttgacacacaaacacatcactagtaagcctcaacccttacattcttattcatccccaagatctaaacaactttaaaagtcccacagtctttacatattcttaaattttcaatctctttaaaatatccatctcttttaaaatccaaactctttttacaattaaaagtctcttaactgtaggctccactaaaacagtttcttccttcaagagggaaaatatcagggcacagtcacaatcaaagcaaaaatcaatctccaaccgtccaatgtctgggatccaactcacgatcttctaggctcctccaagggcttgggtcacttctccagccatgccccttgtagtacacgtgtagtcctctaggctccagatgtctgtactccactgctgctgctgctcttggtggtcatctcatggtactggcatctccaaaacactgcatgaccccttcagtcctgggccatcaattgcaactgaggctgcactttcaccaatggccttccatggcctctcacagtgccaagcctcagctgctctgctcaactccttcatgccttcaaaaccagtaccacctgggtgacccttacacattaccaagtccagccacagcataaggtacaactttggctatatctggaacacagccactgtactctcagaaaacacttcccagaagatgtcacctcaatgatgctggcctcttcttaatcaccgctaatttcttagctccagctaaccagcatcaatagtcccagtaatgcaaagtttttgctttagtagttctggtatcttgttaatcacagctgattcttcagccccagctaaccagaactacagaatcttcacaatcaaaacagcaatggccctgaaaagtctttaattttccctctgaatttcataagccaggcctccatcttctgcactgttctcaacattatcttccaagctcctaccaaaacatctgacagagctcttaacaatgaatggatcttcaagcccaaagctccaaagtccttccacagacctccccaaaacatggtcaggttgtcacaggaataccccactatgctggtaccaatttgtcttagtcagggtttctattcctgcacaaacatcatgaccaagaagcagttggggaggaaagggtttattcggcttacacctccatactgctgttcatcaccaaggaagtcaggactggaactcaagcaggtcagaaagcaggagctgatgcagaggccatggagggatgttctttactggcttgcctcccctggcttgctcagcctgctctcttatagaacccaagactaccagcccagagatggtaccacccacaaggggcctttcccccttgatcactaattgagaaaatgccttagagttggatctcatggaggcatttcctcaactgaagctcctttctctgtgataaccccagctgtgtcaagttgacacaaaactagccagtacaagcatcatcatatcaaattatcctgataggaaagcaaaccagccagtgaggggactagcaaataacttgggagaggagtgtgaacgggttggaaccaaaacaacctgtgttcaaatcctgcttcctccacggaaaaactcaaatgaccttgagcaagctactcactgtctctaaacctcagactcctcttccacgaatgagtgagtactaacatgcacctgacagggttgttagctttcctgtggctgtgacaagctttctgacaacagcagcttaaaggagtaagtgttattttggctcacagttccagagtacagtccaccatagtcagaagtcatgatggcatgaatctgagacagctggtcacattgcatccacagttgggaagcagagagaaatgaatgctagggctcacctcccttctacttgttattcagtacagcagcccaggccacaggatgctgtagcccatatctgtggtccatctccccacctcaataacctaatccaggaagcccatcaggagcatgctcagagatttgtctccaggatgctttcttaaacctcaagaaggtgttaatcaagttgattggtgggattcatgtaaaatatgggacctgttatacacatggaaaaaaatggattgtttattgtcgttgttttaaaaaatggtatagtcataattgtagaatctaaaatgtgctgagacttcagtgcattatttacaagtataaagatcacagtaaacctctaactaatcctttaaagggtatactgtgccagaagatagatagatagatagatagatagatagatagatagatagatacatacatacatacatacatacatacatacatacatacatacatacatatagatacatagatagatgagagagagagagaaatttattttaatttttggttcattggtgttttgcctacatgtatgtctgtgtgaggatgtcagaaacccagaaactggagttacagacaagtgtgcgttgccatgtgggtgctgagaattgaacctgtatcctctcaaagagcagtcagtactcttaaccactggtttggtttggtttggtttggtttggtttggtttggtttggtttggtttggtttggtttggtttcgggttgggttgggttgggttgggttgggttgggttgggttgggttgggtttggttgtgttttggttgtttggttggctgtctggttggttggtttgttggttgccttgatttggttttttaagacagggtttctctctgtatgtagctctggctgttcccaaagtcactctgtagacaaggggccaactacctctgcctctcaagcgctgagattaaaggtgtgtgtcaccaccgcctggtgccaaaagtagttttattgcatgttgaaatgctaatacttagggcacattaggttaaataaaatatgctatcagaattactctccctcatttctttgggttctcgatgtagctactagagatttaaaatgatgactgtgtgctcacagtgctggtggtctgttgtttctctggggtccaatgaggatatatggacaaaggctggctgaccggacagtgcatgaggtggctgcctcttagtattctgtctggcttgcttacctcttcctctccatgcccccagctccttctaacctggaagtgcctcagtaacggctccctgatgagtcaagtcagttttcctcagaaatcaactctatgccctgactgctctctggctcaggtttctgatggcagatgttgggcataatgaccagttcattttcttcccggaagaatttacattcattcctgctgatcacagtccaggctcttaacacatctttctctaaagcagaacaattactggagacaaacagtgcagccttaattgtcacagataaggaagctggaattctgagaggttgactatttaataccagtcacacagtaaagagaatgagacaggaaagtaattttttgtgcttcttgatgcctgcagcctcttcccaaagtggatgagcttttgaggagcaagtatggacagaggaaatcaaggcccccaatttggttagcctctcttcctcacaggtggctcttctagtcctttggataggaagtttcgaatttagagcccagaatcacagccacaagatgtagacaactcaagctgaatcatcatctcatcagcatcttccagacaattctgagaatataagttaaaaaaaagattaaaagtctaattgaatatttctcaagagtctgtcaccacagaatgaaacatttgagcaggctttcctttgacccaaaaccatcaaagaagaaacactcgtttttcctttgtctttaagtacagcctcgcactgcatctaaataaatcttagaaactgaagggtccctttctccagttgcccactgccctttgggctgtaaaaggccacagtattataagaatgcttttccctctggactgatttgcttctggaggactttttacctgcaactggaagataaacaatgcaataaaacagatcatccactcacagaattgtcatctatggggctagagagatagctcagcagttaagagggtgtgatgctcttgcaaatgaccctcgtttggtttctcgcacccacattgcagctcttagctgtctataggctccaggttcttttgggcctcctcaggcactgcatacgtgtggtgcacatataaataaagacaaacatccatccacgtaaaacataatttcttaaacttggcatctagctcaaaatatctctgctatatctttctgcctttaactgctaatactgcatgctgcagagattgctgagcagtagtcaggagggcacaccgctctcacagaggacccaggctcaaccaccagcatccaagtcaggtggctcacactgtctgtgtatccagctccagggaagggacaccttcttctggccccagagggcaaccacattcgcatccacattgccataaaataatacaatgttaataatcagttaattttctgaattctgaaatctcctgggtcaagacaaagccgtatcaattaatttggcctgttatctattttaggaaaagtaaatagttgtgtgtataacataaacataatttccatgtgcacataaatagataggtataaacaagcagctgcaaagagtgttagcctctgacaataactctcacaataagtgtaaaagagtgcactaatatcccattctgtggatgcagattgaggctgggaggggtacaccagctgcaccagtaaccgtgctgacagcaaagaagcaacaatggagctgggactcagacatcctcttcccacctcccccagatctgggcccttcccacctcctccctcagccaacaggagcattcagagcaaagcaatctttgtgcttctggtgggaggagaagccatcatgacagacccagtctgaggttgacaatgctggcttccccaggcctgcatagggtcctcacacatccgagcatggtgagttcagagcggttacagaagaggctgtggacaagcttaatcacagggattcaatggccactgtgagggggaaggggtagtgtggcactcatgataggtgtttccttggcctcaaaacacctctcagcaatctgctgtgacatctaaaccttccatggccacatccttagctcctctttggaaagaggtttagagacagaccaagctgtttggaaggaacagaaagaggctgacagcaagatggagttcaactctgtcctgtacgggcctgtggaagtcatttaccaagatcaacggcgacctttatttgccttcccatttgctgctaaatctcccctccctcaacttctctagattgcccgtgagtatgactgagcacttcattgaagaaatcaccagaacgtcaaatagaaatcatatttaaccaaagacagattagaaggtaaggaagtgataggaacagaccttggtggcaattttccaaacaagagtaaaataatacttttcggatgaaagaaaccttgattcatctctttgaatttcctcatgtgtatgaggagcaggaggggaagggcctccgttacagacaaattcatggccacaccaaggccaattccacccctttcttcttgaaaaattaagatgttatttaaatgtaagccctgtctaaatgactgctatgttactgtaaaaagacatgatgaccaaggcaaaacacttataaaaagaaagcatttttgaggagctttctacagtttcagagaattagtccataatcatcatggtaggaagcagacaggcgtgatactaggacagtagctgagagctttatatcctgatccataggcaggagagagagacagagatagatagacagagagagacagacagagagagagagagagagagagagagagagagagaaagagagagacaggagagagagactgggctgggctgggcatgggcttttgaaacccaaagacctacccctagtgacacatgtcctccaacaaggccataagtcctaagccttcccaaagagatgaactaattagtgattaagcattcaaatatctgaggctatgaagcccattctcattaaaagcaccacatgcccatagatgattgtcagttttagtcagagaaatttcttcctgctatgggtagtggttactacagaaactccttcatagtctattagctgaaataagggatcattgaaagctcaaccctacatagtatatctgtatcacttctctttcaaggcttagggaatactttgaaaaacggagtagtgggggttgtggaacctgttgtgggcagttccaagattgaacacactattgttccatcatggagaccttccctgaggatctggaggctaaagatggttggggagctggggagcaggagacaacagtttcttcagtgatgtggccactaataaggcacccaggctcctataaattacttcttacccgtgttcctgtaagtaatttctaaataactcattggttcacaaatctatttacagatctatgaatgtctactgaacacatttgttctagttttcttctctgttgttgtgataaatcccatgaccaaaggcaacttggagagaaaggagtttatttcagcttacagtccatcaccaggggtagtcagggcaggaacccaaggcaggaaactggaggcaagaactgaagcagaagtcaggaagtggtgctgcttactgacttgctctctttggcttggtcatccttcccttctatacaacccaagacaccttccctggaatggcactgcccactgtaggctgggccatcccacaacaatcactaatcaagaaaaggagcccatagacatgcacacaagctaatcctctggaggcgttccttcagtcgagtttctctctcctaaggtgactctaaattgtgttgggttgacaaatactaaccagcacaatgctaaactgtaccaatttttaaacgaagtccactcttatatcaatgtaaaatatatttcattcacttcatataaacgcaatgcataatgctttgccattgcagatgccattcaaacattaattcacatgtgtaatgtcacgccaccttcacattcatagcttgcagatatccatgttacatatattcagttacctgcatacatgtattacatataacatttatcctatcaccaaggacgtaacagattaactcattcatcacaaaaaactctatgaggaaaatttcattattgttattcatataagtcagaggcagaaaactaacacatttacctaaggccataaagatggacatgagtaaagcctgggtggctttatgagtaaagttctatgaaaattgtagtactcagggaatcaataagaatgtagctgcaatagtcatcaaacggcttttcgttctttgatacaaagttgggtgtatggtttcctttgcaaagacatgcaggttgacagagggctttggctttggaagagaactgctctggagtaaaattctgtttcatgttgctttgtgctatgtggcctggaaaacgttgctttctggaatatcgatcttctctctggtaaagagggctttatgaagagtccctattggaactcaatgaatgtgttagttacatagttacatagaagtgcctcgatcttcatgtctgtcacggccatctccagttctctataaagagctcttactggaacttgccccatcgattctcagctgaaatagttgcactagttaatacaggctcagagaacagatgatacttccagcacgacagcgtcatttgtacccatccaggcatctcacatgagtcatgagcaggttcttcttccagcagctgtgtctgggtaatgcccaatagagtgacatgtttaacaattaagctgcttttaaatgtgtagcatgcaaggaatcaaaatgaacaccagttgtgattatccacttgaagggctcattaggaaatgaattatggaatcgtggattaattaagatcatgtagaaatgtgttttccacttctgaaaagaactttttaaagaaaagtataaatcacacaaaatggcttgatgtggtcagtttgaacaacaacaaaaaaatctgccatttcctccaagtggcaaaaaaaaaaaaaaaaattactgagtacccactgaatgtaggcattatttcccatcatccctgtggccatccgacctgatttctgttattactcccatattcttgatgaggaaaatgaggctcagggaatttaacagcatattgaggtaatataatcactatacaagggcctggggcttcaactggaaactcatttcagagttcttccaagtgaaccctgagatggccatttctggtgattttgggactgtagatgtgatactagatatacttcactcttcatgaatatgaacatcactctcctcttaaggacagtcatccagagcagcctgacttagcccatcccctcttctggactgagaattctgtaagagggatggtggtgtctactatattcattattgcatctccatcaccagacccagagcctgccatgcagttgcatcttcaatccacatgtcggatgatgaactaaatgctgaggtaaataaatgaactgaggtcaacctgatcgtttcttggagatggtagagttgggaggaaaggaaacattttggtgttagtcatacagggacagaatggagctgctcccaaagctgctgagggccattataagccaagaaaagcagggttctgctatttaacttgggctggcatccttcaaaaccacaaattagatgtagtgctatgaataatagttggctatgtgtcacagagaccagatcataagtgaccaccacctgtcttcaggcacaaggttccttgcatggtctcccagatgttgaaaaatcatcttcagtgaaaacttggaaaatactttgccacttgtctgattgttgtcaaggagccgttggctctcagcttcctcattaactctccatctaagtggcagatgtaccacttgctcagtctttagacaccaagtgggagaaaggttcttagacctggtataagacaccatcgagactacacagtcttccagatctccaaatgaaacacactctgattaaaaggctggaaaaacccatgagagagacaggagacatagcaagggagaaccaaggaaatattggccactacgtcaaatatccccccccccccaacttgtttttcaagactgggtttctgagtatagctcaggctgtccttgaactcaccgtgtaggccaaattggtctcaaattcagagccccacccaccactgactcctgagtgctgggattaaaggcatgtgctgccactatcaggcttctaaaatgtttctgttgtcatttttaagaacaatgatgtgatcaataaatagcataaaattaaacaagctgagaggtccagtaagatgtggcgggacaaggaactgtttgaggcactactgagaaggtccagcaaccccaggagaatgagcctgagcagctttgggagtcgcttcattctgtccctgtgtgacaaaggcaaaagcgttcctttcctcccaactccaccgtctgcaagagatgaccaggacagaggttgcttgttcttctgactccacctgaagagcacagtgcttagggcaaggctgatgttacgctgtccacagcaggcagtagactgaggcacacaatagttcttaataaaatttggcaaatagacactcaaataaatgaactcaaataaagtacatagttgattttggaggcaaaaagcacaacaggatttaaaaaaatcactcccaacaaataatgttttctaaagtaaatcacttgatctaaaattactaccatgcatttggctttcccttcaaacgccctggagccaaaacaactcaacccttacggagagaaggtataatttgctgtctgcaaagataaagcctcacccattagatgcaaccctaaatgcctgtgcttggactgaccttttgcttcgccaccgtgatgtcattagtgtgataattttatgcaagattaagcatgtaattatgtgttaaatactttcctccgctcctgcttgctcactcaataaagcagagtgcattaggagtgtcctacactagagctccaggctactggcgttctaaacgacggcctctctgctctttctcagctcgatatctcacttgcgcttgcagctgtaccctcaaggcccagcactgcgagctgctagcactgagaagccactgcatggagcaactccagcagaagctcctcgaatgctttccacttaagtaaattcagaacccaagaggttgtagcaggatttcacccattggctccccatcagagttacctggataggaactgctctgaaatgctgagccatctctccagcctgcagcaccataattcttcaataattctccctagacgtctccagcgtacaaccaaactcattggcattaccatcccaatcctcttgcttaggacaagtgtcagaacttagcgctaatgaagaagtagtttgatcttaccatctcaatagttcttgtgacagtcactggccccataggacaggaaagaattggtttgctccctgtgcaggtacaaagcaacttaattggattttctttgtgaagaaaatccaatccatttatttttaagtttatgtgtatgtagtgagggtggcaaaacaaaggaaagtaatgcttagtatgtgcttatcacatgccagtatacttgatatacttgcaatgttcttgatatcacatgcgatgtactggaggtcctcttgcatatattgttgacttgtcttccaagcctggtggcagaaattatcccttccatttttccaccaaaacttggagctgttaattggcttgtacaaagtcacacagttggtagatgttgatgccaagaggcgcgcaaacacctggaccatctgctgttcgcactcatcgtcttcttaggccatgctgccctttgcaaaagatccttattgaatgataagtcagccaacaacctaaactttccgagtaagtcaatgagaggagaggggagacatgatggttagagaagaagtgtagaagatgcccaggtctgggatgtagctgaattggtagagtgcttggctgaattcatctgcaggcacaaaggccaactgtggtggcacacagctgtcactccagcactcaggaggtagacagaaggatcagaagttcaaggtcatcctatagtacatagataatccaaagctagcatttgtctcagatagatagatagatagatagatagatggatggatggatggatggatggatggatggatagatagatagatagatagatagatagatagatagatagatagatagatagatagataggctaataaacagacagacacacagataggcatacaaacagacaggcaggcaggcaggcaggcaggcaggcagacaggcaggcagataaaatagaagatgcaagacagcctaagctaagggaaaatttgagaacatgccacatgcacagtgtcagaacatgaggccaaaccaaggcaaccctcatagtttctggtgctctcttaggctgtcaaagcagcagagccatttattgccaactgtgcacttggcgcatcagacacagacctgcaactgcaggtgctgacaccctacctaacaaggaaagtggagtgtgtacagacaagaccattgtgccatatttagtcctgggagtggggacaaggaagctgctcaaggccatcagagattgctccataggatggggatctaggaggtggctacccagcagggaagtgaggcagaaggaatggcggcagctgagtcaaggaggcagaaacaaagtggtggactcggacatggaaaaggccttcagtcaattcctgagacaaggaaagggccccactcttgctgactccctgctttctttgaagactgggaaatatgtctttctgtatagatgaatgtgtgtgtgtgtgtgtgtgtgtgtgtgtgtgtgtgtgtgtatgtgtgtgtgtgtgtgtgtatctatgtgtgtgtgtgtgtgtgcacttgcatgtaaagccagagatcagatcagctgtaggtgtcaccctctggaaccatccaccttgttctttaacacagggttttatttatttatttatttatttatttatttatttatttatttatctataacttgccaagtaggccatcaagtcccagggatcacctctctctcccactccagtttttggattacacacacacacacacacacacacacacacactaccatgactggttttgtatatgaatagcaggaaccatgttcaggtcttcgagcttgcaagcacttgcctgactgagccatcatcccctgatcagaagcaggtctcttgggtctgtggtttttaatccacactcacctgcagccctgaagctgcgatggggtggtccccatgcctgtccccatgtcactcaacagggcagtagacatgattctcccctgacccacagtccagcacagctgcttcgcatgggattccaaactgcaaatgtttacagatttcttatgctcctgggtcacttcctgaatgacagttgaatggaaatgttcctgcctcagtgaggagagctacgttccttaacataggggttcaggaggactatctcctgtctgggagggaatcttgcagcttctgttgacacggtttccttgaagcgtgaaaatcattcccaacctccttaggatctgtatactatggctttaaaaaagcagaaatggcctttcactttagttaatggcgaacttagaaggttttaaataacggtttgtcttcatgaaagaaactggatagaaaatttcaagtctgcttattggaataacgttaagtggccaggaagccttttccaatgggctgcagacagttaattagagtcaacatgcttcatttcctctttctgcatcaacttttaaacagcatagccaaggtgtcttcctgaacagtgacacccagtcagaaagtcccttgaggacatcagatcgctgcagccccttcattttgaattatttcaaagtacttaggacttctacagggtgtctattaagtctggcccataatggataatgtggcagtgcaaactagcttcccgatccacctatgctaaaactgggcagctttcttttgtctcctacactacgaacactttgaggggcttactagaggagctgaagaagtctacagtccacactgaaataactttgcaaaaggtcaaggcaatcttattatgatgtaacacattcagcttacaccaaacagccctgatctggagacccccggattaagagcagactttatcctctttctatttcataccttccagcgggacggctctacacttctgatcctcctgcctccgctgctgaggttgcaagtgtaccacacccagcctagagtcaatttctgctcttcctacagctgtgaagggaatctatccaggtggagagtcacatccctccattatcttaggaggccatgagagacctctgcatttgcactggtgactcacctctgaggcttcgctctctggagccgacccaggggactcaggagaaccccatttccaggtctgttcctataagcccagcctatggtgaccaaccatattcttagattcattcttcaatgtcctgcatgtcaaaataatggaactgagaacgatcttaaataatttatctcaaactccatggataccagggagagttggaaacatttattgatagcactcagctctagaaaagtcaagtgactttatcaaggtcatacagaaaaaaagccagcctcttcttccaagctcttgctgcttagtgttgtctatagtgtcagcctcaccctggcgctccttagtgattcagagttctgggccccactcagacccactggctcagctctgagaagtcctgaactgattgtgggtcactacggagacaatgagaatttagggcaaactgaaacttgaagtacagtttacctttcctaaatataaccagcagtgggggtagggctctggatgtaggcaggaaatgccattggttgtcttgaaattatgtcactccctactcttgtggttttcatggcataaccctaacatatggctatggcatcatgtttcatgagtagacagcgtgtatggaacattaggcatgggatagaaaatacagcacacagtaactaaccctgtttccagacatagtcatttttaatcttagcccttaccaaccatgtacattgaaggaatcacttttcacccttcctgttattaatgcactgggtgtcatttagctttcatgttgtactgtcatctttaggatattttgggtttctatctctctagaaattattaagtagagggctggagagatggcagaggacctgagtttggttcccagcaccctcatagggcagctcagaactgcctgtaactcctgctccaggagatctgatgccctcttcaggtctctgggcaccttcctgcatctgtatatgctccacacatagataaaaagtaaataataataataaataataataataaataactagaaacagtaaccttttttcttaaagaaagaaaattacagcagaaaatactgaacaataactgttctggtgctgtgtttagagacaagggaactcttcccaaatgtccaaccaaagaacacagcatgctgccatatcctttcccagaccccagagccactagacacacatggctgctcacatctctgtcagtatctctggcaagctctgctgtggtgagctgagcccacactggcaacagcgtacttaagggacaatgtttccctgtaatctagtacttggaatgctgaggcaggagatttcttagtttgaagccaggttgagctacaaactgagaccttgcctcaaatgaagaaaaaaataaaaataaaaaaaaagatattttactcctaatatgtcacatctgtgaatagtaaggaaaaattttgaagatgaaagaggaagtaaaattttggtacccaaatctgaactaaagtttggggaactgcatcatactcaaggtgaatccaaagtgattgtgtgttgtaagggaagcattgagattctgacaccagtgagaaaaagcaagattctgaaaggcaggctccccagccggccagggcagagatagtaaaggacaaagccttataaaaatggaatgcaaactgtcatcggagacacttcacccagcaactgatggaaacagatgcagagacccacaaccaaacattaggcagagctcaaaaaaccatttgaatgtgcgggaggaaggactgtaggagccagaaggatcaaggacaccacaagaaaacctactgaatcaactcacctgggcccaaaggggctcacagagactgaactgccaaccaggaaacctcctggttgtgtagcttagtcttcttacaggactcttaaaaataggagcaggggctgtctttgactctgatgcctgcttctgggaccctttcccctaactgggctgccttgtccagcctcaacaggagaatttgcacctagtctactgcaacttgatatgccaaggctggtgatatcatgggaggcttcctcttttctgagagaaatggagaaggagctgatgggggtggtgaggatggggagaaggactaggaggaggaggggagcaaggggaaactgtggttgggacttaaagtaaattagttagttagttaattttaaaggaggaatgcacatttctgcaggagaggccaggctttggtggagtttctgccagtgcagagtcagcacccccaaggcctaaaagcctgggattatcctagagagctgaccctctgagatgtcactgttgacacagagttccagctaaccccagtgtgtcctctgcaggtctttctgccacttccccaggacttccacagtgaggaaaggagctgcaggaccaacatcctctaagatgtttatatggaccagtggccggacctcttcatcttacagacaggacgagaaaaggtaattccctggacccgggtgctcctgccagactttatggaacactgatggaacaagatgttggctgctctccttgtcactgtgatgagacacccgagacaacttaggaaagggagggcttacttggtgcacagttggagagtacggtccatcacagtgggggccatggcagcaggagtgggaggcagctggtcacattgctcctgtagtcagcaagcaaagacaatgtttgtactccacttgctgtctccttatccagcccaggagcccaggctcagagacactgctgccagactcaaagtgagtcttccctcctgtgtgcactagtcttacgtcaccttaacacaagcctgagtcatttgggaagaggcagccatgactgagaaaatacccacacccaattggtctatgactgaaaatgcctttaccacatgccagaggcttagttccatggttgttacaaatcctgtggatattaaccatcacagatactgaatatcatgttctaaattttgggaggggatctacctcaggactggcgcttcagacactctggcctgtggcctccatctctcttgcaggctcactcacagcaccagactctgcaagactgtgccttgtcagaaatgcccccccacacactcatacacctaccaatcttttccttctctaaccccagctctgcctgaagacacccaatcagaacttgaaccccactcccagcctcatcatcctctttacccagtcagatgtgactttgttgtctagtgaatttccagagccttgcactgtgcccggtacacggtagatactgaatacactctgactcaagtgatgaacatcacatgtctaggcaccaagcatatggcaagaggaaggctgaacttcaagagggttcaaggaggctcagcaggttttcggatcccttggtgtgcatgcaagaacggcttagggaagggaacaaatggagggagagaaaagacaagaggtcaaagtcacacaatgaaaactgaatgggttatgcagctcaacccagccacttctcttctccttgggtttagtgagtaaatgtgttcataaaattatataacaccccggtgtgtgtgtgtgcggggggttgcacatacaagtgtatgattgatattgagtgtcttcttcaatctctctccaccttggtttttgaggtatgacctcttactgagcctggaattagaaggttggctagactggttagccagtcttctgcctgtttccactccatacccagtgctgggttcacagatgtgagtcactgttttctgctgtttcatgtggctattggggatctgaactgaagccctcatgcttgcatgacaggcactttgcccactgagctccaggtccctctaccagtttttaagtgtttgttcccctctgtaaccagtgcttggaactctgtaaacagcccactgtttccatgttcttggcttcttagccatagaattgaaataaaggctcatacacattgcaaagtagcaaaggaactttattcagaagcaaaacaacagcacaggtcagaaataagtgcatttcaagtaggcaagagactgcatagatgacaaagtgttcaaaggccctaacactctcctccttttacggagtgaagagaagcctgttaccaaagagtacactgaggtggttctctcttttgattgatagatattagatcataaaatcatttttataccgtgtatgcccttcccataatgcatctgactttaatcctatgcacactcacgcacataatcatatgatggtatacaggggagtctccttaaaagttgaagaaccagttttgtcttgacattatcatgcaccgaaaccaactcaggtcagatcatccctgctacccttgtgcatgaatgtgttgaaaatatactgactagaagctgtctatttggtggctataaaaggtagaaacttacatcattgtttaaaataagtgcatgcagcctgatgcacaggggctgggggtgggcgggtgcagggggaaagggctgcctcctggttgctaggtgcctttttcagagatggctacacgtgcatattacatgctgatgagggtcttagctttccaaatgcattgttaaaagatggatatgcagagcccaagccaggtggagtcccaggttgctatgctattccctatgcttgcctgcctcctctttgctttcttcctctacacctctttgttcctcattgatcttgtactgttacttaagtagtgctaagttttaagcactcctgactttaccagcattcttcaacttgcatgacacatcaggaagaacataaccgaaatcagaattgagaataatactgggaatgtataagggggtttattaaatattgttcaaggagcttgtttttcttcttaaaacgtgaactgcccacagataaaattccttggaaaaattccagaagcagtactgtcataataagtagctatttatagtagaaatttgggggtcgcttctcacagtagaaaatctgttaaataatgaattatatttatcaattagtactttaaagtgttttgacataccattgctgggggaggaggagcaagttttaaagttgcatgcaagtgattattgcatccacacaaataacttctgtatttccaatgctttgtacgtctcatgttaccttggttatgggaaaacagttccgtggtgtttaactgggacgctgtatcccagaaggcaactagcatttgaacaaagactaatgctcaccccgacaccaacgatggtgtattgattactttcttattggtgttaaaaacaattgaccaaggaaacttaaggaaggatttattttggcttatagtttgagaaagcaatctatcacagaggtaaagtcatggaggggaactcatggctaaaataagtgccatgcagcccagggggagcgtgcggcgggggtgggggtgggggttgaaggggaatgggaggggaagggctgcctcctggttgctaggtgcctttttttgagagaccagagcgtgaggcagccggtcacactgcacctgcgcctgcacctacctctgtgcctgctgtcaggaaatccgaagagataaaaactggtgctcaccttctttctccgttttattgagcctgggataagtgcgccccccccccccccacgttcaagcagagacttctttcctcagttgaacacttctggatacgtttgtgtttctgtggtgattctaaatacccctcatttgattatgaagattagccgtctcacagatggactgaaatctcactttctttgattctatctgggcttccaggtgctcttgttcagccaggcgtagagatgaagatgtggtcaagggaaggcagacaaactaaacacaatcagctgggaatgtgggctgtgagaacgtgcctgctctgcacccgtaggttgtttctgcttgcttccgttagccgtgtaggctaagaatgtgcacattgacgcccctgttcaacaaacgcacttattactttaaatcccataattactgaaatcatccttgaaaacaaaaattaaagttataatttacatgtcagagatccttattgatgcagatgagcaacatagttatatgttcttctaactctcaagaattactggtttgtcaggcatggactggttttgtgtgaacatccaaaatcccacattaagaaaacaaacaaaaaaaaggaaatgagaaaattacatataaaagatggggtttttaacataggaacagcaaacactgttaactaatcagcttaaaggtgaagcccatttaggtatcagaggaagtcctaactttatgtcaacaagcctttttctgattgaataggattctctgcactggcctctgaggatggaaagaaaagcaatctttaaaaataatcataatccagaaaaggttctgggacaaaagacagattaacgaggaaaacacaaggaagctcattaaagaaaacatgcagcatacatcacaagggatagagagaaccgccaaaacaggggctggcaagctgtcttattaaaatgtttcaatagagtgagagattgtatagatgcaacaggattaggagaggtgggaaactgtggaagaatctaatctggctggctggtcaggtcacccctcgactgagggaggagcctccttcccaacccaccaaggatggaggaaggaggaggaggacaagaagtaggtatatcccttgttttattaatcctttcccagactttaggtaaacaaagaggcagtcagaccctgtgcacttaaattatttttgtctcagcaaggagaaatagatctgtttctttcacctacaatctcctaactccaagaacagtgcattgtctccctcagtgaactcagtgtgcttctttaatgtccacatacactgttttctggcagacaaaaagactactgtgtattctttatcagttttggtttgacatcactgtgagctagcctgccttccttccttccttccttccttccttccttccttccttccttccttcctttcttccttcccttccttccttccttcctttcttcctttcttccttcctcctttcctttcttgcaagctcctttcttccttttctccttcttccttgcttgcttgcctgcttgctttgcgtgtgtgtgtgtgtgtgtgtgtgtgtgtgtgtgtgtgtgtgtgtgtatgggaggggggcaatggggctgagtgtgccacagtaaagtcagaggacaacttgtagggccaagctcttcacccacatggattcgatcttgaattccaaacacctttaccctctggaccctctccccagacttctgctcaattttaacaatgaattatctgagaattcttttgtactttctttatagctatctcactagtaaataataagctcttgtttcttctctatttataaatataatatttctttgttattcttgcccaattattctagtttatgtttcagtaaattaaaataaagctggtgacagtggacattttcagtctgatttgttaagtggggtttttcaatattttaccattagataattgaatcaattatatcacaggtagtttttctcggccttttattgcattgaggatgttcctacttctaatttgacaatagctcttaccatgaatggatgttaatatatttctaggttatattattatcacattatcagcttataatgttttttcacatattaataaaaatctaatagtgaccaatgttatatttctaaaacataatagtagtagctttatcatggtagactctatctttttatacatttaggtttggtgaactaaattcttttaggttttatatttgtggttaggaatgagataagcctgtagttttccatcacatgtggctctgactggcgttggtcttagaacttgccaacctcataagcaggctggctggcattctttctctgtactctggaattatctgtaccatatagcttgggatcagctgtaagttgtaagagctttgtatttctaggaccaaaatacttttaattatttaaaacttttagctatttgaaattttaatagtttagaattatttaggtcttctggctattttttgagtattggcttcagtaagttacatatttgtaaagcattgttctatctctcagcaagtttagtatctccaagtttctaaatgtattactgcaaagttgttctaagtgtctcctttctttttttttttttttttttgtttttttttttttctgctttcattctttttttttttccattatttattaggtatttaactcatttacatttccaatgctataccaaaagtcccccatatccacccacccccactcccctgcccacccactccccctttttggccctggtgttcccctgtactggggcatataaagtttgcaagtccaatgggcctctctttccagtgatggccgactaggccatcttttgatatatatgcagctagagtcaagagctccggggtactggttagttcataatgttgttctacctatagggttgcagatccctttagctccttggctactttctctagctcctccattgggagccctatgattcatccattagctgactgtgagcatccacttctgtgtttgctaggccccggcatagtctcacaagagacagctacatctgggtcctttcaataaaatcttgctagtgtatgcaatggtgtcagcgtttggatgctgattatggggtggatccctggatatggcagtctctacatggtccatcctttcatctcagctccaaactttggctctgtaactccttccatgggtgttttgttcccaaatctaaggaggggcatagtgtccacacttcagtcttcattcttcttgagtttcatgtgtttaacaaattatatcttatatcttgggtatcctaggtttggggctaatatccacttatcagtgaatacatattgtgtgagtttctttgtgaatgtgttttctcactcatgatgatgccctccaggtccatccatttggctaggaacttcataaattcattctttttaatagctgagtagtactccattgtgtagatgtaccacattttctgtatccattcctctgttgaggggcatctaggttctttccagcttctggctattataaataaggctgctatgaacatagtggagcatgtgtccttcttacctgttggggcatcttctggatatatgcccaggagaggtattgctggatcctccggtagtactatgtccagttttctgaggaaccgccagactgatttccagagtggttgtacaagcctgcactcccaccaacaatggaggagtgttcctctttctccacatccacgccagcatctgctgtcacctgaatttttgatcttagccattctgactggtgtgaggtggaatctcagggttgttttgatttgcatttccctgatgattaaggatgttgaacattttttcaagtgcttctctgccattcggtagtcctcaggtgagaattctttgttcagttctgagccccattttttaatggggttatttgattttctgaagtccaccttcttgagttctttatatatgttggatattagtcccctatctgatttaggataggtaaagatcctttcccaatctgttggtggtctttttgtcttattgatggtgtcttttgccttgcagaaactttggagtttcattaggtcccatttgtcaattctcgatcttacagcacaagccattgctgttctgttcaggaatttttcccctgtgcccatatcttcaaggcttttccccactttctcctctataagtttcagtgtctctggttttatgtgaagttccttgatccacttagatttgaccttagtacaaggagataagtatggatcgattcgcattcttctacacgataacaaccagttgtgccagcaccaattgttgaaaatgctgtctttcttccactggatggttttagctcccttgtcgaagatcaagtaaccataggtgtgtgggttcatttctgggtcttcaattctattccattggtctacttgtctgtctctataccagtaccatgcagtttttatcacaattgctctgtagtaaagctttaggtctggcatggtgattccgccagaagttcttttatccttgagaagactttttgctatcctaggttttttgttattccagacaaatttgcaaattgctccttccaattcgttgaagaattgagttggaattttgatggggattgcattgaatctgtagattgcttttggcaagatagccatttttacaatgttgatcctgccaatccatgagcatgggagatctttccatcttctgagatcttctttaatttctttcttcagagatttgaagtttttatcatacagatctttcacttccttagttagagtcacgccaagatattttatattatttgtgactattgagaagggtgttgtttccctaatttctttctcagcctgtttattctttgtatagagaaaggccattgacttgtttgagtttattttatatccagctacttcaccgaagctgtttatcaggtttaggagttctctggtagaatttttagggtcacttatatatactatcatatcatctgcaaaaagtgatattttgacttcctcttttccaatttgtatccccttgatctccttttgttgtcgaattgctctggctaatacttcaagtactatgttgaaaaggtagggagaaagtgggcagccttgtctagtccctgattttagtgggattgcttccagcttctctccatttactttgatgttggctattggtttgctgtagattgcttttatcatgtttaggtatgggccttgaattcctgatctttccaaaacttttatcatgaatgggtgttggatcttgtcaaatgctttttctgcatctaacgagatgatcatgtggtttttgtctttgagtttgcttatataatggattacattgatggattttcgtatattaaaccatccctgcatccctggaataaaacctacttggtcaggatggatgattgctttaatgtgttcttggattcggttagcgagaattttattgaggatttttgcatcaatattcataagagaaattggtctgaagttctctatctttgttggatctttctgtggtttgggtatcagagtaatagtggcttcataaaatgagttgggtagagtaccttctacttctattttgtgaaatagtttatgcagaattggaattagatcttctttgaaggtctgatagaactctgcactaaacccatctggtcctgggctttttttggttgggagactattaataactgcttctatttctttaggtgatatgggactgtttagatggtcaacttgatcctgattcaactttggtacctggtatctgtccagaaatttgtccatttcatccaggttttccagttttgttgagtatagccttttgtagaaggatctaatggtgttttggatttcttcaggatctgttgttatgtctcccttttcatttctgattttgttaattaggattttgtccctgtgccctttagtgagtctagctaagggtttatctatcttgttgattttctcaaagaaccaactcctcgtttggttaattctttgaatagttcttcttgtttccacttggttgatttcacccctgagtttgattatttcctgccatctactcctcttgggtgaatttgcttcctttttttctagggcttttagatgtgttgtcaagctgctagtatgtgctgtctcccgtttcttcttggaggcactcagagctatgagtttccctcttagaaatgctttcattgtgtcccataggtttgggtacgttgtggcttcattttcattaaactctaaaaagtctttaatttctttctttattccttccttgaccaaggtatcattgagaagagtgttattcagtttccacgtgaatgttggctttccattatttatgttgttattgaagatcagtcttaggccatggtggtctgataggatacatgggacaatttcaatatttttgtatctattgaggcctgttttgtgaccaattatatggtcaattttggagaaggtcccgtgaggtgctgagaagaaggtatatccttttgttttaggataaaatgttctgtagatatctgtcaggtccatttgtttcataacttctgttagtttcactgtgtccctatttagtttctgtttccacgatctgtcctttgaagaaagtggtgtgttgaagtctcccactattattgtgtgaggtgcaatgtgtgctttgagctttactaaagtgtctctaatgaatgtggctgcccttgcatttggtgcgtagatattcagaattgagagttcctcttggaggattttacctttaatgagtatgaagtgtccctccttgtcttttttgataactttgggttggaagtcgattttatccgatattaaaatggctactccagcttgtttcttcagtccatttgcttggaaaattgttttccagcctttcactctgaggtagtgtctgtctttttccctgagatgggtttcctgtaagcagcagaatgttgggtcctgtttgtgtagccagtctgttagtctatgtctttttattggggaattgagtccattgatattaagagatattaaggaaaagtaattgttgcttccttttatttttgttgttagagttggcattctgttcttgtggctgtcttctttttggtttgttgaatgattactttcttagttgttctagggcgtgatttccgtccttgtattgcttcttttctgttattatcctttgaagggctggattcgtggaaagatattgtgtgaatttgtttttgtcgtagaatactttggtttctccatctatggtaattgagagtttggccgggtatagtagcctgggctggcatttgtgttctcttagtgtctgtataacatctgtccaggctcttctggctttcatagtctctggtgaaaagtctggtgtaattctgataggccttcctttatatgttacttgacctttctcccttactgcttttaatattctatctttatttagtgcatttgttgttctgattattatgtgtcgggaggaatttcttttctggtccagtctatttggagttctgtaggcttcttgtatgatcatgggcatctctttttttatgtttgggaagttttcttctattattttgttgaagatattagctggccctttaagttgaaaatcttcattctcatcaattcctattatccgtaggtttggtcttctcattgtgtcctggattacctggatgttttgagttaggatccttttgcattttgtattttctttgactgttgtgtcgatgttctctatggaatcttctgcacctgagattctctcttccatttcttgtattctgttgctgatgctcgcatctatggttccagatctctttcctagggtttctatctccagcgttgcctcgctttgggttttctttattgtgtctacttccccttttagttctagtatggttttgttcatttccatcacctgtttggatgtgttttcctgtttttctttaatgatttctacctgtttggctgtgttttcctgcttttctttaagggcctgtaactctttagcagtgctctcctgtaattctttaagtgacttatgaaagtccttcttgatgtcctccatcatcatcatgagaaatgtttttaaatctgggtctagattttcggttgtgttggggtgcccaggactaggtggggtgggagtgctgcgttctgatgatggtgagtggtcttgatttctgttagtaggattcttacgtttgcctttcgccatctggtaatctctgaagctagctgttttagttgtcactgttaagagcttgttcttcaggtgactctgttagcctctataagcagacctggagggtagcactctccttagtttcagtgggcagagtattctctgcaggcaagctctcttcttgcaaggcaggtacccagatatctggtgtttgaaccagactcctggcagaagttgtgttccactcactagaggtcttaggatcacgtgtggaatcctgtgtgggcttttgcgggtgtcaggcgactcagctggcaaggtagcccggggctcgagtggagtggaaggggtttgtgccccagatcaagcccgggtagcctgcttccctatgtactgcagtctcaagttccgcgcgattggattggggcaggcgctgtgttccactcaccagaggtctcagggtcccgtggggagtcccgtgtgggcccttgcgggtgttgggcaagactctgctggcaaggtagcccggggctcgagtctcgagtcgagcggaagggacttgtgccccagatcaggcccgggtagcctgcttccctatgtactgcagtctcaagttctgcgcgattggattggggcaggcgctgtgttccactcaccagaggtcttaggatcccgtggggagtcccgtgtgggcccttgcgggtgttgggcaagactctgctggcatggaagcccggggctcgagtcgagcggaagggacttgtgccccagatcaggcccgggtagcctgcttccctatgtaccgcagtctcaagttctgcgcgattggattggggcaggcgctgtgttccactcaccggaggtcttagggtcccgtggggagtcctgtgtgggcccttgcgggtgttgggcaagactctgctggcaaggaagcccggggctcgagtcgagcggaagggacttgtctcctttcttttttttaagttatttttttaattagatatttcctttatatacatttcaaatccagaaagttccctataccctccccccaccctgttcccctacccacccactcctgcttcttggccctggcatttacctgtactggggcatataaaatttgcaatacaaaggggcctctcttcccagtgatggccgattaggccatcttctgctacatacacagctagagacaggagctctgggggtactggtaacccaataacaaaagaagtcattagatatgcacttactgataagtggatattaacccagaaacatagaacacccaagatacaatttgcaaaacacaagaaaatcaagaagaaggaagaccaatgggtggatacttcatttctccttagaatagggaacaaaatacccatgaaaggagttacagagacaaagtttggagcaaagacaaaaggatggactatccagagactaccccacctggggatccatcccataatcaaccaccaaacccagacactattgcatatgccagcagaattttgctgaagggaccctgatatagctgtctcgaatgaggctatgtcagtgcatggcaaatacagaagtggatgctcacagtcatctataagatggaacacagggcccccactggagaagctagagaaagcacccaaggagctgaaggggtctgcaaccctataggtggaacaacaatatgaactaagtgtctcctttctaaagcatgctgtgcccacaattatggtgttttaattcatcatatttattttggatttgtatgattgctttatcaatcttgtcaaagatgtatccatttctttagtctttcagaacacattaatacagttaccatccatttcctctagtagtgcttatgataatttctttccttacttcttctttttgaatgcaccacttatctcaaaatttccttagatgctgagtgaactaattttagggctttctttttctctaatacaagcattgaaaaatgtacatttttgttcttttttttattcactttacattctgtgctcccctgtttgcctcccagtaaccctctcccacaattcttcccccatcccctcttctccccatcccctctttccttctcctctgagcaggtgggaccccactctgtatccccccaccctggtagagcaagtctgtgagcctaggtgcatcttctccactgaggccagacaagggagcccagctggaagaacatatcccacagacaggtaacagcttttgggagagcccctgctccagttgttcaggacccacatgaaggccaagctgcacatctgctacatatttacagagaggcccaggtccagcccgtgtatgttctttggttggtggttcagacttgagagccccaagggtccaggttagttgactctgttggtcttcttgtggagctcctatccccttcagggcccacaattcttcctcctattcttctataagggtccccaagctccatccattattcggatgtaggtgtctgcatctgtctgagtcagctgcaggtggagcctctcagaggacatccatgctacgctcctgtctgtaagataacagagtatcattaatagtgtcaggggttggtgctaatccattggatgtatctcaagttaggccagttactagctagccattccctcagtctctgctccatccctggtccctgtactggggtgcatctccaagactagacagagacctgaaataagggagacacccaagaatcaatgggggtgaccttaactgtggagatatggaacctaaagaggctacctcctgtagccaggcaggaaccccaatggaaagatagggacaccaacccacccacaaaacttttgacccaaaaatttattctgtctacaagaaaaatgtacactcttacctgttgttttagccacgcccgctggatactttgtcttccatatcattcatttcaaagtttttttttgtctgatttcattttggcccatgaattctttgtactctatacacacacacacacacacacacacacacacacacacacacacacattttcctttaggtttttgttgttgttgttgttgttgtttttgttatcatttctttcactactgcactaaagctgaatactgtggtcaacataatggcaatcttctgaaagcatatttaacaaccagactcacgaacattcatgatgtttctaacatacaaatctaattgttcatcttgcttcattccctttaacgccctcttgaacttcaagagcagatttcttttcttctggcctatgcatagctcaccaaccaagacctgccctttccccttccggaccccagctgcactcactcagccaccttttcctccatctcctcgagcctcttccacttctcagtcagtcacccacccctccattccttggttcagtctgtcactggtgcctatgccattcccacctgcatcaacagcaggctttcaaatcacatctgcactcaacgtcacaaccccaggctgtgtatctgccactggttctctgagtatccatgtcaggggctccagaacaacaatggccaatttgcccgaagccaccttgacacagaacctattttctgtgatcaaccattttggtgaatatattaaattttaatgtgaatcaaaatttaacacagtcattgtaaccctacattgttctttcaccatcaacattaactcggctggcaagaatcaatatggtcctgtccatctttcattagggcgtccattctggtctcttgtatctcaaactttgtagtcattgtccctcctcatttctgccatccttctctatgttccagtcactatctgaggtctcctcagtgtttcctgctctttctgtccccagttctgctcccagactctagctttcaagatcagcaggctcaactgcatattttgtcaatttctcctcctcaacaaacggcttcccttgcagaggatcctgctgttctctcccagagccttcctgttgcagaaacaggaccagaacagacaaccttagcacttatttaatgtttccatgggacaaatgaaaagccatcgaaataaactgctgagtcttcaatgggctacaataaattcctctccaggactgtagagattgctcagggtacatactgctctgacagaagacccatgttcagttcccagcatctgaatcaggtagctcacaactgcctataactcaaactcacagaggatcatgtgccttgcctcttttggtacctttatttatgtacacatatatgtgcacacacacatacacgtatacatgtatacatgtaatttaaaataaaattcccaccccaaatcaattcctctaagctttctgaataagaaaagaagtgaacattggttaactgatgaggctgtggtggtgataagagttgtggcatgaaactgcagagaaaattcaagcaaggccaaaatgccagtaaaacagcaccatccttggactggccttagttcaactcgacacaagctagagttatctaaaaggaaggagtctcaattaaggaaaggtctccatagcatccagctgttgggcattttcttccttagtgattgatgagaggggacccagtccataatgggtgaggccatccctgggctagtggtcctgggttgtataagaaagcaggctgagcaagctatgaggaacaggccaataagcagcatttcttcatggcctctgcatcagctcctgcctccaagctcctgccctgcttgagttcctggcctggcttccttcagtgatggactatatcgtggacatgtaacctaaataaaccctttcctcccaacatgctttgctcatagtattttatcacagtaatagtaatcctaactaagacagctcccccaaaagaatttgaaaataaatcagtataaactaaacagataccataaaaatgtgaaattgttattacatctcttagaacaatctatttcatctcttagaacacatacacatgaatatgtttattagaatatttttatgatgtgactaagaagtccagtcttctttaaaacatcaaaccaaccttaatgtactgctgagaagaacatcttcattacaacatacttcataatgaaacatattaaaatgtgccattaacagataagggagaaaaatatattcacatccacttactgtatttaaaataattctgcttaaaacaactctttatgaagtctgtaagttagtacaggaagtaggtaggttctattcacactgtgaactgaaccttcggtcaactggctttgggtgctgatcctcaggtaatcaatcagtcctcagggactggcccgcttcccttctccactccagtcagcatgatcaccaggttgggtagtgatatcttcctgttgctcaggaagactgtgtcatccacatgatgtatctccagggtcagcagattatgatcgtggtggctattcctcgttgtcaacttgattatctctggaatgaactacaatcaagaactggagggcacacctgtgatccagatcttgaggctggaagacacaagtttctgacctggatcttgacatggagatcttgaggtatagtggccatgaaaagcttaggcccaggcaaggcagtacaagcactgaatcgcaggagactgaggcaaggagatctctgagttcaaagtaagcctgggacaaagcaaatcccagatccaggtgtggtgctacacaccttaatctgggctacaccttctgctggaggcctatataagaacattggaagaaggaaggctcactcttcttcaaccgtttgcacttgtctgcaagcacatctgttggaacatacttctacagaagaccaactcaaacaaacaactagctttgtgggactgagcaactattagattcttggacttcccatccacagctgcctaatgttaggttggttggactacatactgtaagtcatcacaataaattcctttaatatatagagacattccataagttctgtgactctagagaaacctgactaatcagtgatctatcttatgaagacttgtaaatgtcagctaataaggcccatagacaaagccctgttggttgaacaccaaataatcaaatggggctcactgctggctaacctgatcgacttgttaaattccaggccaatgagaaatcttgtctcaaacaacaaggtggattgcacctgagaaacaacaaccaaatttgtcctctggcattcacacatgtgcacatacacacaaatgaactaacagactcaaaaacaaaatatggacatataaacaaagaagttcatacatggactccaccatgcctgctcctaaacacttttctcaccgtataacaaacacccaaagaatctaaatttaaatcaccaacaccaaggacgtcttccttgcacttttgctcagtatattcacttgtacatatgcatatttcttttatttttcttagtaaaataatgcattttttcaattttttattcgatattttcttcatttacacttcaaatgctatcccaaaagtcccctataccctccccccatgccctgctctcctacccacccactcccactatttgaccctggcattcctcagtacttgggcatataaagtttgcaagaccaaggagccactcttcccaatgatggctgactagaccatcttctgctacatatgcagctagagacatgagctttggggttactggttattgttgttccacctacagggttgcagacccctttagctccttgggtactttctctagctcctccattgggggccctgtgttccatccaatagatgactatgagcatcaacttctgtatttgccaggcactggcgtcgtttcacagaagacagctatatcatggtcctttcagcaaaatcttgctggcatgtgcaatagtgtctgggtttggtggctgattatgggatggatccccaggtgtggtagtctctggagagtctatccttttgtcttagctccaaactttgtaactccttccatgggtattttgttccctattctaaggaggaatgaagtatccacatgttggtcttccttcttcttgattttcttgtgttttgtaaattgtatcttaggtattctaagtttctgggttaatatccacttatcagtgagtgcatatcaagtgacttcttttgtgattgagttacctcattcaggatgatatcctccagatccgtccatttgcccaagaatttcataaattcattgtgtttaatagctgagtagtacttcattgtgtaaatgtacattttctgtatccattcctctgttaagggacatctgggttctttccagcttcttgctattataaataaggctgctatgaacatagtggagcatgtgtccttattactagttggaacatcttctgggtatatgcccaggagaggtattgcaggatcttccggtagtactatgtccagttttctgaggaacctccagactgatttccagagtggttgtgcaagtttgcgatcccaccaacaattgaggagtgttcctctttctccacatccttgccagcatctgctgtcacatgaatttttgatcttagccattctgactggtgtgaggtagaatctcagggttgttttgatttgcatttccctgatgattaaggatgttgaacatttttcaggtgcttctcagcccttcggtattcctcagttgagaattctttgtttagctctgcaccccatttttaatggggttatttgaatttctggaatccagcttcttgagctctttgtatatattgaatattagtcccctatcaggtttaggattggtaaagatcctttcccagtctgttggtggcctttgtgtcttattgacggtgtcttttgccttacagaagctttgcatttttatgaggtcccatttgacaattcttgatcttacagcataagccattgctgttctattcaggaatttttcccctgtgcccatatatttgaggctttcccccactttctcctctataaatttcagtgtctctggttttatgtggaggtctttgatccacttagacttgagctttgtacaaggagataaaaatggatcaattagaattcttggacaagataaccgccagttgtgccagcaccatttgttgaaaatgctgtctttttcccactggatggttttagctccctttcaaagatcaagtgaccataggtgtgtgggttcatttctcagtcttcaattctattccattgatctacctgtctgtcgctgtaccagtaccatgcagttttaatcacaattgctctgtagtacacatatgcatatttcatagctaatttgcttgtgaattataagctgacccttaataggaaatttttaaaaagtatgcagacattgggcttgaaaccttaagtatactgactattgttggggcaaaacaaagatttagtgaaaaactagaaatcttctgtttacaaagcttcatattttagatttacttatttttatttcatgtgtatgggtattttgactgcatgcatatctgtgcatcatggttcatgcttgctgtctgcagaagtcattggattctctagaagtggagttacagatagttgtgagctgtcatgtggatgttgggaactggatctgggtcctttgtaagagcagacattgctcttagccattgggccatctcttaatccctcccaagaatttctaactttatgtatgtatgtatgtatgtatgtatgtatgtatgtatgtatgaatgtatgtatatatgttgcacacataccctcaaataccctcaatgtggaggtcaaaggataactttcatgagtcacttatgacctaccatgtgggtcccagggaaaagtacctcaggttatcaggctcaggtagcagcaaactcagcccctgagccgtctcaccagctcccttctgttgtcctctagattcagtaataacttctattctccaaaaataactggacaaaagaaagttgggccttccctctcttcacactctcccaccgcacgcagctgcactgcagcacagagctctgctgcctgcttccctgactgcctcctcctgttctacgttccatcaaccactgcatcccggggcttcattccctggacatctctctatatactgtcttcagccaggatgcagcccttagcatcctttgccaacattacagaaaccatctcccatatcctcctccttccctcccctccctctacctccctccctctctccctccctccctcctcctctgatttaagatgtttcctgtttctaatctccacactgcaggcacagtgatgactctgaatctcaattctggtcgcatcactgctgacaactttcctttaattacaggaggaaggctactctctagaatgactttcaaagccttcatgacaccaattttctcatctggctatcctgttttttgtggtgtatgccctctcggtaccacaagcatagtccttcctggtactcactgtgcaactccaagcccctacacccttgcttctgtggtccctgcatccgaatatcactaactctatgtcccatttgcttaactgcaatcaaccttgaaggctctgttcaaatgttattcttccaggaagcctttcctagcttacactaactccctatcctggtccctcaagctggggaaattgccaagacactacgagttgatccaccagagaactcaccaccctcagctgacactcattttcatgtctttcttcttatttaacagggactgtgtccccaacacaagcagttacagccctcataatacatgtgtggacctaacctcctaatagggatctcattctttcaaatggtatttaaagttcctctacttagccattaatttgacagccattgattggtagattccatagctatgtcccacccactcaaaactttcattttgccttgtaatattctgatttcctaaacgcccataaactacatagaaaccatttctcacccccaccccaccccccttcttccccattctagagtgtacaaagaacattccttttttcaaatacgtttgaggtgactcggttgaatcattttatgtttcttgttctgatggcatctgatagcacccagtctattttatggtaggcaggcatacttggtgctgtgtggcagcctaatagtccagaacagcaccaatcatcttcgctggcttccatctgcagaatgaagagctcggtggcagccgtcagagttaaatgcacgtttataaatgatattagccaagtaacaacaggttattattttccggtgggtttttgaagccactcagtgttagcctgttttccctgcttcacaagtttgcccgcctactgcctttcaccactaatgggcaccggtttgttcttcaagttcacacagggtcaagtttaaagagctttgatgtaaatcctgcaatttacaaagaaatctcaaaaatgaatcatgaaacgaagagggcaggtggttgccagtctgggaaaggcaaaagcagagtggccagctagtccaaaggcctcaggcttaagctggaaaataaggcacagtgtcattccaggcctctggcagtgaaaataaacagaaagcagtagtatctacacacacacacacacacacacacaaaacaaaacaaacatgagtacattcagaaagtatatatcagcaatgatcaacttcattaatataaaatcaacaaaccaaggcaatttgggggttgaggggattggtgtctttcttagaaatgtacagaggaaaattacattatagttagacatgaatccccaaaatacagaattagagatcatttctgctcagggatgatgcacatatatatgtcttctctctttttctgtgcatatatatatgtgtgcatatatatatatatatatatatatatatatatatatatatatatagtgtgtgtgtgtgtgtgtgtgtgtgtgtgtgtgtgtgtgtgtgatgtgtttggagccagggattttagtaagattcaactttactcgagtatgtttggagcactcctaaggggccctcaccctagtaaggcacggaaaatagctacccctcaagagacatgcaggataactgtgagtctcatgtaagactgtattgtcaatttcagaaatatctaccagaaaatcagggaccatgacctcctggacaaaaggaaaactgtgacagctctgaaggctggggaggaccgggccatcctgctcggcctggccatgatggtgtgctccatcatgatgtacttcctgctgggaatcacactgctgcgctcctacatgcagaggtaatgccatggacccggggagcccactgccccctccttctctgctctcccactgcccattcaacctatagtcatcttcttcacctttcctatgaactttcagggacacctggtacacggtggtttctaatgttatctgataataataacaacaataataatcaacttaggctatgtgtactgtctgttaggacctggacaattttctgagactgcttgttcctttctctctattattccataaagtgagactagatcatcagtgcagggacactggtgcctaagggatgtgacacaggggcttgggaaatggctttccataactagcttgctgtacagtcatgagaacctgagttccaaacctacatcccacataagcccagacatggtggcatacacttgtagtgtcggcactggagatatggagacagacagtctctagagcacactgtccagcaagtctagcctaactgtggagccccaggtcatggagagaccctgtctcataaaacgtaatgtagatgacatctgaggtcatcttctggcctcaacaaaaacatagagaaacatactagcatgagcatgtacacatacccatacacatgctccttcctgcacacacatgaacaggcatatgaatgcataacagtgtacctgcacacacatacacacacatgtacacaaacctaacatgcacacatctatgcaaatgcgcctatgcactcaagtgcacacacacacacacacacacacaacgtcacacctctctgtgggacacagcacaaacacatggcaattgagatttcaaagccacatcccaggaactcgagcgtcccggttcttgcctgccactgcttttctaaccaccccacttctccatctcccagcttccttggaagctctcgaatgcccaagcaaaagaagttggaattcgtcagtttgaagccagatccagtactcagtattctgaaactctctaagtgattctaatgtgttgtgaagcctgagaaagactgatagcaacctcttaaagtaacagacttttgaatcctttcatttcaatgtttacccagggtttactaagtcgggccagagagaggtactaggtgataatcctaagagcatctcctctgcataagtgatctgaaatgtcctcacaatgcccctcccacccccccacccccccacccccgctgctgtccagacactgaattctgaagctctatatagctccatgggtctgccgatagttgggcttggagaaataagtccctttcatatgaaagtgggaggtttcgatccaagaaaaaaagcaaaccactttgtggcacttgtttctacagctaaattaatgctttcattttagaggctaagtcgagctaaaatgtagcaatttgctcctctctcacatcctggctggtcctctctgtctctaatggccttcagctgtactctctcccacaatgaaagcgccagtgccttgggccccaagggtttgccgagtccaaaacctctttcagattctcgaacctgcttagaatgatctaagacatccacccccactgcctgattgtcaaaacaacttctaaccatccaggttccacaaaattcagtctgcttcagcagacatgactaagtccaacaccctgagtctggcacacacttaaagtacaggagctatccatgcatgtccagtaaaagggcagggttgctactccttgtgaacacgtgttttctgctcactgcagtatagcttatactcagaggcaaagcgtcgattgctagtgtgttgctccctaattacaaatgctcaacctgatcacaaaatgaaagttattgtaaaatagaattcgagcaatttgttagctggaatctctctggttgactcgactcagggcagcctgattgaccctgttgtctgcacagaaagaaggctttaccttctgctggtttcctgacctcagagaactattagactggataaagcctctgtgtccatcacttaccaactgtgtgttcttgactactatgtcacctgatttcggtgaccctcaactcactcacctctcaaagggattaataaccaacatacagggttgctgagaagatgaaaggaaataatttatgtaaatcaccagttggggagaaaggatataattagccattgctcttgacatcttcaaagggctgccgctatcttacttcctctgttagaatgaccttattgctctctccctctatcttgtcaagtcctggagcctctctgcctttttgccacctttccccagcccctctcttaacaaagacttttctacgcaggctggggtggagtttggggtaaagggactgagcaagaagccatgccttgcagaaatgcagagagtgggggttatcaaggtggatggtgcacagtggtcattccatcccgcaggaggctgaggcaacagaattaccactttgatgctagcccaggctacagagcaattctgaggctgttcttgcccacatagtgagactcagtctcatgaaatcaaagctaaaactaaagcatgcattatgcttaccggtgaattgaataaggagacaatagcctcttaaaatatcagtgaatgttctatagtagatgtcaccaagaaggctctcaggcgccaaagtctgttgtcatggcatgccgaaagcttgtatgctcaaagtcataaacttcgcacagacctatagattttgggggaggccccgggcagttcagcaaccaagtaactgtgttgtgcagccaacccctcatgcccagcagcttcctgtcctgtgctcattcttgccccttctctgcagcgtgtggacagaagaagcccagtgtgccctgctgaatgtgtcaatcacagaaacgtttaactgttccttcagctgtgggcccgactgttggaagctctctcagtacccttgcctgcaggtgtacgtgaacctgacatcttccggggagaggctcctcctctaccacacggaagagaccatgaagatcaatcaaaaggtaggagtttggctcgccccacctgggtgcctgcagaatccgcccaccttcctctgtccccgactttcccctttccgagtatttcaacataccaggaggtaggcccttgcttgctccattcacagaactcactctctggatctgtcatggtacagcaggtttagctgtgttttctgttggggagggggatatttatatataaagaacccaagtctgtcaaagcaagcacagaaattaataagagatgtgcacgcccaaatagctgtcataacttgggaggcatggggtaaaacatgactttgctcttccacacttagttgtgtgaccttgggcatgcatgaccttgacctccatgaccttttaatcagaaggaaaataatagccacttacacagccattattgtaagtaataatgagtagagtatgttatactgaaaaattaaacttgtggtcaatggtgtgtgtgtgtgtgtgtgtgtgtgtgtgtgtgtgtgcctgtacatttttatttacatgttatacttatggagccatgatttcttataataatgttcatattaatcactttactggtgggatgacaaaatgccacgaccaaggacaacttaaggaggtcagggtttattttgctttatgattccatcatggcagggaggcacagcagcagaagcaggaggtgagaggtcatgcctttaaccacaacctccataagaaagggaatgggaaaggagatgagttatatgctccaacgcctgcccccagtaacagattttctccggctaggctccgcctcctcataaccctcccaagcagtgccatcaactggagcccaagcaagcaaatgcttgagcctatgggagacatttctcatgcaaaccatcacactgatatattaaagcccacatggtaggtgcttaataaatgtgcattatattgaagctattcctaaactttattctgaggatgggcatggtggtttcaagcctataggtcccacattcgagaagctagagcagacagattgccacaagtttgaggcatacctgaactactaagcaagtgccagatgtgctggctggtttacagcaacttgatacaagctaatgttatctgagaggggggagcctcaatcaagaaaattccttcataagatcaggctgccagcaagcctgtagggcccatcatgtgtggttccacccctggggtggtggttctgggttctgtaagaaatcaggctgagcaagccagtaagcagcactcttccatggcctctgcatcagctacagcctccaggatcctgccctgtttgagttcttgtcctaacttccttcaatgatagactacaatgtggatgagtaagtgaaataaacctttcctccctaaattgcttttggtcatagtgtttcatcacagcaggaagaacgaaccctagctaagataccaggcattcacaaagtctatgaaggagtgtgatgaccaattgtgttttaattgaaccaatctgccattatcaatttcaagatacatgtgtattgggttttgagttttattgtagcagcttagatgtccagaatattcttgaacaagccaaggcaagctgactccagcctccaatagcacattggtgcttatttccagaaagagagcctaatgaactctaatctttcttgtaaaatttctcatcacaatggtcatcccgtcaatgacagtttatagtcatccagggttgcagaagcctggagattcagcgctagcacacgagcagccaagagtgttgccacaaacgaagaaaacccatcttgcattttggccatagcaactggaacgaattcttgaaaatatctctgaggactctcctgagtgcatatttcaaagaatgttacttgacaatgttgcttctgatgttctttcatttgtactaggcagaaacaagagcagtcctgacccagctccgcaaatttataaagcttagccccttctcagctgtctgttttccaagatctccccataagtcacaatcctaaatcaaagctgacttgtactggtggaaccctataaaactcttcagatctccaagaactggagagccacaaaagttgaaggggaatcagacaggaagaactctttccccttcctcattttgacatcgtatggctttggcactggcgttatttaggtgacaaacagggactgcagttcctatgataaatcccaggaacatatttaggatcaggttcttgtcagcactcagtgtggtcaggtttctttggcccattaccttgtttctaagtgcaagtcatgaccccttgcagaaatgtgtgcaatgtaaagatatagatcaagtatttattagcaagcactccctattatccaccaaaaagtaacagaataacactttccttttctcgtccgggcaaacacccatcccacccctcccaaaatcctcaggctctgctggtgcctggataatcaccacactagctattgtggcaactgccttggattttcctttgtggtttttatcactgctgtgtttaacacatactagtaaacacttttgctttgcttcatggtaagcccctgtacatacatacatacagaatcacacagaatgttttggtgtgtgtctggcttccttcacagaacacagcagttggtgttccattggggtgcagttcattcttttccatctcattgcatgtggaatgtcagcctaggtcttcactctactcctgatagatgttgagttttctagagcttgggggctatcataaacagctctgccatagatgctcttatatataactctcagtgttcaagccacaagcctacacacttctgtcaggtagacacctgaaggtcaactatctgggtcatagcataacacacgtatatcttagagcttaatgaacgatagcaaggcttcttctccactgtgcctgtatcaagaaggctcccacagccctgtcgggaggatcttagtgttccaaatgctcatggtgatttacagctgatgtgtaacatctcctggttttgatagcttctcaagtacctgtcattgaatatcctcttctctttggtccctcactcctctctgtggcttgtttatttttcactcccttgcagggtttatttaaatatgtaaacaatttaaatatgtaaacaaggtctcaagtgcctataatctcagctactccaaaaactgaggggaaaggatcatttgaacccagtttaagaccagcctgggcaacatagtgacagtaagacccaaacaacaaaagttatatgcccgtgccttttccctccttccttgaatatcttcatacagaagacagttccagttttactgtgacaaggcactgtcactttctttccttttcgtttaatgcttttgttattctgtttattaagtttgtaacgtagctatgaaggcctcaaagtcatgttcctatgcgttcctgttttctcttccccatacacaaccacccttcctgaaattgacctttatgtaggggtcaagttagtgggtctctttatttttgttttttggattggcttggttttaagtgtgtgtgtttgactaacaacagcaactggctccgcctactttgtgaaagtctgcccttgtccagcaggtcacttgcaggacccactttctgctcctagaaactcacgtgttcctacaatgttaatgtctaacccaaagattacagttttgagcccatttgcatgttatgatcaccattctatggagacgtcggcacagactgccgttgatgtgtgcagtaagcatcaacttctacaggcccacaactctgcatgttcattgtgctcagtctttgattctgctcttccatctgcagccatttttcccacagtctgaaaaacagcctttcattagcgatgatgccagagcagtggctgacatgggaagtttcctccatctgtgttttcctgaaggcattcctatctagctttgattcctgaaggaagcaaccactaagcacacagctctaggttaacctttcctctgcccctcatctctccatgagcagtgatactgtctggcacccagccctcagttttactgctgcatctaaagggcaatccagcctgtttaaagatagtttcctttgattttctatggtttatctcaagcccagatgtgaagttttccttattcagacttctaagcattcacagagtacttcccctccctataaaacttctgttttatgttaaaaatctgtttctaatgttagaaagttcacaggctctctcattacacagtgtgttttgtctccttctctgctccttcccctcctgggactctgtaggtgggagggtacactctctcaccacatctgatctgttctccctgtttttcatttctctcattttctctcacctcgcttcattcaggatttaccccctcagcacatctatcctcaactctgaaaagcttactgtctgtctagtccactaatactgaagttttcttactgtattttcattttttaattttaccattctcgcataaactcattttcccataaatgtgtgaaattctacaaaacatgatgagcaactgtaagtagtaacttgaaatgtgttttatcatataaattcagaagtgctactttccccatttgcaaagaattatgtttgtatttattggatctatgtgacaaaaattagagaaagcctttgatgaattactgaccattaagtaaaaattatacatatatcttttaacagaagaaacaagtattgaataaattattccaaaaatatacagaaaatataaacaacatttaatattttgataacacatggaaaatacaactattagcaataactatggtaataataataaaacaagtcactattaaacagatagctatcctacatctggagtagtcctaagcgttatacaaggacaatgtcacagaacttaatactcctgatgctattaacatatataaaaaatgtccacacatagaggtggaaatgtaaacattgcctccattatcagataccataataaaatcctacgacaacttttgttgttattgttggttctattttcactgagagttgactattttctgtaaaatgcaaatttcatattcatactagcttcgttttccaaattaaatttgacaaataagtgtagaagaggaatgaaaatattagagttgaggcctgtatacttccttcttgcagttcagtgttctatttttcaatgtttgggtttctgtttgttctctttttctgtgttgggcttttggctcttatcaggccatcttttccctagtcttggttttcctcctcttctcctgtatctcttctttctttttctctccattctctccatttctcatcctcagccttcgtttcctcctctgttgaaaatctcttttaagacatttttattagatatttccttcatttacatttgaaaaacttttactgtcaaaagccatctgttttttttcaaaagatatttggaaattgagaatatccttccaaaactatgaagatacacaggtaggcaaagcacttcccaacgtgaatttcagggctgggtcatggtctttgttacacccagatcccattctgctagtggtggtagaagccatggaaatggcaagcaagaagaaacccaagccaatactctgaggagacgcttcttcactgtgaggcaggggatcatgagaggaagcctggtaaggtcaatctagggcttgaagcccttgagagacagaagggacagtaggaacttctccaggctctgtcatgtagccatgcccccccacccccagaaggaactgtagccatcagtcacataggggcccacacccacaagtccctcctcatgtagatgaggcatctcaggccaagccaataggaagcaccctattatcagctccaacccaccccaaaactatatataaaatccagaaggaaagtatatgagaatcaccccatcatctgagagcatctatcacaagagctgtaacacgcctagaaagagaatgctctctcaaagatttcaccaccagaagtttcccctgcactctgctctaaccagcccctctcctcaccccctcagctcagttcagcgcagccagtgcagtgtctcaatggatagcctccagtaccagactgacttcaccatttgtttggtctgtgacttcaaaagttcaggccaaactcctttgctttcctctttggcatatctgtttgcttgttgctttggcccctggagcataattgcacaggaaaagtgctgtgtgtctaatattttcaattcttgaacatggagtaacagtgtaaccaactttgtaggaattgtcccatcacgctgagaatggttgtcagtgtaagcgtcattttgaaaatcataatttttcctttattcataccaacttctgatagcaatacttgcagtcagttcatatccaggacctacccacatgcctttgccaaaagcattatagaaaggacgggatgcatgtactctatctaaatgagcattatgccaatacacacattttcccttactctctagtggttcctgaaaaagctacatcccaagttcattgaaatagcctactcccctttgtttggcaaaaagttggcattcaaaccagagcccgtcagaagccacagtccacacagccacagcttcaatgcgccccctagcgtcatggtatgcaagtgaccaaaccacaccacaaaggagatggcctttatggtcctcttaatgtattttcaattatagaatactcattgagaatacccatctagaatatttctttgataatttctcatttctgataatattctaattcttgtccttggaaagcttaagcggaaggtaatgtggttgtttgaaaagcctgtttcggttactttaacatctgaatcccatgttcttgttctacttctggtgatcatgttgtctaaccttacctgaacagtttataccttccagaaaacatgatttcagtatatgtatgtgtatgtgtatctatatgtatatgtatatgtatatgtatatgtatatgtatatgtatatatgtgagggaaggatacagtatgtgcacaggtatgtaatgtcaagagaagccagaagagggtgctggatcccttgtagcttgagttacaggatgtggtgagccatctttcttgggggttgggaaccaactcaggtcttctgcaaagggaatgcatgcacttgaccgctgaaacatctccctaatctcttaaagttatttataaaagtcgctttcagcctggattggtgacattctctccagtgtttccatttgcttctgccaggtacttatggacaccagccctttaaaactacttactaccttgtaattgcataaattgaggcagtcaaaccttgacctgcatccgagcattgctcccagaagcctctgtccagagccccagccacactgtttcagggttctcaaaaataccacacaagcctgaggctctcagtcccctgccacagttagcagatagtcacaggacagagcactgagcactaagatggacttccccagcccagctctttatcctctgtacaggcagcctctgtttttaatcagaaatacagattctgagaaaatgaccatctctgccttagaatactacctgaccatctctgttcagcgtgaggagtattcaggatactcccaggaaaggaaaaaggaaaagtaccctcattgtcagcctccccatcctgttacttcccacaagctcacaagaataacagacatccacattgccaagaaatagacatgcttctgctgagattctagctactactgctgagattctagctactatcgagggtgttagaatgcagacaacagaagccaagaaggaccaactgagctgtctgcatctctgtggaaaaacattcaaaatatttgattttaaattttcagtgtctctctcttttttttctttaatctttaaactcagtgcccagcctcttgacagtatccaagctcaagctgctaaagtggataagctggcaggctctcgtggagcccttagttgattgatggcctctaggagctgtaagtggcttaggggactgtgcatccctcagcccctggccagtaggttgtcactggaatgacaaacagcggctgagcattaattcaccatgctttgggatctctgattccctcagccaccagactgtcactataaacataaacagcagctgaatattaattcaccgtggctgctgcttcacatctgagttctgaactccttcgggagttaaacttctcgccaaacaccagtgattctcaacacatactcatttaaaggtgaatttaagataacatttggaatgaaataaaagactatatccattttgatgcatgctgggatagcatatgtatgatatttatacgtaatcatcacagaaaagatggttgcttcaaatgggccattccacaaactaccaattattcaccactgcaaattcagcattgttccttattctgacaccattcaaaggattatgttctcctaatttcagagactaacacatctagaccagtgcttttttttacatgggtacttttttttttttacatgggtacttttgactctgatcaatacagagacctgccctctactgccagatgtttaatagtgtcctcagcctctttcgaccgtgtgaccaacaccctccccaatccattcgtgagatgtttgcagttagtggcaaggtggctgctcttgcttcctttggcttcacatttgcatgctgtaaggtccttatgatgtgttcagcacagcactgggaggtcacagaaaacagaaaatagagccaaggcactgaatggaaaatagtgttaactaagttctcactgtgtagagcatgcccgctattgtaatgaagaaaatatctaataaaaaaattaccttgcttactcctgctcataaaataataatagacaaattttatcaggagctcacaatgtgccaggtatcgtacagtactaatgttttacatatactggctcatttagctgcaacagcaatccctatgtggcataccaacaccattcttactttataacaatgaagcaggtttagaaaatgaatttcccccacgccatgcattcaacaactaactaggtctgaaatgaaatctaagactcttgtcttgctctctcctgaagagaaagccctcaacatatacccctgagaaagtacagccagagagttcagaagacttgtggttcagttgctcaagtaccccatgcacaagtatggggacctgacattgataggcagaacccatgtccaaagtgggacatggtatcatacatatgtaatcccagcagtggggagacaggtggagttcactggccagccatcttgttttgtaaattctaggtcagtgagagtcagggtgtcaaaaataaggtagatggcatccaaggaatgacatcttggattgtctggtctccacacacacatttgcacagagctgtacattgacaaagtttagtcaattcataccaaacctgaattctggaatatctgagtacatctctgtgtaggaatcaaagaaagagttgcctacaagaagactgcaaaccctgatgcctctgagtggcaagaaggagaaaggggacaaggaaactcttccttcccaagaaacaggaccgtgactaggatcaaggtcagattatctggctcactctcaggcacactgtggggctccatggtatggctgctgtggggactgaccaattcaatgctctagagcccttctgtctcagtccatctctagtgtctttaaactttcttttcaatttgtgatggttgatgcagatttccagcaggatcaaggatcaccctggagtaaagcctctaaacctggctatgaggggttatctagattaagttagactctgggcacgtatggaaggaagtttcaaaaataaagtacactgaaatgagaagacctgcctattgtgggcagcaccatcccatgggctaaagtcttagaataaataataagaaaataaaaccaggtgaacacaagcattcattactctctgcttcatggttgccagtgcgatgtgatgagctgcctcaagcccctgctgccatttttcctgccatgacagaccatgccctcagacaatgagccacaataaagccttccttcctcgggatgttcttgttgggtgctttatcacagcaacaggaacagtaatgaatatgctactccacgctgagcaatagtggttaaatatgtatgctcgaggcaagaagcacaaaattgtactcctctggaaataaccttatgccaaaatggaggatatggttatacgcagcaaagcctggattgttcttgcttttttcttccgaacacttcaaataatcctgcttcccacattcaaaggatgcgaaaagcacagaccaaacacatctgaactatgtgttgaaggaccttctactttaaagctggtcatgaagggagttctcaaaagagaaaagaaaaggaggtctaagtttatgccctcaacttgacctgtgtccctcacaaatgtgtggaactcaaaggttcagaatagcacaaggtttccttacttcaaaaccaagcttgttcatgtttcacctgagtgactttgtttatttaactcaagacagatgaaataaggtgccctggtggctgacgagcttttaggacaaatcggatgtgcctctgtgatgtattatcttttcaggaaagctcttaggcacactcctctccaggcttaccagcacatcctgttgtattctctttctgacgtctatcctacattgtttttatttttgacacctgtgtattgctagttggcatattagcaccatatttattagatccaataactatttggatttcattgaacatctaacctcttcttgaaataaggtagttcctttcttataaaagagcaaataaagcataagactcttccttgaagaagtcccaaagaactgatggtgccctccccatcattggaagaaaacagaggctgacagtgaggttactcagccagatcctgccctgctgctgggcccatctttcatctctgggatgacggcccgtcactctacttcacatgtgcctagtgaggcatgtctaaaaaacccaacaggtagtttaagaaaaaaaacttcctgtctatcatgagaataaaaatagctcagttgacatagaagattctggaagtaagatgaggtagggaaggtcaattcagctgtgatgaaaagaactggaaagaagtgcagttgctgagtcttaattggccacctaagcaaagaagcgaccaggagatgctgaaaaccaagttttcatagctagaagaggaagggtcatggcgtggatcacaggggctagagaaagaggtcaggtctattaacaaagcctgggttaagaagagactgttaaaacaactcttaatttaccatcatacacacagatcagcacatcatcatcagtgttcacccctaaattatatatatatatatgtgtgtgtgtatcaccccaatctgtcaaggatcaggaatcattggtgcagaagagggagtgaaatgattataaaagccagagttgggagatgacaacatggaaattgttcagtgtacaccactggacatttgcccatgtgaattaacagtggctgtgacaacatgcataagacctgctcaaactcaaaccagacaaaaaatctcagtatagaggcaggaggtggccacaaagtccctattctctgatgaagaactattgttattgatagctgccaagaaagggagagttagttttctttaagggtgtggatctagcagattgaccttccaagggtttatagccagcactagttggactaaggggactctctgatgtagaggccccctgagctggaactcacctgaaagctacttccatgaggattagctttcaaggtacagaaagcatcatgtaagcttccaaaggagagaataaatcaaccatcttacatataacaatgaggctatgaaccacaacaatggacgtgacaaccagcatgtcatgtcaccctaaaagtgcggtggttccatgcataccttggtggttaccaaaggttctataaatggaagggaaccattccaggcactgggaacctagccaattatcccagggctggtgacgtcatgggtactggagaccctataattaccattctactaaaccagcataacccataacgacattctacatatgtgtccttgaatccacagatgagtgtagtcctcgcccctcatcatggaaacttccttctgcaacagagaccattacagaaaaacacagccaaatcaaaatgcagagttgtggatcccagtcccaacaaatacatctacaaaacaattcctgtacgtaagactcagggaacacttgagaagggggagcagaaagattgtgagagtcagaggatcagggagtttgctgtgaggttgcatagtccaggaatgtcaggaactacacctgtaaagtctcaccaacacaacttccaaagatgagctgatgaggaacaacaataaatgtgctgatgtagctcgggaacggccacggggcctcaaccttacacagagaacaacaggcaaatgaaggtaggctgagagcagaaggagtagtattccccaggtaaaagcacaccaaccacttatctgataccaaatggtcagccctgaaaacacatacaattaacatgacacagactgagattgttggatgtaggatgatgcatgcatatacatatatgcgtgtaacaatgatcaatggacaaaaagaccttaaacttggaagaaagtaaagaggattatatggggaggttttgtggaacaaattgggttggtggtactgtagttacattataatctcaaaagtaaaagaagtaattaaaaagatgtagactcagagttggatgggtatggaaagggggaagatcttagaggagttgggggatggaagtaactgtgataaaaatataatgcataaacatctcaaaaacttaataaaaatattaatagtggataataagaagactatcaaggcagggagacagctcagtcaggaaagtggaccatgcaagcaagaggcctagaattcagattccccaggaccaatgtaaaagtagtgcatctatattcccagtgctggggaggttgggacgggagaatcttggaaactcactagccagccagtctagccaattggtgagttccaggttcaatgagagacctcgtctcaaaaaaaaaagaggaaaattatttagaacaacatacaatatcaactttttataatatcaaccactcacataaaattatcccccaaacatatgatgaagtcatgtgatattagatcatcactccatgttatgcccacttctgtagcatacactgcttataccataatacctaaatctcacttcccaagagtacacgtgactaaagctggagcaacagaagcaaatgcccagatcctaaagtagacttaggtacaatgcaagcctccaaagaacagtagggcaataaggcaagctgaccctgtgagaactccatatctggttattctgccctctacggagcttttgcaaatctgtatgtggcacttgactcaagactttagaagagcatgtaagaaaatgtggtattccagtaggaaaatgtgctaataaaaaatgtatggaggccttatgcatattccgcatctcattctgaaagatggctgctgggaagtctctatgagtctcattacagagatgaaattggttttgagggccacatgttatagcaatcacatcacatgaatacaagtcaggaacttgttctatgacctcatatgttcatcgtcacaaaggatctgtcagtgataaaaagaaatgaacaactgatatatggcagagttttcacaggtagaaacagaaagtggaagataaccaggtcaggagagctcaccatagcatgtgtgcccagtgtgtacccctggcacagagtaactaaatgtggacatgtatggagtgcagccagcacacagacacacctctcagaccccataaactttaacttttcataaggtgctcctatattacaaccttccagatgccctcagaggtgctttatatcatgttttatttggaaggatcttacctagtgacagaattattgctatttggctggcagatgtttctttacaaaaaaaaaaaaaaaagtaagttgaattgattcaccacagcagaagaaaataaagaaaaactccatttttaatgaaatgccatttttattgggatcatttcagtaacttagctctgggagacatgaaagtgctaccataaggtaagcaaaaaaatataccaagacccgatgtctttataatccagagtggctcagcctgagttcagctatagatggcttatctgtgcttgtcttgttttgctgcttgcttcaggaaacatttgtcgtctacaaagttcatgcttgagaacccggcaattaagttaacatatatgtacatatatgtatgtggatgagtgggtggatgggtgtgtatttcatgtgcacttgtgtgcccacacacagcgttttgagtcagtttataatgttgtattgggtttcattcgtagctatccttagcccccatgccaatcattgccacatgctcattattcattcttaactaagcagagaaatgtctgctattcagagtcaaataaccccagggttccaaagccacaaagttcctggtgctgctaagtcagagggaaattagtccagaaagactccactagctgaaacttaattcgtttattttatattttcttcctgtgagatttttcaggtataaatttctcccagattctaggatctcatactgatgcactcagaataccgcaggccacttcttatgaatgtgtggaaagaaagaagagggaaagaggtagaggggacaggaaatggaggtgagacaggcggatcaaaacagcagctggtccttggatcaaacagtgtcctctgctgtgatcctggtttatgtccccttggctgacagcaaagggcacttggacatgctgaatgggactctccatttcctcataggcctctgttcagcctttcccaatttactaagatctgccaaagctgcagatgttctcttgatgacaggaacaagatgcccaagattcagcaagattggttgagtaacatgaattcaaaacaattatacatttatgagttacttttcatactgatgtgtgtatgaactgctttctctattgttgtgacagaagtcacttaaggaaggacagagttattctggctcacagtttgaggggatccctttcattgtggacagaaaggagtaaccttgttgtcaggtggcagagagttgaatagtggcaatcagctcaaattctctttttcttcagtctccagtcaaggtccagctgctacctacatcccctgtggttggtcacctcctgcatttcttttctgggaactctaacatagacacatacaaagatgtatttccatggtgattttaaatccagtcaggttgacaattaagattaatcatcactatatgttatgataatattttatgttacatgggcagaccaaacttagaaaggtttgcactctgggctcctggacaagtgtgtctgatgggaaataattaagacgcatcatccttaactatagcaaaatgtattactttttctatgtatgtgatgtgagattgttataccaaactaacacattcataataagattttagtcaacagcgaaatcatttataagtgagttaccaagaaacactaataaccctaaaacattactttaatcaatgtgtgatctctctggtttgggggcccattggtttgaatctataaaagttgaccttcatgtttgtctcacacataaacttaggttgactcctcctaatgatagtttgtcttgctcttcacagtgctcctatattcctaagtgtggaaacaactttgaggagtccatgtctctcgtgagtgtcgtcatggaaaacttcaggagacaccaacacttcccctgctattctgacccagaaggaaaccagaagagtgtcatcctgaccaaactctacagctccaatgtgctgttccattctctcttctggccaacttgtatgatggctgggggtgtggcaatcgttgctatggtgaaactaactcagtacctctccctgctttgtgagaggatccaacggatcaacagataaaagaaaaaaatcatggataagatatttttctttaaagctcaaatactgttttatttcgttcttcaccaaagaaccttaagtttgtaatgtgcagtctgttatgggttccttaattattctatgtagagcaataatgcaaacgctgtcctatatgcaaacatgatgtccttattattcaggagaattaactgttcctcattggttggttgtttcattatattgttttgatgctggaactagtctgtcgtctttccaccagaatagggctcagctactcattgctaagtgttgtggggcataggggcatggaggcactatccccaagaccaggtctctgttctgagtttccagacttcctgaagacaagatttttcttcatttgttgtttactgaagctacagccaaaaacacattttttttcttatcctatattgagccctgtagcaagtgaaggagttgtttcctgactaaagggtattaaacttattattattattattattatttttaccacagcactgtaaggaagggggggaaacctagccagcaacttttctttcatcacttttcattcacaacttcagatttttgaaaataattatcaactctctaatgtcttccgatcagagtcccttttccatctatgaccctgctactgtgtgggagacaaagctggtgagatcactcccagtaaactgactgggtgttggtaggcatgccattgcaattttggaaagtctatgttacaaagatatttatgggaaatcttaattccatttccactggactattagaatcaaatattaatatactaaggactggtgaattggttgcagtgggtgagtctgtcagggccagctatcatgtcagaatattactctttgagaatttatgtttcagtaaacgaatgtatgtagggtctctctttctgaaaaaaaaaaaaaactgttgcctgttggggttttaaatctatgtgtgcagaatctttgtctcctctacatattttatttttctactcactgttcccttttggttgttatattttatatgcagaatagacctttttcctaacacatgtttgaaatgaataacaggtttgagggaagcctttcttcacattgatgtttactcattctatttggtggggggaggggaaagggggttggttttaaataaagacattctgtcttttatttaatattgatatctaagggagaagacaaacatctatctttctcatctatatttaagtacccttttgtaacatagtatcgatgttttttaggtaattgcaaaattttacaaatcatttgtggaatgaacggtgaaacttatctgaggaagcagaatattgtaattcatagtgtgacttttcataagcaaataaatccctagggtgtaatcaggacttcaaatgtgtaattaaattttttaaacccatttgatggcaagattttaatacttcttgcattcagataaacccatgactatccaaacaattctaatttgtattcaaaggtattttaagagactgtaaagaaaatccctttttctgacacttaaacaatacatgttatgttgtaaacatttggaaaacaccacagaaaatcatttatttttattccatctttaaaatgtatttgtcaagatagaagaaaatcctttggaactatagggttgaaatttgcaatcttaaatgttccctgggattcccatcaactgatgcaaggatgaagcatacatgatgacattatgacatactttatttttaacttctttaagatttttcattaaaagttcctagctaagacctggagccaactatatgtgaggacttgctttaaattcctgatgccctaggttcaattttcaaccatggaagaaagaaaaaacatctgtattagtctgggttttactgctgtgagcagacaccatgaccaaggcaacactttatagaacaacatttaattgaggctggcttacaggttcaacggttgagtccattatcatcaaggtaggagcatggcaacatccaggcagccatggtgcaggaggagctgagggttctataacttgttcagaatacaaacagaggaagactagcttccaggcatcgagggtgagggtattaaagcccatgtccacacctactgaaaaaagccacacctactccaacaaagccacacctattccaacaagtccatacctccaaatattgctactccctgggccaagcatatacaaaccatcacaacatcccaactgataaattatataagaatgtagaaaaaacatcctaactagatccttcttgcatgtcaaaatagcaacaattttagacaaacttagatgtgaacacaaatgtctgtcatcagtgagaaagataccaaactatttttttttcttttccattttatttcttactttttttattacgtattttcctcaattgcatttccaatgctatcccaaaagcctcccacacacacccccaactcccctacccacccattcccatttttggccatggcattcccctgtactgggacatataaagtttgcctgtccaatgggcctctctttccagtgatggctgactaggccatcttttgatacatatgcagctagagtcaagagctccggggtactggttagttcataatgttgcacctacagggttgcagatttctttagctccttggatactttctctagctcctccattgggggccctgtgatccatccaatagttaactgtgagtatccacttctgtgtttgttaggacccggcctagtctcacaagagacagatatatcacggtccttgcaccaaacgcttgctagtgtatgcaatggtgtcatcgtttggaggctaattatgggatggatccctggatatggcagtctcttgatggtccatccttttgtctcagctccaaactttgtctctgtaactccttccatgggtgattgtttccaattctaagaaggggcaaagtgtccacactttggtctttgttcttcttcagtatcatgtgttttgtaaattgtaccttatatctcactatattaagtttctgggctaatatccacttatcagtgagtacatatcatgtgagttcttttgtgattgtgttacctcactcaggatgatgcccaccaggtccaaccatttgcctaggaatttcataaattcattctttttaatagctgagtagtggtccattgtgtaaatgtaccacgttttttgtatccattcctctgttgaggggcatctgggttctttccagcttctggctattacaaataaggctgctatgaacatagtggagcatgtgtccttcctacccattggggcatcttctggatatatgcccaggagaggtattgcggaatcttccggtattactatgtccaattttctgaggaaccaccagactgatttccagaatggttgtacaagcttgcaatcccaccaacaatggaggagtgttcctctttctccacatcctcgccagcatctgctgtcacctgaatatttgatcttagccattctgactggtgtgaggtggaatctcagggttgttttgatttgcatttccctgatgattaaggatgttgaacattttttcaggtgcttctctgccattcggtagtcctcaggtgagaattctttgttcagttctgagccccattttttaatggggctatttgattttctggagtcgaccttcttgagttctttatatatattggatattagtccactatctgatttaggataggtaaagatcctttcccaatctgttggtggtctttttgtcttattgacggtgtcttttaccttgcagaagctttgcagtttcattaggtcccatttgtcaatcctcgatcttacagcacaagccattgctgttctattcaggaatttttcccctgtgtccatatcttcgaggcttttccccactttctcctctataagtttcagtgtgtctggttttatgtggagttccttgatccacttagatttgaccttagtacaaggagataggaatgaatcaattcgcattcttctacatgataacaaccagttgtgccagcaccatttgttgaaaatgctgtctttcatccactggatggttctagctcccttgtcgaagatcaagtgaccataggtgtgtgggttcatttctgggtcttcagttcttattccattggtctatttgtctgtctctatctataccagtaccatgcagtttttatcacaattgctctgtagtacaactttagatcaggcatggtgattccaccagaggttgttttatacttgagaagagtttttgctatcctagggtttttattattccagatgaatttgcagattgctccttctaattcattgaagaattgagttggaattttgatggggattgcattgaatctgtagattgcttttggcaagagagccatttttacaatgttgatcctgccaatccatgagcatgggagatctttccatcttctgagatcttctttaattactttcttcagagacttgaagtttttatcatacacttccttagttagagtcacgccaagatattttatattatttgtgactattgataagggtgttgtttccctaatttctttctcagcctgtttaacctttgtgtagagaaaggccattgacttgtttgagttaattttatatccagctacttcaccgaagctgtttatcaggtttaggagttctctggtggaatctttagggtcacttatatatactatcttatcatctgcaaaaagtgatattttgacttcctctttttcaatttgtatccccttgatctccttttgttgtcgaattgctctggctaatacttcaagtactatgttgaagaggtagggagaaagtgggcagccttgtctagtccctgattttagtgggattgcttccagcttctcacgatttactttgatgttggctactggtttgctgtagagtgcttttatcatgtttaggtatgggccttgaattcctgatctttccaagacttttatcatgaatgggtgttggatcttgtcgaatgctttttctgcatctaacaaaatgatcatgtggtttttgtctttgagtttgtttatataatggattacattgatggattttcgtatattaaaccatccctgcatccctggaataaaacctacttggtcaggatggatgattgctttaatgtgttcttggattcggttagcgagaattttattgagtgtttttgcatcgatattcataagagaaattggtctgaagttctctatctttgttggatctttctgtggtttaggtatcagagtaattgtggcttcataaaatgagttgggtagagtaccttctacttctattttgtgaaatagtttgtgcagaactggaattagatcttctttgaaggtctgatagaactctgcacaaaacccgtctggtcctgggcttttttttggctgggagactattaatgactgcttctatttctttaggggatatgggactgtttagatcattaacttgatcctgatttaactttggtacctggtatctgtctagaaatttgtccatttcatccaggttttccagttttgttgagtatagccttttgtagaaggatctgatggtgttttggatttcttcaggatctgttgttatgtctcccttttcatttctgattttgttaattaggattttgtccctgtgccctctagtgagtctagctaagggtttatctatcttgttgattttctcaaagaaccaacttctcgtttggttaattctttgaatagttcttgtttctacttgattgatttcatccctgagtttgactattgcctgccgtctactcctcttgggtgaattttcttcctttttttctagagcttttagatgtgttgtcaagctgctagtgtgtgctctctccagtttcttcttggaggcgctcagagctatgagtttccctcttagaaatgctttcactgtgtcccataggtttgggtatgttgtggcttcattttcattaaactctaaaaagtctttaatttctttctttattccttccttgaccaaggtatcattgagaagagtgttgttcagtttccacgtgaatgttggctttccattatttatgttgttattgaagattagccttaggccatggtggtctgataggatgcatgggacaatttcaatatttttgcatctcttgaggcctgttttgtgaccaattatatggtcaattttggagaaggtcccatgaggtgctgagaagaaggtatatccttttgttttaggataaaatgttctgtagatatctgtcagatccatttgtttcataacttctgttagttttactgtgtccctgtttagtttctgtttccacgatctgtccattgatgaaagtggtgtgttgaagtctcccactattattgtgtgaggtgcaatgtgtgctttgagctttactaaagtgtctttaatgaatgtggctgctcttgcatttggagcatagatattcagaattgagagttcctcttggaggattttacctttgatgagtatgaagtgtccctctttgtcttttttgataactttgggttggaagttgattttatccgatattagaatggctaatccagcctgtttctcagaccatttgcttggaaaattgttttccagcctttcactctgaggtagtgtctgtctttttccctgagatgggtttcctgtaagcagcagaatgttgggtcctgtttgtgtagccagtctgttagtctatgtctttttattggggaattgaatccattgatattaagagatattaaggaaaagtaattgttgcttccttttatttttgttgttagtgttggcattctgttcttgtggctgtcttctttttggtttgttgagggattacttttttgctttttctagggtgtgatttccgtccttgtattggtttttttctgttattatcctttgaagggctggattcgtggaaagataatatttgaatttggttttgtcatggaatactttggtttctccatctatggtaattgagagtttggctgggtatagtagcctgggctggcatttgtgttctcttagtgtctgtgtaacatctgtccaggctcttctggctttcatagtctctggtgaaaagtctggtgtaattctgataggccttcctttatattttacttgacctttctcccttacttcttttaatattctatctttatttagtgcatttgttgttctgattattatgtgtcgggagcaatttcttttctggtccagtctatttggagttctgtaggcttcttgtatgtttatgggcatgtcattcattaggtttgggaagttttcttctataattttgttgaagatatttgccggccctttaagttgaaaatcttcattctcatcaactcctattatccgtaggtttggtcttctcattgtgtcctggatttcctggatgttttgagttaggatttttttgtgttttgtattatctttgattgttgcgctgatgttctctatggaatcttctgcacctgagattctctcttccatctcttgtattctgttgctgatgctctatggttccagatttctttcctagggtttctatctccagcattgccttactttgggttttctttattgtgtctacttccatttttaggtctagtatggttttgttcatttccatcacctgtttggatgtgttttcctgtttttctataaggacttctacctgtttggttgtgttttcctgtttttcttttaggacttgtaactctttagcagtgttctcctgtatttctttaagtgagttattaaagtccttcttgatgtcccctaccatcatcatgagatatgcttttaaatccgggtctagcttttcggttgtgttggggtgcccaggactaggtggcatgggagtgctgcattctgacgatggtgagcggtcttgatttcattagtaggattcttacatttgcctttcgccatcttgtattctctggagctagttgttatagttgtctctggttagagcttgttcctcaggtgattatgttagcctctatcagcagaccagggagactagttctatccttagtttcagtggtcagagtactctttgcaggcaagctctcctcttgcagggaaggtgcccagatatctggtgtttgaacctgcctcctggcagaagttgtgttccactcaccagaagtcttaggatcccgtggcggatcctgtgtgtgaccttgcggatgtccgcagacgccccgggccaaggaccatggtacagcagtgggccggaagggacttgagccccagatctggccgggaagataccaaactattatcatgttaaatatcttgcacccattaactaatttgctactcataacatctcaattggaggaccatcattacctcagcctacagatgttaaatcacttccctccaaattatagtgatcgtggaaagcaaagaaaaggctcatcatgtcgtttttccattataggagccattatcatagcttcttttaagttaaccctgaggaattctgggagttagaagggttcacagaaatgccaaagaaagagagacaaatgggaagatgttgatcaggaaatggtgaggaggtggctaagaaaggcaggtgtcctcctggtgataaatttaggtgttagaccaccagacagacacaaggtcttttgtgacattagcattttaagggccagagagttggctcagtagataaagccacttgccaacaagtttgatgacctgagttcaacacctgggacccacatgctagaaggagagaaatgtacttcacaaattgttctctgaattatacacatgggcattgtagcaagcaagcatgtacacacacacacacacacacacacacacacacacatttgtacacaccctaaataaaacataataagactagaattctgttctgtgtataaaaggaaggtcaaccctgaccttcaggggacagtctgatgctcaaatagaatctatgtgtataatctatgggttggtttaaaaaaaaaaaaaagagcagcctccttgttatattcacaataaaccacttatctctataggactcagaaccttatttacattggtaacagcagaccacagtctctacattattcaacaagaatgatttccccaaatgttacagatgtctatgtgtccaaatcactttcattatccaattggcacatcccatctaaaactttattgatttcagattgcctgagttgcaattgtattaaaacccagaaatgataaatgtatcaatgactgcttgcaaatagctataataaaaagatatggttctgtggaaagctaccagcaaagtaccctgctgatgctaatgtgtgggcatcataaatagctcttaggcaggctggatgacagctagagtttcagcatgctatccttctcccattcctgcaaatgatcaaagaatacttacatgtgacatttataaaacaaacagtatttccacagtgttgtgcaataacatctcgctgcattcctgtgggtaaaacatgttgactgtaattgttatgttgacattaacagagagaaaagtgagatgagcgattgaatgaagtgggttcagacaataactttaaacacaagtctagttaccctgctcacttcccctcaaagacactgaaataaacgatgttcaagaagttagcaagtctcactggccagtaagaaggaaagcatggttaaaagttgaatgccgttccttttcttaaactctggggggttggagggagggcgcaggtaaggttttggtgttttgcctacatgtgtttctgtgcaccttatgtgtacctggtactctaaggggtcagaggaaggagtcagatcacctgagactggattgcagattgttgtgagatgctgtgtggatgctgggaattgacctgggtcttctagaagatcagccagtgctgtgaactgttgttccatccttccagtccccaccctttcttttcccctttccccttgtgtaggaatttggctagaacagctcactatcctgccataatcttcccaacacatatgccacatgaactttgacttgaagggtcttccttgcttcaggcaggacagagcagacagtcctacatgaatctgttccatctcttctgtatttgcagaaactgtagggaataaaacaaagtgtccaccactgcctccttccttcttaaccagtctgtgatctactagaggagttgaaataaagacatgaaaaacaaaaacctaagaataacatagtgagtgttaaatctacaaagtcagtatggtgctacctacaaaacagcttaagatatagtcacagagatatagatcatatggatataggtattctaatatggtatacaacgttcagtatgtgcttgctaagtaccaattacaaataataatagttagtaaaatatagaactaagattagtagtactataaccactacaaaataaataattccttggagctgaatagctcttaaattaatgattccaggactagacagatggttcaacagctacaaatacttgctgctcttggttcaggttcagttcctagcacctacagcatggctcacaacagcccgtgactccaactatagaggacctagtgctctctctggtctctctggccaccaagtactcacatagtgcatacacacacacacacacacacacacacacacgtacacacacatatgatgctaaacaaccatatacataaaaatcaaaataaataaatctttaaagcaaagtcatttgtgggaacaggactgaggatggggcaggggagacaggcaacgagccatgtgacaaatgtctggaaatcagatcctgagaccagaatcaggttgcagatctgagtttactgcccagcacataagcttatatacagtgtttgagacaatcccaagccactaaatcttcaacgaatcatatctcgacatacaatcaccatgccccagtgaaaaccctgcctgacaaggttactcagaataaggatggggtatggcaggggaaggaagagggcagggggaggagaattacaggggaagtcgggagtagagaggggaaggagggagggggaagaggaggaagaaggggggagcattgtcatctgttaggacttctggaagacagggcttccttttcactgtctcacctgtgtctcaggcgtcatcttatatctaatgctgtgtatggcagctcaggactcttcagaaggtcgcaggagcctgtggcacatcactctccatcccactttttcctttccaagattgacttccacatctcccatatcatttttaccgaaactcatgctaatcaacgacttccttcctagcatcctcaatgagagtaatctgatgacaaggaaagttgatgactgatgactgggttggtttctacaatgaaatacctgacacaggggacttttgcagaaaggcttacagcatgcatagctttggagacttcaggttggaagactctctgctttgggtcactaatgagaaccctgggtgacagagtcaggattacacatgagagtgaatggacacatatgacccatgaatcagaggcagagaataagatttggtccgatagtccttgatgacctgaggactgtccattagactccacagcacttcccagggcttctcctctagatggaccgttgggggccatccatctataaacaatggcagttaccacctgaaatacagctatttgtaaggaaggtaaccacttaatgatagaaatttgccttcttggaacacacaccgaaatgtacaaaataaaccaagccatcccatcactgacttctttttctagcaagatttttttacataatttcttactgaatcactggaaatttcccagcatgcaccccaatctcatttatttcccagtccttctatatctgctctccacccttgtagctccacacacccccaccccacaaaagtaaatttaaaaaaacaaacaaacaaataaaaacagaaaccatctcatcaacaatctgttcctctgtcatcggcagccttctgtgcatgcaccactctgctcctccatctttcctccatctccatcacatatgaacttgttgtagtggcacaggatgtcaaggtgtgttgtgcagtatactctgttgtccaaacagcactatttgtgactgttcattgcagtgagtcaaggcctttgttcaaggcctctggttttgctacaatatcaatacttgaccctcatagagacttgcagatatcctgccccaagtcatagggatctgaactatctgtactatagggatcctgcaactatggatctgtagacctggtctcttcatgcacttcatcccctcatagatggggaagatgttggggtgggccaactcaaagccctggctaagataaaaaactcaggtgacagtagatgctgtcgaggatgtagagaaagagaaatactcctccattgttggtgggattgcaagctggtacaaccactctggaaatcagtctggcagttcctcagaaaattggacatagtattacctgaggacccagctataccactcctgggtaaaagattttccaacgtataacaagaacacatgttccactatgttcataaaagccttaattataatagccagaagcaggaaagaacccagatgtctttcaacagagcagtggatacagaagatgtggtccatttacacaatggaatactactcaactattaaaaacaatgaattcatgaaattcacaggcaaatggatggaactagaaaatatcatcttgagtgaggtaacccaatcacataagaacacacatgctatgcattcactgataagtggatattagctcaaaagctcagaatacccaagatacaattcacagaccacgtgaagctcaagaaggaggaagaccaaagtgtgggtgctttggtccttcttagaaaggggaacaaaatactcacaggaggaaatatggagacaaaatacagaacagagactgaaggaaaggccatccggagactgccccacctggggattcatcccatatacagtcaccaaatccagacactattgtggatgccaagtgcttgctgaaaggagcctgatatagctgtctcctgagaggctctaccagagcctgacaaatacagaggcagatgctcaaagccaaccattggtctgagaatggggtccttaatagagaagttagagaaaggactgaaggagcagaaggggcttgcaacccaatagggaacaacagtatcaaccaaccagacctcctagcaactaaacaaccaaccaaggagtatacatagagggaccaatggctccaaccacatatgtagcagaggatggtcttgtcaggcatcaatgggaggaaaggttcttggtcctgtgaaggctcaatggatgccccagtgtagggaaatttgagagcggggaggcaggagtaggtgggaggacaccttcatagaagccgggggagggggcgtgggatagggagtttctgcaagggaaactgggaaaggggataacatttgaaatgtaaataaagaaaatatccaataaaaaaaggaaattaacaacaacaaagaaaactattctttaacctagttaaatgtgagtctcccaaacctttaaaaactgtgatatgacctgttgccaatatgctt

SEQ ID NO: 60 - DNA, 321478 bp, Mus musculus
aagcatattggcaacaggtcatatcacagtttttaaaggtttgggagactcacatttaactaggttaaagaatagttttctttgttgttgttaatttcctttttttattggatattttctttatttacatttcaaatgttatcccctttcccagtttcccttgcagaaactccctatcccacgccccctcccccggcttctatgaaggtgtcctcccacctactcctgcctccccgctctcaaatttccctacactggggcatccattgagccttcacaggaccaagaacctttcctcccattgatgcctgacaagaccatcctctgctacatatgtggttggagccattggtccctctatgtatactccttggttggttgtttagttgctaggaggtctggttggttgatactgttgttccctattgggttgcaagccccttctgctccttcagtcctttctctaacttctctattaaggaccccattctcagaccaatggttggctttgagcatctgcctctgtatttgtcaggctctggtagagcctctcaggagacagctatatcaggctcctttcagcaagcacttggcatccacaatagtgtctggatttggtgactgtatatgggatgaatccccaggtggggcagtctccggatggcctttccttcagtctctgttctgtattttgtctccatatttcctcctgtgagtattttgttcccctttctaagaaggaccaaagcacccacactttggtcttcctccttcttgagcttcacgtggtctgtgaattgtatcttgggtattctgagcttttgagctaatatccacttatcagtgaatgcatagcatgtgtgttcttatgtgattgggttacctcactcaagatgatattttctagttccatccatttgcctgtgaatttcatgaattcattgtttttaatagttgagtagtattccattgtgtaaatggaccacatcttctgtatccactgctctgttgaaagacatctgggttctttcctgcttctggctattataattaaggcttttatgaacatagtggaacatgtgttcttgttatacgttggaaaatcttttacccaggagtggtatagctgggtcctcaggtaatactatgtccaattttctgaggaactgccagactgatttccagagtggttgtaccagcttgcaatcccaccaacaatggaggagtatttctctttctctacatcctcgacagcatctactgtcacctgagttttttatcttagccagggctttgagttggcccaccccaacatcttccccatctatgaggggatgaagtgcatgaagagaccaggtctacagatccatagttgcaggatccctatagtacagatagttcagatccctatgacttggggcaggatatctgcaagtctctatgagggtcaagtattgatattgtagcaaaaccagaggccttgaacaaaggccttgactcactgcaatgaacagtcacaaatagtgctgtttggacaacagagtatactgcacaacacaccttgacatcctgtgccactacaacaagttcatatgtgatggagatggaggaaagatggaggagcagagtggtgcatgcacagaaggctgccgatgacagaggaacagattgttgatgagatggtttctgtttttatttgtttgtttgtttttttaaatttacttttgtggggtgggggtgtgtggagctacaagggtggagagcagatatagaaggactgggaaataaatgagattggggtgcatgctgggaaatttccagtgattcagtaagaaattatgtaaaaaaatcttgctagaaaaagaagtcagtgatgggatggcttggtttattttgtacatttcggtgtgtgttccaagaaggcaaatttctatcattaagtggttaccttccttacaaatagctgtatttcaggtggtaactgccattgtttatagatggatggcccccaacggtccatctagaggagaagccctgggaagtgctgtggagtctaatggacagtcctcaggtcatcaaggactatcggaccaaatcttattctctgcctctgattcatgggtcatatgtgtccattcactctcatgtgtaatcctgactctgtcacccagggttctcattagtgacccaaagcagagagtcttccaacctgaagtctccaaagctatgcatgctgtaagcctttctgcaaaagtcccctgtgtcaggtatttcattgtagaaaccaacccagtcatcagtcatcaactttccttgtcatcagattactctcattgaggatgctaggaaggaagtcgttgattagcatgagtttcggtaaaaatgatatgggagatgtggaagtcaatcttggaaaggaaaaagtgggatggagagtgatgtgccacaggctcctgcgaccttctgaagagtcctgagctgccatacacagcattagatataagatgacgcctgagacacaggtgagacagtgaaaaggaagccctgtcttccagaagtcctaacagatgacaatgctccccccttcttcctcctcttccccctccctccttcccctctctactcccgacttcccctgtaattctcctccccctgccctcttccttcccctgccataccccatccttattctgagtaaccttgtcaggcagggttttcactggggcatggtgattgtatgtcgagatatgattcgttgaagatttagtggcttgggattgtctcaaacactgtatataagcttatgtgctgggcagtaaactcagatctgcaacctgattctggtctcaggatctgatttccagacatttgtcacatggctcgttgcctgtctcccctgccccatcctcagtcctgttcccacaaatgactttgctttaaagatttatttattttgatttttatgtatatggttgtttagcatcatatgtgtgtgtacgtgtgtgtgtgtgtgtgtgtgtgtgtgtgtatgcactatgtgagtacttggtggccagagagaccagagagagcactaggtcctctatagttggagtcacgggctgttgtgagccatgctgtaggtgctaggaactgaacctgaaccaagagcagcaagtatttgtagctgttgaaccatctgtctagtcctggaatcattaatttaagagctattcagctccaaggaattatttattttgtagtggttatagtactactaatcttagttctatattttactaactattattatttgtaattggtacttagcaagcacatactgaacgttgtataccatattagaatacctatatccatatgatctatatctctgtgactatatcttaagctgttttgtaggtagcaccatactgactttgtagatttaacactcactatgttattcttaggtttttgtttttcatgtctttatttcaactcctctagtagatcacagactggttaagaaggaaggaggcagtggtggacactttgttttattccctacagtttctgcaaatacagaagagatggaacagattcatgtaggactgtctgctctgtcctgcctgaagcaaggaagacccttcaagtcaaagttcatgtggcatatgtgttgggaagattatggcaggatagtgagctgttctagccaaattcctacacaaggggaaaggggaaaagaaagggtggggactggaaggatggaacaacagttcacagcactggctgatcttctagaagacccaggtcaattcccagcatccacacagcatctcacaacaatctgcaatccagtctcaggtgatctgactccttcctctgaccccttagagtaccaggtacacataaggtgcacagaaacacatgtaggcaaaacaccaaaaccttacctgcgccctccctccaaccccccagagtttaagaaaaggaacggcattcaacttttaaccatgctttccttcttactggccagtgagacttgctaacttcttgaacatcgtttatttcagtgtctttgaggggaagtgagcagggtaactagacttgtgtttaaagttattgtctgaacccacttcattcaatcgctcatctcacttttctctctgttaatgtcaacataacaattacagtcaacatgttttacccacaggaatgcagcgagatgttattgcacaacactgtggaaatactgtttgttttataaatgtcacatgtaagtattctttgatcatttgcaggaatgggagaaggatagcatgctgaaactctagctgtcatccagcctgcctaagagctatttatgatgcccacacattagcatcagcagggtactttgctggtagctttccacagaaccatatctttttattatagctatttgcaagcagtcattgatacatttatcatttctgggttttaatacaattgcaactcaggcaatctgaaatcaataaagttttagatgggatgtgccaattggataatgaaagtgatttggacacatagacatctgtaacatttggggaaatcattcttgttgaataatgtagagactgtggtctgctgttaccaatgtaaataaggttctgagtcctatagagataagtggtttattgtgaatataacaaggaggctgctcttttttttttttttaaaccaacccatagattatacacatagattctatttgagcatcagactgtcccctgaaggtcagggttgaccttccttttatacacagaacagaattctagtcttattatgttttatttagggtgtgtacaaatgtgtgtgtgtgtgtgtgtgtgtgtgtgtgtgtgtacatgcttgcttgctacaatgcccatgtgtataattcagagaacaatttgtgaagtacatttctctccttctagcatgtgggtcccaggtgttgaactcaggtcatcaaacttgttggcaagtggctttatctactgagccaactctctggcccttaaaatgctaatgtcacaaaagaccttgtgtctgtctggtggtctaacacctaaatttatcaccaggaggacacctgcctttcttagccacctcctcaccatttcctgatcaacatcttcccatttgtctctctttctttggcatttctgtgaacccttctaactcccagaattcctcagggttaacttaaaagaagctatgataatggctcctataatggaaaaacgacatgatgagccttttctttgctttccacgatcactataatttggagggaagtgatttaacatctgtaggctgaggtaatgatggtcctccaattgagatgttatgagtagcaaattagttaatgggtgcaagatatttaacatgataatagtttggtatcttcccggccagatctggggctcaagtcccttccggcccactgctgtaccatggtccttggcccggggcgtctgcggacatccgcaaggtcacacacaggatccgccacgggatcctaagacttctggtgagtggaacacaacttctgccaggaggcaggttcaaacaccagatatctgggcaccttccctgcaagaggagagcttgcctgcaaagagtactctgaccactgaaactaaggatagaactagtctccctggtctgctgatagaggctaacataatcacctgaggaacaagctctaaccagagacaactataacaactagctccagagaatacaagatggcgaaaggcaaatgtaagaatcctactaatgaaatcaagaccgctcaccatcgtcagaatgcagcactcccatgccacctagtcctgggcaccccaacacaaccgaaaagctagacccggatttaaaagcatatctcatgatgatggtaggggacatcaagaaggactttaataactcacttaaagaaatacaggagaacactgctaaagagttacaagtcctaaaagaaaaacaggaaaacacaaccaaacaggtagaagtccttatagaaaaacaggaaaacacatccaaacaggtgatggaaatgaacaaaaccatactagacctaaaaatggaagtagacacaataaagaaaacccaaagtaaggcaatgctggagatagaaaccctaggaaagaaatctggaaccatagagcatcagcaacagaatacaagagatggaagagagaatctcaggtgcagaagattccatagagaacatcagcgcaacaatcaaagataatacaaaacacaaaaaaatcctaactcaaaacatccaggaaatccaggacacaatgagaagaccaaacctacggataataggagttgatgagaatgaagattttcaacttaaagggccggcaaatatcttcaacaaaattatagaagaaaacttcccaaacctaatgaatgacatgcccataaacatacaagaagcctacagaactccaaatagactggaccagaaaagaaattgctcccgacacataataatcagaacaacaaatgcactaaataaagatagaatattaaaagaagtaagggagaaaggtcaagtaaaatataaaggaaggcctatcagaattacaccagacttttcaccagagactatgaaagccagaagagcctggacagatgttacacagacactaagagaacacaaatgccagcccaggctactatacccagccaaactctcaattaccatagatggagaaaccaaagtattccatgacaaaaccaaattcaaatattatctttccacgaatccagcccttcaaaggataataacagaaaaaaaccaatacaaggacggaaatcacaccctagaaaaagcaaaaaagtaatccctcaacaaaccaaaaagaagacagccacaagaacagaatgccaacactaacaacaaaaataaaaggaagcaacaattacttttccttaatatctcttaatatcaatggattcaattccccaataaaaagacatagactaacagactggctacacaaacaggacccaacattctgctgcttacaggaaacccatctcagggaaaaagacagacactacctcagagtgaaaggctggaaaacaattttccaagcaaatggtctgagaaacaggctggattagccattctaatatcggataaaatcaacttccaacccaaagttatcaaaaaagacaaagagggacacttcatactcatcaaaggtaaaatcctccaagaggaactctcaattctgaatatctatgctccaaatgcaagagcagccacattcattaaagacactttagtaaagctcaaagcacacattgcacctcacacaataatagtgggagacttcaacacaccactttcatcaatggacagatcgtggaaacagaaactaaacagggacacagtaaaactaacagaagttatgaaacaaatggatctgacagatatctacagaacattttatcctaaaacaaaaggatataccttcttctcagcacctcatgggaccttctccaaaattgaccatataattggtcacaaaacaggcctcaagagatgcaaaaatattgaaattgtcccatgcatcctatcagaccaccatggcctaaggctaatcttcaataacaacataaataatggaaagccaacattcacgtggaaactgaacaacactcttctcaatgataccttggtcaaggaaggaataaagaaagaaattaaagactttttagagtttaatgaaaatgaagccacaacatacccaaacctatgggacacagtgaaagcatttctaagagggaaactcatagctctgagcgcctccaagaagaaactggagagagcacacactagcagcttgacaacacatctaaaagctctagaaaaaaaggaagaaaattcacccaagaggagtagacggcaggcaatagtcaaactcagggatgaaatcaatcaagtagaaacaagaactattcaaagaattaaccaaacgagaagttggttctttgagaaaatcaacaagatagataaacccttagctagactcactagagggcacagggacaaaatcctaattaacaaaatcagaaatgaaaagggagacataacaacagatcctgaagaaatccaaaacaccatcagatccttctacaaaaggctatactcaacaaaactggaaaacctggatgaaatggacaaatttctagacagataccaggtaccaaagttaaatcaggatcaagttaatgatctaaacagtcccatatcccctaaagaaatagaagcagtcattaatagtctcccagccaaaaaaaagcccaggaccagacgggttttgtgcagagttctatcagaccttcaaagaagatctaattccagttctgcacaaactatttcacaaaatagaagtagaaggtactctacccaactcattttatgaagccacaattactctgatacctaaaccacagaaagatccaacaaagatagagaacttcagaccaatttctcttatgaatatcgatgcaaaaacactcaataaaattctcgctaaccgaatccaagaacacattaaagcaatcatccatcctgaccaagtaggttttattccagggatgcagggatggtttaatatacgaaaatccatcaatgtaatccattatataaacaaactcaaagacaaaaaccacatgatcattttgttagatgcagaaaaagcattcgacaagatccaacacccattcatgataaaagtcttggaaagatcaggaattcaaggcccatacctaaacatgataaaagcactctacagcaaaccagtagccaacatcaaagtaaatcgtgagaagctggaagcaatcccactaaaatcagggactagacaaggctgcccactttctccctacctcttcaacatagtacttgaagtattagccagagcaattcgacaacaaaaggagatcaaggggatacaaattgaaaaagaggaagtcaaaatatcactttttgcagatgataagatagtatatataagtgaccctaaagattccaccagagaactcctaaacctgataaacagcttcggtgaagtagctggatataaaattaactcaaacaagtcaatggcctttctctacacaaaggttaaacaggctgagaaagaaattagggaaacaacacccttatcaatagtcacaaataatataaaatatcttggcgtgactctaactaaggaagtgtatgataaaaacttcaagtctctgaagaaagtaattaaagaagatctcagaagatggaaagatctcccatgctcatggattggcaggatcaacattgtaaaaatggctctcttgccaaaagcaatctacagattcaatgcaatccccatcaaaattccaactcaattcttcaatgaattagaaggagcaatctgcaaattcatctggaataataaaaaccctaggatagcaaaaactcttctcaagtataaaacaacctctggtggaatcaccatgcctgatctaaagttgtactacagagcaattgtgataaaaactgcatggtactggtatagatagagacagacaaatagaccaatggaataagaactgaagacccagaaatgaacccacacacctatggtcacttgatcttcgacaagggagctagaaccatccagtggatgaaagacagcattttcaacaaatggtgctggcacaactggttgttatcatgtagaagaatgcgaattgattcattcctatctccttgtactaaggtcaaatctaagtggatcaaggaactccacataaaaccagacacactgaaacttatagaggagaaagtggggaaaagcctcgaagatatggacacaggggaaaaattcctgaatagaacagcaatggcttgtgctgtaagatcgaggattgacaaatgggacctaatgaaactgcaaagcttctgcaaggtaaaagacaccgtcaataagacaaaaagaccaccaacagattgggaaaggatctttacctatcctaaatcagatagtggactaatatccaatatatataaagaactcaagaaggtcgactccagaaaatcaaatagccccattaaaaaatggggctcagaactgaacaaagaattctcacctgaggactaccgaatggcagagaagcacctgaaaaaatgttcaacatccttaatcatcagggaaatgcaaatcaaaacaaccctgagattccacctcacaccagtcagaatggctaagatcaaatattcaggtgacagcagatgctggcgaggatgtggagaaagaggaacactcctccattgttggtgggattgcaagcttgtacaaccattctggaaatcagtctggtggttcctcagaaaattggacatagtaataccggaagattccgcaatacctctcctgggcatatatccagaagatgccccaatgggtaggaaggacacatgctccactatgttcatagcagccttatttgtaatagccagaagctggaaagaacccagatgcccctcaacagaggaatggatacaaaaaacgtggtacatttacacaatggaccactactcagctattaaaaagaatgaatttatgaaattcctaggcaaatggttggacctggtgggcatcatcctgagtgaggtaacacaatcacaaaagaactcacatgatatgtactcactgataagtggatattagcccagaaacttaatatagtgagatataaggtacaatttacaaaacacatgatactgaagaagaacaaagaccaaagtgtggacactttgccccttcttagaattggaaacaatcacccatggaaggagttacagagacaaagtttggagctgagacaaaaggatggaccatcaagagactgccatatccagggatccatcccataattagcctccaaacgatgacaccattgcatacactagcaagcgtttggtgcaaggaccgtgatatatctgtctcttgtgagactaggccgggtcctaacaaacacagaagtggatactcacagttaactattggatggatcacagggcccccaatggaggagctagagaaagtatccaaggagctaaagaaatctgcaaccctgtaggtgcaacattatgaactaaccagtaccccggagctcttgactctagctgcatatgtatcaaaagatggcctagtcagccatcactggaaagagaggcccattggacaggcaaactttatatgtcccagtacaggggaatgccatggccaaaaatgggaatgggtgggtaggggagttgggggtgtgtgtgggaggcttttgggatagcattggaaatgcaattgaggaaaatacgtaataaaaaaagtaagaaataaaatggaaaagaaaaaaaaatagtttggtatctttctcactgatgacagacatttgtgttcacatctaagtttgtctaaaattgttgctattttgacatgcaagaaggatctagttaggatgttttttctacattcttatataatttatcagttgggatgttgtgatggtttgtatatgcttggcccagggagtagcaatatttggaggtatggacttgttggaataggtgtggctttgttggagtaggtgtggcttttttcagtaggtgtggacatgggctttaataccctcaccctcgatgcctggaagctagtcttcctctgtttgtattctgaacaagttatagaaccctcagctcctcctgcaccatggctgcctggatgttgccatgctcctaccttgatgataatggactcaaccgttgaacctgtaagccagcctcaattaaatgttgttctataaagtgttgccttggtcatggtgtctgctcacagcagtaaaacccagactaatacagatgttttttctttcttccatggttgaaaattgaacctagggcatcaggaatttaaagcaagtcctcacatatagttggctccaggtcttagctaggaacttttaatgaaaaatcttaaagaagttaaaaataaagtatgtcataatgtcatcatgtatgcttcatccttgcatcagttgatgggaatcccagggaacatttaagattgcaaatttcaaccctatagttccaaaggattttcttctatcttgacaaatacattttaaagatggaataaaaataaatgattttctgtggtgttttccaaatgtttacaacataacatgtattgtttaagtgtcagaaaaagggattttctttacagtctcttaaaatacctttgaatacaaattagaattgtttggatagtcatgggtttatctgaatgcaagaagtattaaaatcttgccatcaaatgggtttaaaaaatttaattacacatttgaagtcctgattacaccctagggatttatttgcttatgaaaagtcacactatgaattacaatattctgcttcctcagataagtttcaccgttcattccacaaatgatttgtaaaattttgcaattacctaaaaaacatcgatactatgttacaaaagggtacttaaatatagatgagaaagatagatgtttgtcttctcccttagatatcaatattaaataaaagacagaatgtctttatttaaaaccaaccccctttcccctccccccaccaaatagaatgagtaaacatcaatgtgaagaaaggcttccctcaaacctgttattcatttcaaacatgtgttaggaaaaaggtctattctgcatataaaatataacaaccaaaagggaacagtgagtagaaaaataaaatatgtagaggagacaaagattctgcacacatagatttaaaaccccaacaggcaacagttttttttttttttcagaaagagagaccctacatacattcgtttactgaaacataaattctcaaagagtaatattctgacatgatagctggccctgacagactcacccactgcaaccaattcaccagtccttagtatattaatatttgattctaatagtccagtggaaatggaattaagatttcccataaatatctttgtaacatagactttccaaaattgcaatggcatgcctaccaacacccagtcagtttactgggagtgatctcaccagctttgtctcccacacagtagcagggtcatagatggaaaagggactctgatcggaagacattagagagttgataattattttcaaaaatctgaagttgtgaatgaaaagtgatgaaagaaaagttgctggctaggtttcccccccttccttacagtgctgtggtaaaaataataataataataataataagtttaataccctttagtcaggaaacaactccttcacttgctacagggctcaatataggataagaaaaaaaatgtgtttttggctgtagcttcagtaaacaacaaatgaagaaaaatcttgtcttcaggaagtctggaaactcagaacagagacctggtcttggggatagtgcctccatgcccctatgccccacaacacttagcaatgagtagctgagccctattctggtggaaagacgacagactagttccagcatcaaaacaatataatgaaacaaccaaccaatgaggaacagttaattctcctgaataataaggacatcatgtttgcatataggacagcgtttgcattattgctctacatagaataattaaggaacccataacagactgcacattacaaacttaaggttctttggtgaagaacgaaataaaacagtatttgagctttaaagaaaaatatcttatccatgatttttttcttttatctgttgatccgttggatcctctcacaaagcagggagaggtactgagttagtttcaccatagcaacgattgccacacccccagccatcatacaagttggccagaagagagaatggaacagcacattggagctgtagagtttggtcaggatgacactcttctggtttccttctgggtcagaatagcaggggaagtgttggtgtctcctgaagttttccatgacgacactcacgagagacatggactcctcaaagttgtttccacacttaggaatataggagcactgtgaagagcaagacaaactatcattaggaggagtcaacctaagtttatgtgtgagacaaacatgaaggtcaacttttatagattcaaaccaatgggcccccaaaccagagagatcacacattgattaaagtaatgttttagggttattagtgtttcttggtaactcacttataaatgatttcgctgttgactaaaatcttattatgaatgtgttagtttggtataacaatctcacatcacatacatagaaaaagtaatacattttgctatagttaaggatgatgcgtcttaattatttcccatcagacacacttgtccaggagcccagagtgcaaacctttctaagtttggtctgcccatgtaacataaaatattatcataacatatagtgatgattaatcttaattgtcaacctgactggatttaaaatcaccatggaaatacatctttgtatgtgtctatgttagagttcccagaaaagaaatgcaggaggtgaccaaccacaggggatgtaggtagcagctggaccttgactggagactgaagaaaaagagaatttgagctgattgccactattcaactctctgccacctgacaacaaggttactcctttctgtccacaatgaaagggatcccctcaaactgtgagccagaataactctgtccttccttaagtgacttctgtcacaacaatagagaaagcagttcatacacacatcagtatgaaaagtaactcataaatgtataattgttttgaattcatgttactcaaccaatcttgctgaatcttgggcatcttgttcctgtcatcaagagaacatctgcagctttggcagatcttagtaaattgggaaaggctgaacagaggcctatgaggaaatggagagtcccattcagcatgtccaagtgccctttgctgtcagccaaggggacataaaccaggatcacagcagaggacactgtttgatccaaggaccagctgctgttttgatccgcctgtctcacctccatttcctgtcccctctacctctttccctcttctttctttccacacattcataagaagtggcctgcggtattctgagtgcatcagtatgagatcctagaatctgggagaaatttatacctgaaaaatctcacaggaagaaaatataaaataaacgaattaagtttcagctagtggagtctttctggactaatttccctctgacttagcagcaccaggaactttgtggctttggaaccctggggttatttgactctgaatagcagacatttctctgcttagttaagaatgaataatgagcatgtggcaatgattggcatgggggctaaggatagctacgaatgaaacccaatacaacattataaactgactcaaaacgctgtgtgtgggcacacaagtgcacatgaaatacacacccatccacccactcatccacatacatatatgtacatatatgttaacttaattgccgggttctcaagcatgaactttgtagacgacaaatgtttcctgaagcaagcagcaaaacaagacaagcacagataagccatctatagctgaactcaggctgagccactctggattataaagacatcgggtcttggtatatttttttgcttaccttatggtagcactttcatgtctcccagagctaagttactgaaatgatcccaataaaaatggcatttcattaaaaatggagtttttctttattttcttctgctgtggtgaatcaattcaacttacttttttttttttttttgtaaagaaacatctgccagccaaatagcaataattctgtcactaggtaagatccttccaaataaaacatgatataaagcacctctgagggcatctggaaggttgtaatataggagcaccttatgaaaagttaaagtttatggggtctgagaggtgtgtctgtgtgctggctgcactccatacatgtccacatttagttactctgtgccaggggtacacactgggcacacatgctatggtgagctctcctgacctggttatcttccactttctgtttctacctgtgaaaactctgccatatatcagttgttcatttctttttatcactgacagatcctttgtgacgatgaacatatgaggtcatagaacaagttcctgacttgtattcatgtgatgtgattgctataacatgtggccctcaaaaccaatttcatctctgtaatgagactcatagagacttcccagcagccatctttcagaatgagatgcggaatatgcataaggcctccatacattttttattagcacattttcctactggaataccacattttcttacatgctcttctaaagtcttgagtcaagtgccacatacagatttgcaaaagctccgtagagggcagaataaccagatatggagttctcacagggtcagcttgccttattgccctactgttctttggaggcttgcattgtacctaagtctactttaggatctgggcatttgcttctgttgctccagctttagtcacgtgtactcttgggaagtgagatttaggtattatggtataagcagtgtatgctacagaagtgggcataacatggagtgatgatctaatatcacatgacttcatcatatgtttgggggataattttatgtgagtggttgatattataaaaagttgatattgtatgttgttctaaataattttcctcttttttttttgagacgaggtctctcattgaacctggaactcaccaattggctagactggctggctagtgagtttccaagattctcccgtcccaacctccccagcactgggaatatagatgcactacttttacattggtcctggggaatctgaattctaggcctcttgcttgcatggtccactttcctgactgagctgtctccctgccttgatagtcttcttattatccactattaatatttttattaagtttttgagatgtttatgcattatatttttatcacagttacttccatcccccaactcctctaagatcttccccctttccatacccatccaactctgagtctacatctttttaattacttcttttacttttgagattataatgtaactacagtaccaccaacccaatttgttccacaaaacctccccatataatcctctttactttcttccaagtttaaggtctttttgtccattgatcattgttacacgcatatatgtatatgcatgcatcatcctacatccaacaatctcagtctgtgtcatgttaattgtatgtgttttcagggctgaccatttggtatcagataagtggttggtgtgcttttacctggggaatactactccttctgctctcagcctaccttcatttgcctgttgttctctgtgtaaggttgaggccccgtggccgttcccgagctacatcagcacatttattgttgttcctcatcagctcatctttggaagttgtgttggtgagactttacaggtgtagttcctgacattcctggactatgcaacctcacagcaaactccctgatcctctgactctcacaatctttctgctcccccttctcaagtgttccctgagtcttacgtacaggaattgttttgtagatgtatttgttgggactgggatccacaactctgcattttgatttggctgtgtttttctgtaatggtctctgttgcagaaggaagtttccatgatgaggggcgaggactacactcatctgtggattcaaggacacatatgtagaatgtcgttatgggttatgctggtttagtagaatggtaattatagggtctccagtacccatgacgtcaccagccctgggataattggctaggttcccagtgcctggaatggttcccttccatttatagaacctttggtaaccaccaaggtatgcatggaaccaccgcacttttagggtgacatgacatgctggttgtcacgtccattgttgtggttcatagcctcattgttatatgtaagatggttgatttattctctcctttggaagcttacatgatgctttctgtaccttgaaagctaatcctcatggaagtagctttcaggtgagttccagctcagggggcctctacatcagagagtccccttagtccaactagtgctggctataaacccttggaaggtcaatctgctagatccacacccttaaagaaaactaactctccctttcttggcagctatcaataacaatagttcttcatcagagaatagggactttgtggccacctcctgcctctatactgagattttttgtctggtttgagtttgagcaggtcttatgcatgttgtcacagccactgttaattcacatgggcaaatgtccagtggtgtacactgaacaatttccatgttgtcatctcccaactctggcttttataatcatttcactccctcttctgcaccaatgattcctgatccttgacagattggggtgatacacacacacatatatatatatataatttaggggtgaacactgatgatgatgtgctgatctgtgtgtatgatggtaaattaagagttgttttaacagtctcttcttaacccaggctttgttaatagacctgacctctttctctagcccctgtgatccacgccatgacccttcctcttctagctatgaaaacttggttttcagcatctcctggtcgcttctttgcttaggtggccaattaagactcagcaactgcacttctttccagttcttttcatcacagctgaattgaccttccctacctcatcttacttccagaatcttctatgtcaactgagctatttttattctcatgatagacaggaagttttttttcttaaactacctgttgggttttttagacatgcctcactaggcacatgtgaagtagagtgacgggccgtcatcccagagatgaaagatgggcccagcagcagggcaggatctggctgagtaacctcactgtcagcctctgttttcttccaatgatggggagggcaccatcagttctttgggacttcttcaaggaagagtcttatgctttatttgctcttttataagaaaggaactaccttatttcaagaagaggttagatgttcaatgaaatccaaatagttattggatctaataaatatggtgctaatatgccaactagcaatacacaggtgtcaaaaataaaaacaatgtaggatagacgtcagaaagagaatacaacaggatgtgctggtaagcctggagaggagtgtgcctaagagctttcctgaaaagataatacatcacagaggcacatccgatttgtcctaaaagctcgtcagccaccagggcaccttatttcatctgtcttgagttaaataaacaaagtcactcaggtgaaacatgaacaagcttggttttgaagtaaggaaaccttgtgctattctgaacctttgagttccacacatttgtgagggacacaggtcaagttgagggcataaacttagacctccttttcttttctcttttgagaactcccttcatgaccagctttaaagtagaaggtccttcaacacatagttcagatgtgtttggtctgtgcttttcgcatcctttgaatgtgggaagcaggattatttgaagtgttcggaagaaaaaagcaagaacaatccaggctttgctgcgtataaccatatcctccattttggcataaggttatttccagaggagtacaattttgtgcttcttgcctcgagcatacatatttaaccactattgctcagcgtggagtagcatattcattactgttcctgttgctgtgataaagcacccaacaagaacatcccgaggaaggaaggctttattgtggctcattgtctgagggcatggtctgtcatggcaggaaaaatggcagcaggggcttgaggcagctcatcacatcgcactggcaaccatgaagcagagagtaatgaatgcttgtgttcacctggttttattttcttattatttattctaagactttagcccatgggatggtgctgcccacaataggcaggtcttctcatttcagtgtactttatttttgaaacttccttccatacgtgcccagagtctaacttaatctagataacccctcatagccaggtttagaggctttactccagggtgatccttgatcctgctggaaatctgcatcaaccatcacaaattgaaaagaaagtttaaagacactagagatggactgagacagaagggctctagagcattgaattggtcagtccccacagcagccataccatggagccccacagtgtgcctgagagtgagccagataatctgaccttgatcctagtcacggtcctgtttcttgggaaggaagagtttccttgtcccctttctccttcttgccactcagaggcatcagggtttgcagtcttcttgtaggcaactctttctttgattcctacacagagatgtactcagatattccagaattcaggtttggtatgaattgactaaactttgtcaatgtacagctctgtgcaaatgtgtgtgtggagaccagacaatccaagatgtcattccttggatgccatctaccttatttttgacaccctgactctcactgacctagaatttacaaaacaagatggctggccagtgaactccacctgtctccccactgctgggattacatatgtatgataccatgtcccactttggacatgggttctgcctatcaatgtcaggtccccatacttgtgcatggggtacttgagcaactgaaccacaagtcttctgaactctctggctgtactttctcaggggtatatgttgagggctttctcttcaggagagagcaagacaagagtcttagatttcatttcagacctagttagttgttgaatgcatggcgtgggggaaattcattttctaaacctgcttcattgttataaagtaagaatggtgttggtatgccacatagggattgctgttgcagctaaatgagccagtatatgtaaaacattagtactgtacgatacctggcacattgtgagctcctgataaaatttgtctattattattttatgagcaggagtaagcaaggtaatttttttattagatattttcttcattacaatagcgggcatgctctacacagtgagaacttagttaacactattttccattcagtgccttggctctattttctgttttctgtgacctcccagtgctgtgctgaacacatcataaggaccttacagcatgcaaatgtgaagccaaaggaagcaagagcagccaccttgccactaactgcaaacatctcacgaatggattggggagggtgttggtcacacggtcgaaagaggctgaggacactattaaacatctggcagtagagggcaggtctctgtattgatcagagtcaaaagtacccatgtaaaaaaaaaaaagtacccatgtaaaaaaaagcactggtctagatgtgttagtctctgaaattaggagaacataatcctttgaatggtgtcagaataaggaacaatgctgaatttgcagtggtgaataattggtagtttgtggaatggcccatttgaagcaaccatcttttctgtgatgattacgtataaatatcatacatatgctatcccagcatgcatcaaaatggatatagtcttttatttcattccaaatgttatcttaaattcacctttaaatgagtatgtgttgagaatcactggtgtttggcgagaagtttaactcccgaaggagttcagaactcagatgtgaagcagcagccacggtgaattaatattcagctgctgtttatgtttatagtgacagtctggtggctgagggaatcagagatcccaaagcatggtgaattaatgctcagccgctgtttgtcattccagtgacaacctactggccaggggctgagggatgcacagtcccctaagccacttacagctcctagaggccatcaatcaactaagggctccacgagagcctgccagcttatccactttagcagcttgagcttggatactgtcaagaggctgggcactgagtttaaagattaaagaaaaaaaagagagagacactgaaaatttaaaatcaaatattttgaatgtttttccacagagatgcagacagctcagttggtccttcttggcttctgttgtctgcattctaacaccctcgatagtagctagaatctcagcagtagtagctagaatctcagcagaagcatgtctatttcttggcaatgtggatgtctgttattcttgtgagcttgtgggaagtaacaggatggggaggctgacaatgagggtacttttcctttttcctttcctgggagtatcctgaatactcctcacgctgaacagagatggtcaggtagtattctaaggcagagatggtcattttctcagaatctgtatttctgattaaaaacagaggctgcctgtacagaggataaagagctgggctggggaagtccatcttagtgctcagtgctctgtcctgtgactatctgctaactgtggcaggggactgagagcctcaggcttgtgtggtatttttgagaaccctgaaacagtgtggctggggctctggacagaggcttctgggagcaatgctcggatgcaggtcaaggtttgactgcctcaatttatgcaattacaaggtagtaagtagttttaaagggctggtgtccataagtacctggcagaagcaaatggaaacactggagagaatgtcaccaatccaggctgaaagcgacttttataaataactttaagagattagggagatgtttcagcggtcaagtgcatgcattccctttgcagaagacctgagttggttcccaacccccaagaaagatggctcaccacatcctgtaactcaagctacaagggatccagcaccctcttctggcttctcttgacattacatacctgtgcacatactgtatccttccctcacatatatacatatacatatacatatacatatacatatacatatacatatagatacacatacacatacatatactgaaatcatgttttctggaaggtataaactgttcaggtaaggttagacaacatgatcaccagaagtagaacaagaacatgggattcagatgttaaagtaaccgaaacaggcttttcaaacaaccacattaccttccgcttaagctttccaaggacaagaattagaatattatcagaaatgagaaattatcaaagaaatattctagatgggtattctcaatgagtattctataattgaaaatacattaagaggaccataaaggccatctcctttgtggtgtggtttggtcacttgcataccatgacgctagggggcgcattgaagctgtggctgtgtggactgtggcttctgacgggctctggtttgaatgccaactttttgccaaacaaaggggagtaggctatttcaatgaacttgggatgtagctttttcaggaaccactagagagtaagggaaaatgtgtgtattggcataatgctcatttagatagagtacatgcatcccgtcctttctataatgcttttggcaaaggcatgtgggtaggtcctggatatgaactgactgcaagtattgctatcagaagttggtatgaataaaggaaaaattatgattttcaaaatgacgcttacactgacaaccattctcagcgtgatgggacaattcctacaaagttggttacactgttactccatgttcaagaattgaaaatattagacacacagcacttttcctgtgcaattatgctccaggggccaaagcaacaagcaaacagatatgccaaagaggaaagcaaaggagtttggcctgaacttttgaagtcacagaccaaacaaatggtgaagtcagtctggtactggaggctatccattgagacactgcactggctgcgctgaactgagctgagggggtgaggagaggggctggttagagcagagtgcaggggaaacttctggtggtgaaatctttgagagagcattctctttctaggcgtgttacagctcttgtgatagatgctctcagatgatggggtgattctcatatactttccttctggattttatatatagttttggggtgggttggagctgataatagggtgcttcctattggcttggcctgagatgcctcatctacatgaggagggacttgtgggtgtgggcccctatgtgactgatggctacagttccttctgggggtgggggggcatggctacatgacagagcctggagaagttcctactgtcccttctgtctctcaagggcttcaagccctagattgaccttaccaggcttcctctcatgatcccctgcctcacagtgaagaagcgtctcctcagagtattggcttgggtttcttcttgcttgccatttccatggcttctaccaccactagcagaatgggatctgggtgtaacaaagaccatgacccagccctgaaattcacgttgggaagtgctttgcctacctgtgtatcttcatagttttggaaggatattctcaatttccaaatatcttttgaaaaaaaacagatggcttttgacagtaaaagtttttcaaatgtaaatgaaggaaatatctaataaaaatgtcttaaaagagattttcaacagaggaggaaacgaaggctgaggatgagaaatggagagaatggagagaaaaagaaagaagagatacaggagaagaggaggaaaaccaagactagggaaaagatggcctgataagagccaaaagcccaacacagaaaaagagaacaaacagaaacccaaacattgaaaaatagaacactgaactgcaagaaggaagtatacaggcctcaactctaatattttcattcctcttctacacttatttgtcaaatttaatttggaaaacgaagctagtatgaatatgaaatttgcattttacagaaaatagtcaactctcagtgaaaatagaaccaacaataacaacaaaagttgtcgtaggattttattatggtatctgataatggaggcaatgtttacatttccacctctatgtgtggacattttttatatatgttaatagcatcaggagtattaagttctgtgacattgtccttgtataacgcttaggactactccagatgtaggatagctatctgtttaatagtgacttgttttattattattaccatagttattgctaatagttgtattttccatgtgttatcaaaatattaaatgttgtttatattttctgtatatttttggaataatttattcaatacttgtttcttctgttaaaagatatatgtataatttttacttaatggtcagtaattcatcaaaggctttctctaatttttgtcacatagatccaataaatacaaacataattctttgcaaatggggaaagtagcacttctgaatttatatgataaaacacatttcaagttactacttacagttgctcatcatgttttgtagaatttcacacatttatgggaaaatgagtttatgcgagaatggtaaaattaaaaaatgaaaatacagtaagaaaacttcagtattagtggactagacagacagtaagcttttcagagttgaggatagatgtgctgagggggtaaatcctgaatgaagcgaggtgagagaaaatgagagaaatgaaaaacagggagaacagatcagatgtggtgagagagtgtaccctcccacctacagagtcccaggaggggaaggagcagagaaggagacaaaacacactgtgtaatgagagagcctgtgaactttctaacattagaaacagatttttaacataaaacagaagttttatagggaggggaagtactctgtgaatgcttagaagtctgaataaggaaaacttcacatctgggcttgagataaaccatagaaaatcaaaggaaactatctttaaacaggctggattgccctttagatgcagcagtaaaactgagggctgggtgccagacagtatcactgctcatggagagatgaggggcagaggaaaggttaacctagagctgtgtgcttagtggttgcttccttcaggaatcaaagctagataggaatgccttcaggaaaacacagatggaggaaacttcccatgtcagccactgctctggcatcatcgctaatgaaaggctgtttttcagactgtgggaaaaatggctgcagatggaagagcagaatcaaagactgagcacaatgaacatgcagagttgtgggcctgtagaagttgatgcttactgcacacatcaacggcagtctgtgccgacgtctccatagaatggtgatcataacatgcaaatgggctcaaaactgtaatctttgggttagacattaacattgtaggaacacgtgagtttctaggagcagaaagtgggtcctgcaagtgacctgctggacaagggcagactttcacaaagtaggcggagccagttgctgttgttagtcaaacacacacacttaaaaccaagccaatccaaaaaacaaaaataaagagacccactaacttgacccctacataaaggtcaatttcaggaagggtggttgtgtatggggaagagaaaacaggaacgcataggaacatgactttgaggccttcatagctacgttacaaacttaataaacagaataacaaaagcattaaacgaaaaggaaagaaagtgacagtgccttgtcacagtaaaactggaactgtcttctgtatgaagatattcaaggaaggagggaaaaggcacgggcatataacttttgttgtttgggtcttactgtcactatgttgcccaggctggtcttaaactgggttcaaatgatcctttcccctcagtttttggagtagctgagattataggcacttgagaccttgtttacatatttaaattgtttacatatttaaataaaccctgcaagggagtgaaaaataaacaagccacagagaggagtgagggaccaaagagaagaggatattcaatgacaggtacttgagaagctatcaaaaccaggagatgttacacatcagctgtaaatcaccatgagcatttggaacactaagatcctcccgacagggctgtgggagccttcttgatacaggcacagtggagaagaagccttgctatcgttcattaagctctaagatatacgtgtgttatgctatgacccagatagttgaccttcaggtgtctacctgacagaagtgtgtaggcttgtggcttgaacactgagagttatatataagagcatctatggcagagctgtttatgatagcccccaagctctagaaaactcaacatctatcaggagtagagtgaagacctaggctgacattccacatgcaatgagatggaaaagaatgaactgcaccccaatggaacaccaactgctgtgttctgtgaaggaagccagacacacaccaaaacattctgtgtgattctgtatgtatgtatgtacaggggcttaccatgaagcaaagcaaaagtgtttactagtatgtgttaaacacagcagtgataaaaaccacaaaggaaaatccaaggcagttgccacaatagctagtgtggtgattatccaggcaccagcagagcctgaggattttgggaggggtgggatgggtgtttgcccggacgagaaaaggaaagtgttattctgttactttttggtggataatagggagtgcttgctaataaatacttgatctatatctttacattgcacacatttctgcaaggggtcatgacttgcacttagaaacaaggtaatgggccaaagaaacctgaccacactgagtgctgacaagaacctgatcctaaatatgttcctgggatttatcataggaactgcagtccctgtttgtcacctaaataacgccagtgccaaagccatacgatgtcaaaatgaggaaggggaaagagttcttcctgtctgattccccttcaacttttgtggctctccagttcttggagatctgaagagttttatagggttccaccagtacaagtcagctttgatttaggattgtgacttatggggagatcttggaaaacagacagctgagaaggggctaagctttataaatttgcggagctgggtcaggactgctcttgtttctgcctagtacaaatgaaagaacatcagaagcaacattgtcaagtaacattctttgaaatatgcactcaggagagtcctcagagatattttcaagaattcgttccagttgctatggccaaaatgcaagatgggttttcttcgtttgtggcaacactcttggctgctcgtgtgctagcgctgaatctccaggcttctgcaaccctggatgactataaactgtcattgacgggatgaccattgtgatgagaaattttacaagaaagattagagttcattaggctctctttctggaaataagcaccaatgtgctattggaggctggagtcagcttgccttggcttgttcaagaatattctggacatctaagctgctacaataaaactcaaaacccaatacacatgtatcttgaaattgataatggcagattggttcaattaaaacacaattggtcatcacactccttcatagactttgtgaatgcctggtatcttagctagggttcgttcttcctgctgtgatgaaacactatgaccaaaagcaatttagggaggaaaggtttatttcacttactcatccacattgtagtctatcattgaaggaagttaggacaagaactcaaacagggcaggatcctggaggctgtagctgatgcagaggccatggaagagtgctgcttactggcttgctcagcctgatttcttacagaacccagaaccaccaccccaggggtggaaccacacatgatgggccctacaggcttgctggcagcctgatcttatgaaggaattttcttgattgaggctcccccctctcagataacattagcttgtatcaagttgctgtaaaccagccagcacatctggcacttgcttagtagttcaggtatgcctcaaacttgtggcaatctgtctgctctagcttctcgaatgtgggacctataggcttgaaaccaccatgcccatcctcagaataaagtttaggaatagcttcaatataatgcacatttattaagcacctaccatgtgggctttaatatatcagtgtgatggtttgcatgagaaatgtctcccataggctcaagcatttgcttgcttgggctccagttgatggcactgcttgggagggttatgaggaggcggagcctagccggagaaaatctgttactgggggcaggcgttggagcatataactcatctcctttcccattccctttcttatggaggttgtggttaaaggcatgacctctcacctcctgcttctgctgctgtgcctccctgccatgatggaatcataaagcaaaataaaccctgacctccttaagttgtccttggtcgtggcattttgtcatcccaccagtaaagtgattaatatgaacattattataagaaatcatggctccataagtataacatgtaaataaaaatgtacaggcacacacacacacacacacacacacacacacacacaccattgaccacaagtttaatttttcagtataacatactctactcattattacttacaataatggctgtgtaagtggctattattttccttctgattaaaaggtcatggaggtcaaggtcatgcatgcccaaggtcacacaactaagtgtggaagagcaaagtcatgttttaccccatgcctcccaagttatgacagctatttgggcgtgcacatctcttattaatttctgtgcttgctttgacagacttgggttctttatatataaatatccccctccccaacagaaaacacagctaaacctgctgtaccatgacagatccagagagtgagttctgtgaatggagcaagcaagggcctacctcctggtatgttgaaatactcggaaaggggaaagtcggggacagaggaaggtgggcggattctgcaggcacccaggtggggcgagccaaactcctaccttttgattgatcttcatggtctcttccgtgtggtagaggaggagcctctccccggaagatgtcaggttcacgtacacctgcaggcaagggtactgagagagcttccaacagtcgggcccacagctgaaggaacagttaaacgtttctgtgattgacacattcagcagggcacactgggcttcttctgtccacacgctgcagagaaggggcaagaatgagcacaggacaggaagctgctgggcatgaggggttggctgcacaacacagttacttggttgctgaactgcccggggcctcccccaaaatctataggtctgtgcgaagtttatgactttgagcatacaagctttcggcatgccatgacaacagactttggcgcctgagagccttcttggtgacatctactatagaacattcactgatattttaagaggctattgtctccttattcaattcaccggtaagcataatgcatgctttagttttagctttgatttcatgagactgagtctcactatgtgggcaagaacagcctcagaattgctctgtagcctgggctagcatcaaagtggtaattctgttgcctcagcctcctgcgggatggaatgaccactgtgcaccatccaccttgataacccccactctctgcatttctgcaaggcatggcttcttgctcagtccctttaccccaaactccaccccagcctgcgtagaaaagtctttgttaagagaggggctggggaaaggtggcaaaaaggcagagaggctccaggacttgacaagatagagggagagagcaataaggtcattctaacagaggaagtaagatagcggcagccctttgaagatgtcaagagcaatggctaattatatcctttctccccaactggtgatttacataaattatttcctttcatcttctcagcaaccctgtatgttggttattaatccctttgagaggtgagtgagttgagggtcaccgaaatcaggtgacatagtagtcaagaacacacagttggtaagtgatggacacagaggctttatccagtctaatagttctctgaggtcaggaaaccagcagaaggtaaagccttctttctgtgcagacaacagggtcaatcaggctgccctgagtcgagtcaaccagagagattccagctaacaaattgctcgaattctattttacaataactttcattttgtgatcaggttgagcatttgtaattagggagcaacacactagcaatcgacgctttgcctctgagtataagctatactgcagtgagcagaaaacacgtgttcacaaggagtagcaaccctgcccttttactggacatgcatggatagctcctgtactttaagtgtgtgccagactcagggtgttggacttagtcatgtctgctgaagcagactgaattttgtggaacctggatggttagaagttgttttgacaatcaggcagtgggggtggatgtcttagatcattctaagcaggttcgagaatctgaaagaggttttggactcggcaaacccttggggcccaaggcactggcgctttcattgtgggagagagtacagctgaaggccattagagacagagaggaccagccaggatgtgagagaggagcaaattgctacattttagctcgacttagcctctaaaatgaaagcattaatttagctgtagaaacaagtgccacaaagtggtttgctttttttcttggatcgaaacctcccactttcatatgaaagggacttatttctccaagcccaactatcggcagacccatggagctatatagagcttcagaattcagtgtctggacagcagcgggggtgggggggtgggggggtgggaggggcattgtgaggacatttcagatcacttatgcagaggagatgctcttaggattatcacctagtacctctctctggcccgacttagtaaaccctgggtaaacattgaaatgaaaggattcaaaagtctgttactttaagaggttgctatcagtctttctcaggcttcacaacacattagaatcacttagagagtttcagaatactgagtactggatctggcttcaaactgacgaattccaacttcttttgcttgggcattcgagagcttccaaggaagctgggagatggagaagtggggtggttagaaaagcagtggcaggcaagaaccgggacgctcgagttcctgggatgtggctttgaaatctcaattgccatgtgtttgtgctgtgtcccacagagaggtgtgacgttgtgtgtgtgtgtgtgtgtgtgtgcacttgagtgcataggcgcatttgcatagatgtgtgcatgttaggtttgtgtacatgtgtgtgtatgtgtgtgcaggtacactgttatgcattcatatgcctgttcatgtgtgtgcaggaaggagcatgtgtatgggtatgtgtacatgctcatgctagtatgtttctctatgtttttgttgaggccagaagatgacctcagatgtcatctacattacgttttatgagacagggtctctccatgacctggggctccacagttaggctagacttgctggacagtgtgctctagagactgtctgtctccatatctccagtgccgacactacaagtgtatgccaccatgtctgggcttatgtgggatgtaggtttggaactcaggttctcatgactgtacagcaagctagttatggaaagccatttcccaagcccctgtgtcacatcccttaggcaccagtgtccctgcactgatgatctagtctcactttatggaataatagagagaaaggaacaagcagtctcagaaaattgtccaggtcctaacagacagtacacatagcctaagttgattattattgttgttattattatcagataacattagaaaccaccgtgtaccaggtgtccctgaaagttcataggaaaggtgaagaagatgactataggttgaatgggcagtgggagagcagagaaggagggggcagtgggctccccgggtccatggcattacctctgcatgtaggagcgcagcagtgtgattcccagcaggaagtacatcatgatggagcacaccatcatggccaggccgagcaggatggcccggtcctccccagccttcagagctgtcacagttttccttttgtccaggaggtcatggtccctgattttctggtagatatttctgaaattgacaatacagtcttacatgagactcacagttatcctgcatgtctcttgaggggtagctattttccgtgccttactagggtgagggccccttaggagtgctccaaacatactcgagtaaagttgaatcttactaaaatccctggctccaaacacatcacacacacacacacacacacacacacacacacacacacacactatatatatatatatatatatatatatatatatatatatatatatgcacacatatatatatgcacagaaaaagagagaagacatatatatgtgcatcatccctgagcagaaatgatctctaattctgtattttggggattcatgtctaactataatgtaattttcctctgtacatttctaagaaagacaccaatcccctcaacccccaaattgccttggtttgttgattttatattaatgaagttgatcattgctgatatatactttctgaatgtactcatgtttgttttgttttgtgtgtgtgtgtgtgtgtgtgtgtagatactactgctttctgtttattttcactgccagaggcctggaatgacactgtgccttattttccagcttaagcctgaggcctttggactagctggccactctgcttttgcctttcccagactggcaaccacctgccctcttcgtttcatgattcatttttgagatttctttgtaaattgcaggatttacatcaaagctctttaaacttgaccctgtgtgaacttgaagaacaaaccggtgcccattagtggtgaaaggcagtaggcgggcaaacttgtgaagcagggaaaacaggctaacactgagtggcttcaaaaacccaccggaaaataataacctgttgttacttggctaatatcatttataaacgtgcatttaactctgacggctgccaccgagctcttcattctgcagatggaagccagcgaagatgattggtgctgttctggactattaggctgccacacagcaccaagtatgcctgcctaccataaaatagactgggtgctatcagatgccatcagaacaagaaacataaaatgattcaaccgagtcacctcaaacgtatttgaaaaaaggaatgttctttgtacactctagaatggggaagaaggggggtggggtgggggtgagaaatggtttctatgtagtttatgggcgtttaggaaatcagaatattacaaggcaaaatgaaagttttgagtgggtgggacatagctatggaatctaccaatcaatggctgtcaaattaatggctaagtagaggaactttaaataccatttgaaagaatgagatccctattaggaggttaggtccacacatgtattatgagggctgtaactgcttgtgttggggacacagtccctgttaaataagaagaaagacatgaaaatgagtgtcagctgagggtggtgagttctctggtggatcaactcgtagtgtcttggcaatttccccagcttgagggaccaggatagggagttagtgtaagctaggaaaggcttcctggaagaataacatttgaacagagccttcaaggttgattgcagttaagcaaatgggacatagagttagtgatattcggatgcagggaccacagaagcaagggtgtaggggcttggagttgcacagtgagtaccaggaaggactatgcttgtggtaccgagagggcatacaccacaaaaaacaggatagccagatgagaaaattggtgtcatgaaggctttgaaagtcattctagagagtagccttcctcctgtaattaaaggaaagttgtcagcagtgatgcgaccagaattgagattcagagtcatcactgtgcctgcagtgtggagattagaaacaggaaacatcttaaatcagaggaggagggagggagggagagagggagggaggtagagggaggggagggaaggaggaggatatgggagatggtttctgtaatgttggcaaaggatgctaagggctgcatcctggctgaagacagtatatagagagatgtccagggaatgaagccccgggatgcagtggttgatggaacgtagaacaggaggaggcagtcagggaagcaggcagcagagctctgtgctgcagtgcagctgcgtgcggtgggagagtgtgaagagagggaaggcccaactttcttttgtccagttatttttggagaatagaagttattactgaatctagaggacaacagaagggagctggtgagacggctcaggggctgagtttgctgctacctgagcctgataacctgaggtacttttccctgggacccacatggtaggtcataagtgactcatgaaagttatcctttgacctccacattgagggtatttgagggtatgtgtgcaacatatatacatacattcatacatacatacatacatacatacatacatacatacatacataaagttagaaattcttgggagggattaagagatggcccaatggctaagagcaatgtctgctcttacaaaggacccagatccagttcccaacatccacatgacagctcacaactatctgtaactccacttctagagaatccaatgacttctgcagacagcaagcatgaaccatgatgcacagatatgcatgcagtcaaaatacccatacacatgaaataaaaataagtaaatctaaaatatgaagctttgtaaacagaagatttctagtttttcactaaatctttgttttgccccaacaatagtcagtatacttaaggtttcaagcccaatgtctgcatactttttaaaaatttcctattaagggtcagcttataattcacaagcaaattagctatgaaatatgcatatgtgtactacagagcaattgtgattaaaactgcatggtactggtacagcgacagacaggtagatcaatggaatagaattgaagactgagaaatgaacccacacacctatggtcacttgatctttgaaagggagctaaaaccatccagtgggaaaaagacagcattttcaacaaatggtgctggcacaactggcggttatcttgtccaagaattctaattgatccatttttatctccttgtacaaagctcaagtctaagtggatcaaagacctccacataaaaccagagacactgaaatttatagaggagaaagtgggggaaagcctcaaatatatgggcacaggggaaaaattcctgaatagaacagcaatggcttatgctgtaagatcaagaattgtcaaatgggacctcataaaaatgcaaagcttctgtaaggcaaaagacaccgtcaataagacacaaaggccaccaacagactgggaaaggatctttaccaatcctaaacctgataggggactaatattcaatatatacaaagagctcaagaagctggattccagaaattcaaataaccccattaaaaatggggtgcagagctaaacaaagaattctcaactgaggaataccgaagggctgagaagcacctgaaaaatgttcaacatccttaatcatcagggaaatgcaaatcaaaacaaccctgagattctacctcacaccagtcagaatggctaagatcaaaaattcatgtgacagcagatgctggcaaggatgtggagaaagaggaacactcctcaattgttggtgggatcgcaaacttgcacaaccactctggaaatcagtctggaggttcctcagaaaactggacatagtactaccggaagatcctgcaatacctctcctgggcatatacccagaagatgttccaactagtaataaggacacatgctccactatgttcatagcagccttatttataatagcaagaagctggaaagaacccagatgtcccttaacagaggaatggatacagaaaatgtacatttacacaatgaagtactactcagctattaaacacaatgaatttatgaaattcttgggcaaatggacggatctggaggatatcatcctgaatgaggtaactcaatcacaaaagaagtcacttgatatgcactcactgataagtggatattaacccagaaacttagaatacctaagatacaatttacaaaacacaagaaaatcaagaagaaggaagaccaacatgtggatacttcattcctccttagaatagggaacaaaatacccatggaaggagttacaaagtttggagctaagacaaaaggatagactctccagagactaccacacctggggatccatcccataatcagccaccaaacccagacactattgcacatgccagcaagattttgctgaaaggaccatgatatagctgtcttctgtgaaacgacgccagtgcctggcaaatacagaagttgatgctcatagtcatctattggatggaacacagggcccccaatggaggagctagagaaagtacccaaggagctaaaggggtctgcaaccctgtaggtggaacaacaataaccagtaaccccaaagctcatgtctctagctgcatatgtagcagaagatggtctagtcagccatcattgggaagagtggctccttggtcttgcaaactttatatgcccaagtactgaggaatgccagggtcaaatagtgggagtgggtgggtaggagagcagggcatggggggagggtataggggacttttgggatagcatttgaagtgtaaatgaagaaaatatcgaataaaaaattgaaaaaatgcattattttactaagaaaaataaaagaaatatgcatatgtacaagtgaatatactgagcaaaagtgcaaggaagacgtccttggtgttggtgatttaaatttagattctttgggtgtttgttatacggtgagaaaagtgtttaggagcaggcatggtggagtccatgtatgaacttctttgtttatatgtccatattttgtttttgagtctgttagttcatttgtgtgtatgtgcacatgtgtgaatgccagaggacaaatttggttgttgtttctcaggtgcaatccaccttgttgtttgagacaagatttctcattggcctggaatttaacaagtcgatcaggttagccagcagtgagccccatttgattatttggtgttcaaccaacagggctttgtctatgggccttattagctgacatttacaagtcttcataagatagatcactgattagtcaggtttctctagagtcacagaacttatggaatgtctctatatattaaaggaatttattgtgatgacttacagtatgtagtccaaccaacctaacattaggcagctgtggatgggaagtccaagaatctaatagttgctcagtcccacaaagctagttgtttgtttgagttggtcttctgtagaagtatgttccaacagatgtgcttgcagacaagtgcaaacggttgaagaagagtgagccttccttcttccaatgttcttatataggcctccagcagaaggtgtagcccagattaaggtgtgtagcaccacacctggatctgggatttgctttgtcccaggcttactttgaactcagagatctccttgcctcagtctcctgcgattcagtgcttgtactgccttgcctgggcctaagcttttcatggccactatacctcaagatctccatgtcaagatccaggtcagaaacttgtgtcttccagcctcaagatctggatcacaggtgtgccctccagttcttgattgtagttcattccagagataatcaagttgacaacgaggaatagccaccacgatcataatctgctgaccctggagatacatcatgtggatgacacagtcttcctgagcaacaggaagatatcactacccaacctggtgatcatgctgactggagtggagaagggaagcgggccagtccctgaggactgattgattacctgaggatcagcacccaaagccagttgaccgaaggttcagttcacagtgtgaatagaacctacctacttcctgtactaacttacagacttcataaagagttgttttaagcagaattattttaaatacagtaagtggatgtgaatatatttttctcccttatctgttaatggcacattttaatatgtttcattatgaagtatgttgtaatgaagatgttcttctcagcagtacattaaggttggtttgatgttttaaagaagactggacttcttagtcacatcataaaaatattctaataaacatattcatgtgtatgtgttctaagagatgaaatagattgttctaagagatgtaataacaatttcacatttttatggtatctgtttagtttatactgatttattttcaaattcttttgggggagctgtcttagttaggattactattactgtgataaaatactatgagcaaagcatgttgggaggaaagggtttatttaggttacatgtccacgatatagtccatcactgaaggaagccaggccaggaactcaagcagggcaggagcttggaggcaggagctgatgcagaggccatgaagaaatgctgcttattggcctgttcctcatagcttgctcagcctgctttcttatacaacccaggaccactagcccagggatggcctcacccattatggactgggtcccctctcatcaatcactaaggaagaaaatgcccaacagctggatgctatggagacctttccttaattgagactccttccttttagataactctagcttgtgtcgagttgaactaaggccagtccaaggatggtgctgttttactggcattttggccttgcttgaattttctctgcagtttcatgccacaactcttatcaccaccacagcctcatcagttaaccaatgttcacttcttttcttattcagaaagcttagaggaattgatttggggtgggaattttattttaaattacatgtatacatgtatacgtgtatgtgtgtgtgcacatatatgtgtacataaataaaggtaccaaaagaggcaaggcacatgatcctctgtgagtttgagttataggcagttgtgagctacctgattcagatgctgggaactgaacatgggtcttctgtcagagcagtatgtaccctgagcaatctctacagtcctggagaggaatttattgtagcccattgaagactcagcagtttatttcgatggcttttcatttgtcccatggaaacattaaataagtgctaaggttgtctgttctggtcctgtttctgcaacaggaaggctctgggagagaacagcaggatcctctgcaagggaagccgtttgttgaggaggagaaattgacaaaatatgcagttgagcctgctgatcttgaaagctagagtctgggagcagaactggggacagaaagagcaggaaacactgaggagacctcagatagtgactggaacatagagaaggatggcagaaatgaggagggacaatgactacaaagtttgagatacaagagaccagaatggacgccctaatgaaagatggacaggaccatattgattcttgccagccgagttaatgttgatggtgaaagaacaatgtagggttacaatgactgtgttaaattttgattcacattaaaatttaatatattcaccaaaatggttgatcacagaaaataggttctgtgtcaaggtggcttcgggcaaattggccattgttgttctggagcccctgacatggatactcagagaaccagtggcagatacacagcctggggttgtgacgttgagtgcagatgtgatttgaaagcctgctgttgatgcaggtgggaatggcataggcaccagtgacagactgaaccaaggaatggaggggtgggtgactgactgagaagtggaagaggctcgaggagatggaggaaaaggtggctgagtgagtgcagctggggtccggaaggggaaagggcaggtcttggttggtgagctatgcataggccagaagaaaagaaatctgctcttgaagttcaagagggcgttaaagggaatgaagcaagatgaacaattagatttgtatgttagaaacatcatgaatgttcgtgagtctggttgttaaatatgctttcagaagattgccattatgttgaccacagtattcagctttagtgcagtagtgaaagaaatgataacaaaaacaacaacaacaacaacaacaaaaacctaaaggaaaatgtgtgtgtgtgtgtgtgtgtgtgtgtgtgtgtgtgtgtgtgtgtatagagtacaaagaattcatgggccaaaatgaaatcagacaaaaaaaaactttgaaatgaatgatatggaagacaaagtatccagcgggcgtggctaaaacaacaggtaagagtgtacatttttcttgtagacagaataaatttttgggtcaaaagttttgtgggtgggttggtgtccctatctttccattggggttcctgcctggctacaggaggtagcctctttaggttccatatctccacagttaaggtcacccccattgattcttgggtgtctcccttatttcaggtctctgtctagtcttggagatgcaccccagtacagggaccagggatggagcagagactgagggaatggctagctagtaactggcctaacttgagatacatccaatggattagcaccaacccctgacactattaatgatactctgttatcttacagacaggagcgtagcatggatgtcctctgagaggctccacctgcagctgactcagacagatgcagacacctacatccgaataatggatggagcttggggacccttatagaagaataggaggaagaattgtgggccctgaaggggataggagctccacaagaagaccaacagagtcaactaacctggacccttggggctctcaagtctgaaccaccaaccaaagaacatacacgggctggacctgggcctctctgtaaatatgtagcagatgtgcagcttggccttcatgtgggtcctgaacaactggagcaggggctctcccaaaagctgttacctgtctgtgggatatgttcttccagctgggctcccttgtctggcctcagtggagaagatgcacctaggctcacagacttgctctaccagggtggggggatacagagtggggtcccacctgctcagaggagaaggaaagaggggatggggagaagaggggatgggggaagaattgtgggagagggttactgggaggcaaacaggggagcacagaatgtaaagtgaataaaaaaaagaacaaaaatgtacatttttcaatgcttgtattagagaaaaagaaagccctaaaattagttcactcagcatctaaggaaattttgagataagtggtgcattcaaaaagaagaagtaaggaaagaaattatcataagcactactagaggaaatggatggtaactgtattaatgtgttctgaaagactaaagaaatggatacatctttgacaagattgataaagcaatcatacaaatccaaaataaatatgatgaattaaaacaccataattgtgggcacagcatgctttagaaaggagacacttagttcatattgttgttccacctatagggttgcagaccccttcagctccttgggtgctttctctagcttctccagtgggggccctgtgttccatcttatagatgactgtgagcatccacttctgtatttgccatgcactgacatagcctcattcgagacagctatatcagggtcccttcagcaaaattctgctggcatatgcaatagtgtctgggtttggtggttgattatgggatggatccccaggtggggtagtctctggatagtccatccttttgtctttgctccaaactttgtctctgtaactcctttcatgggtattttgttccctattctaaggagaaatgaagtatccacccattggtcttccttcttcttgattttcttgtgttttgcaaattgtatcttgggtgttctatgtttctgggttaatatccacttatcagtaagtgcatatctaatgacttcttttgttattgggttaccagtacccccagagctcctgtctctagctgtgtatgtagcagaagatggcctaatcggccatcactgggaagagaggcccctttgtattgcaaattttatatgccccagtacaggtaaatgccagggccaagaagcaggagtgggtgggtaggggaacagggtggggggagggtatagggaactttctggatttgaaatgtatataaaggaaatatctaattaaaaaaataacttaaaaaaaagaaaggagacaagtcccttccgctcgactcgagccccgggcttccttgccagcagagtcttgcccaacacccgcaagggcccacacaggactccccacgggaccctaagacctccggtgagtggaacacagcgcctgccccaatccaatcgcgcagaacttgagactgcggtacatagggaagcaggctacccgggcctgatctggggcacaagtcccttccgctcgactcgagccccgggcttccatgccagcagagtcttgcccaacacccgcaagggcccacacgggactccccacgggatcctaagacctctggtgagtggaacacagcgcctgccccaatccaatcgcgcagaacttgagactgcagtacatagggaagcaggctacccgggcctgatctggggcacaagtcccttccgctcgactcgagactcgagccccgggctaccttgccagcagagtcttgcccaacacccgcaagggcccacacgggactccccacgggaccctgagacctctggtgagtggaacacagcgcctgccccaatccaatcgcgcggaacttgagactgcagtacatagggaagcaggctacccgggcttgatctggggcacaaaccccttccactccactcgagccccgggctaccttgccagctgagtcgcctgacacccgcaaaagcccacacaggattccacacgtgatcctaagacctctagtgagtggaacacaacttctgccaggagtctggttcaaacaccagatatctgggtacctgccttgcaagaagagagcttgcctgcagagaatactctgcccactgaaactaaggagagtgctaccctccaggtctgcttatagaggctaacagagtcacctgaagaacaagctcttaacagtgacaactaaaacagctagcttcagagattaccagatggcgaaaggcaaacgtaagaatcctactaacagaaatcaagaccactcaccatcatcagaacgcagcactcccaccccacctagtcctgggcaccccaacacaaccgaaaatctagacccagatttaaaaacatttctcatgatgatgatggaggacatcaagaaggactttcataagtcacttaaagaattacaggagagcactgctaaagagttacaggcccttaaagaaaagcaggaaaacacagccaaacaggtagaaatcattaaagaaaaacaggaaaacacatccaaacaggtgatggaaatgaacaaaaccatactagaactaaaaggggaagtagacacaataaagaaaacccaaagcgaggcaacgctggagatagaaaccctaggaaagagatctggaaccatagatgcgagcatcagcaacagaatacaagaaatggaagagagaatctcaggtgcagaagattccatagagaacatcgacacaacagtcaaagaaaatacaaaatgcaaaaggatcctaactcaaaacatccaggtaatccaggacacaatgagaagaccaaacctacggataataggaattgatgagaatgaagattttcaacttaaagggccagctaatatcttcaacaaaataatagaagaaaacttcccaaacataaaaaaagagatgcccatgatcatacaagaagcctacagaactccaaatagactggaccagaaaagaaattcctcccgacacataataatcagaacaacaaatgcactaaataaagatagaatattaaaagcagtaagggagaaaggtcaagtaacatataaaggaaggcctatcagaattacaccagacttttcaccagagactatgaaagccagaagagcctggacagatgttatacagacactaagagaacacaaatgccagcccaggctactatacccggccaaactctcaattaccatagatggagaaaccaaagtattctacgacaaaaacaaattcacacaatatctttccacgaatccagcccttcaaaggataataacagaaaagaagcaatacaaggacggaaatcacgccctagaacaactaagaaagtaatcattcaacaaaccaaaaagaagacagccacaagaacagaatgccaactctaacaacaaaaataaaaggaagcaacaattacttttccttaatatctcttaatatcaatggactcaattccccaataaaaagacatagactaacagactggctacacaaacaggacccaacattctgctgcttacaggaaacccatctcagggaaaaagacagacactacctcagagtgaaaggctggaaaacaattttccaagcaaatggactgaagaaacaagctggagtagccattttaatatcggataaaatcgacttccaacccaaagttatcaaaaaagacaaggagggacacttcatactcattaaaggtaaaatcctccaagaggaactctcaattctgaatatctacgcaccaaatgcaagggcagccacattcattagagacactttagtaaagctcaaagcacacattgcacctcacacaataatagtgggagacttcaacacaccactttcttcaaaggacagatcgtggaaacagaaactaaatagggacacagtgaaactaacagaagttatgaaacaaatggacctgacagatatctacagaacattttatcctaaaacaaaaggatataccttcttctcagcacctcacgggaccttctccaaaattgaccatataattggtcacaaaacaggcctcaatagatacaaaaatattgaaattgtcccatgtatcctatcagaccaccatggcctaagactgatcttcaataacaacataaataatggaaagccaacattcacgtggaaactgaataacactcttctcaatgataccttggtcaaggaaggaataaagaaagaaattaaagactttttagagtttaatgaaaatgaagccacaacgtacccaaacctatgggacacaatgaaagcatttctaagagggaaactcatagctctgagtgcctccaagaagaaacgggagacagcacatactagcagcttgacaacacatctaaaagccctagaaaaaaaggaagcaaattcacccaagaggagtagatggcaggaaataatcaaactcaggggtgaaatcaaccaagtggaaacaagaagaactattcaaagaattaaccaaacgaggagttggttctttgagaaaatcaacaagatagataaacccttagctagactcactaaagggcacagggacaaaatcctaattaacaaaatcagaaatgaaaagggagacataacaacagatcctgaagaaatccaaaacaccattagatccttctacaaaaggctatactcaacaaaactggaaaacctggatgaaatggacaaatttctggacagataccaggtaccaaagttgaatcaggatcaagttgaccatctaaacagtcccatatcacctaaagaaatagaagcagttattaatagtctcccaaccaaaaaaagcccaggaccagatgggtttagtgcagagttctatcagaccttcaaagaagatctaattccaattctgcataaactatttcacaaaatagaagtagaaggtactctacccaactcattttatgaagccactattactctgatacccaaaccacagaaagatccaacaaagatagagaacttcagaccaatttctcttatgaatattgatgcaaaaatcctcaataaaattctcgctaaccgaatccaagaacacattaaagcaatcatccatcctgaccaagtaggttttattccagggatgcagggatggtttaatatacgaaaatccatcaatgtaatccattatataagcaaactcaaagacaaaaaccacatgatcatctcgttagatgcagaaaaagcatttgacaagatccaacacccattcatgataaaagttttggaaagatcaggaattcaaggcccatacctaaacatgataaaagcaatctacagcaaaccaatagccaacatcaaagtaaatggagagaagctggaagcaatcccactaaaatcagggactagacaaggctgcccactttctccctaccttttcaacatagtacttgaagtattagccagagcaattcgacaacaaaaggagatcaaggggatacaaattggaaaagaggaagtcaaaatatcactttttgcagatgatatgatagtatatataagtgaccctaaaaattctaccagagaactcctaaacctgataaacagcttcggtgaagtagctggatataaaataaactcaaacaagtcaatggcctttctctatacaaagaataaacaggctgagaaagaaattagggaaacaacacccttctcaatagtcacaaataatataaaatatcttggcgtgactctaactaaggaagtgaaagatctgtatgataaaaacttcaaatctctgaagaaagaaattaaagaagatctcagaagatggaaagatctcccatgctcatggattggcaggatcaacattgtaaaaatggctatcttgccaaaagcaatctacagattcaatgcaatccccatcaaaattccaactcaattcttcaacgaattggaaggagcaatttgcaaatttgtctggaataacaaaaaacctaggatagcaaaaagtcttctcaaggataaaagaacttctggcggaatcaccatgccagacctaaagctttactacagagcaattgtgataaaaactgcatggtactggtatagagacagacaagtagaccaatggaatagaattgaagacccagaaatgaacccacacacctatggttacttgatcttcgacaagggagctaaaaccatccagtggaagaaagacagcattttcaacaattggtgctggcacaactggttgttatcgtgtagaagaatgcgaatcgatccatacttatctccttgtactaaggtcaaatctaagtggatcaaggaacttcacataaaaccagagacactgaaacttatagaggagaaagtggggaaaagccttgaagatatgggcacaggggaaaaattcctgaacagaacagcaatggcttgtgctgtaagatcgagaattgacaaatgggacctaatgaaactccaaagtttctgcaaggcaaaagacaccatcaataagacaaaaagaccaccaacagattgggaaaggatctttacctatcctaaatcagataggggactaatatccaacatatataaagaactcaagaaggtggacttcagaaaatcaaataaccccattaaaaaatggggctcagaactgaacaaagaattctcacctgaggactaccgaatggcagagaagcacttgaaaaaatgttcaacatccttaatcatcagggaaatgcaaatcaaaacaaccctgagattccacctcacaccagtcagaatggctaagatcaaaaattcaggtgacagcagatgctggcgtggatgtggagaaagaggaacactcctccattgttggtgggagtgcaggcttgtacaaccactctggaaatcagtctggcggttcctcagaaaactggacatagtactaccggaggatccagcaatacctctcctgggcatatatccagaagatgccccaacaggtaagaaggacacatgctccactatgttcatagcagccttatttataatagccagaagctggaaagaacctagatgcccctcaacagaggaatggatacagaaaatgtggtacatctacacaatggagtactactcagctattaaaaagaatgaatttatgaagttcctagccaaatggatggacctggagggcatcatcatgagtgagaaaacacattcacaaagaaactcacacaatatgtattcactgataagtggatattagccccaaacctaggatacccaagatataagatataatttgttaaacacatgaaactcaagaagaatgaagactgaagtgtggacactatgcccctccttagatttgggaacaaaacacccatggaaggagttacagagccaaagtttggagctgagatgaaaggatggaccatgtagagactgccatatccagggatccaccccataatcagcatccaaacgctgacaccattgcatacactagcaagattttattgaaaggacccagatgtagctgtctcttgtgagactatgccggggcctagcaaacacagaagtggatgctcacagtcagctaatggatgaatcatagggctcccaatggaggagctagagaaagtagccaaggagctaaagggatctgcaaccctataggtagaacaacattatgaactaaccagtaccccggagctcttgactctagctgcatatatatcaaaagatggcctagtcggccatcactggaaagagaggcccattggacttgcaaactttatatgccccagtacaggggaacaccagggccaaaaagggggagtgggtgggcaggggagtgggggtgggtggatatgggggacttttggtatagcattggaaatgtaaatgagttaaatacctaataaataatggaaaaaaaaaaagaatgaaagcagaaaaaaaaaaaaacaaaaaaaaaaaaaaaaaaagaaaggagacacttagaacaactttgcagtaatacatttagaaacttggagatactaaacttgctgagagatagaacaatgctttacaaatatgtaacttactgaagccaatactcaaaaaatagccagaagacctaaataattctaaactattaaaatttcaaatagctaaaagttttaaataattaaaagtattttggtcctagaaatacaaagctcttacaacttacagctgatcccaagctatatggtacagataattccagagtacagagaaagaatgccagccagcctgcttatgaggttggcaagttctaagaccaacgccagtcagagccacatgtgatggaaaactacaggcttatctcattcctaaccacaaatataaaacctaaaagaatttagttcaccaaacctaaatgtataaaaagatagagtctaccatgataaagctactactattatgttttagaaatataacattggtcactattagatttttattaatatgtgaaaaaacattataagctgataatgtgataataatataacctagaaatatattaacatccattcatggtaagagctattgtcaaattagaagtaggaacatcctcaatgcaataaaaggccgagaaaaactacctgtgatataattgattcaattatctaatggtaaaatattgaaaaaccccacttaacaaatcagactgaaaatgtccactgtcaccagctttattttaatttactgaaacataaactagaataattgggcaagaataacaaagaaatattatatttataaatagagaagaaacaagagcttattatttactagtgagatagctataaagaaagtacaaaagaattctcagataattcattgttaaaattgagcagaagtctggggagagggtccagagggtaaaggtgtttggaattcaagatcgaatccatgtgggtgaagagcttggccctacaagttgtcctctgactttactgtggcacactcagccccattgcccccctcccatacacacacacacacacacacacacacacacacacacacacacacacgcaaagcaagcaggcaagcaagcaaggaagaaggagaaaaggaagaaaggagcttgcaagaaaggaaaggaggaaggaagaaaggaagaaaggaaggaaggaaggaagggaaggaagaaaggaaggaaggaaggaaggaaggaaggaaggaaggaaggaaggaaggaaggcaggctagctcacagtgatgtcaaaccaaaactgataaagaatacacagtagtctttttgtctgccagaaaacagtgtatgtggacattaaagaagcacactgagttcactgagggagacaatgcactgttcttggagttaggagattgtaggtgaaagaaacagatctatttctccttgctgagacaaaaataatttaagtgcacagggtctgactgcctctttgtttacctaaagtctgggaaaggattaataaaacaagggatatacctacttcttgtcctcctcctccttcctccatccttggtgggttgggaaggaggctcctccctcagtcgaggggtgacctgaccagccagccagattagattcttccacagtttcccacctctcctaatcctgttgcatctatacaatctctcactctattgaaacattttaataagacagcttgccagcccctgttttggcggttctctctatcccttgtgatgtatgctgcatgttttctttaatgagcttccttgtgttttcctcgttaatctgtcttttgtcccagaaccttttctggattatgattatttttaaagattgcttttctttccatcctcagaggccagtgcagagaatcctattcaatcagaaaaaggcttgttgacataaagttaggacttcctctgatacctaaatgggcttcacctttaagctgattagttaacagtgtttgctgttcctatgttaaaaaccccatcttttatatgtaattttctcatttccttttttttgtttgttttcttaatgtgggattttggatgttcacacaaaaccagtccatgcctgacaaaccagtaattcttgagagttagaagaacatataactatgttgctcatctgcatcaataaggatctctgacatgtaaattataactttaatttttgttttcaaggatgatttcagtaattatgggatttaaagtaataagtgcgtttgttgaacaggggcgtcaatgtgcacattcttagcctacacggctaacggaagcaagcagaaacaacctacgggtgcagagcaggcacgttctcacagcccacattcccagctgattgtgtttagtttgtctgccttcccttgaccacatcttcatctctacgcctggctgaacaagagcacctggaagcccagatagaatcaaagaaagtgagatttcagtccatctgtgagacggctaatcttcataatcaaatgaggggtatttagaatcaccacagaaacacaaacgtatccagaagtgttcaactgaggaaagaagtctctgcttgaacgtggggggggggggggcgcacttatcccaggctcaataaaacggagaaagaaggtgagcaccagtttttatctcttcggatttcctgacagcaggcacagaggtaggtgcaggcgcaggtgcagtgtgaccggctgcctcacgctctggtctctcaaaaaaaggcacctagcaaccaggaggcagcccttcccctcccattccccttcaacccccacccccacccccgccgcacgctccccctgggctgcatggcacttattttagccatgagttcccctccatgactttacctctgtgatagattgctttctcaaactataagccaaaataaatccttccttaagtttccttggtcaattgtttttaacaccaataagaaagtaatcaatacaccatcgttggtgtcggggtgagcattagtctttgttcaaatgctagttgccttctgggatacagcgtcccagttaaacaccacggaactgttttcccataaccaaggtaacatgagacgtacaaagcattggaaatacagaagttatttgtgtggatgcaataatcacttgcatgcaactttaaaacttgctcctcctcccccagcaatggtatgtcaaaacactttaaagtactaattgataaatataattcattatttaacagattttctactgtgagaagcgacccccaaatttctactataaatagctacttattatgacagtactgcttctggaatttttccaaggaattttatctgtgggcagttcacgttttaagaagaaaaacaagctccttgaacaatatttaataaacccccttatacattcccagtattattctcaattctgatttcggttatgttcttcctgatgtgtcatgcaagttgaagaatgctggtaaagtcaggagtgcttaaaacttagcactacttaagtaacagtacaagatcaatgaggaacaaagaggtgtagaggaagaaagcaaagaggaggcaggcaagcatagggaatagcatagcaacctgggactccacctggcttgggctctgcatatccatcttttaacaatgcatttggaaagctaagaccctcatcagcatgtaatatgcacgtgtagccatctctgaaaaaggcacctagcaaccaggaggcagccctttccccctgcacccgcccacccccagcccctgtgcatcaggctgcatgcacttattttaaacaatgatgtaagtttctaccttttatagccaccaaatagacagcttctagtcagtatattttcaacacattcatgcacaagggtagcagggatgatctgacctgagttggtttcggtgcatgataatgtcaagacaaaactggttcttcaacttttaaggagactcccctgtataccatcatatgattatgtgcgtgagtgtgcataggattaaagtcagatgcattatgggaagggcatacacggtataaaaatgattttatgatctaatatctatcaatcaaaagagagaaccacctcagtgtactctttggtaacaggcttctcttcactccgtaaaaggaggagagtgttagggcctttgaacactttgtcatctatgcagtctcttgcctacttgaaatgcacttatttctgacctgtgctgttgttttgcttctgaataaagttcctttgctactttgcaatgtgtatgagcctttatttcaattctatggctaagaagccaagaacatggaaacagtgggctgtttacagagttccaagcactggttacagaggggaacaaacacttaaaaactggtagagggacctggagctcagtgggcaaagtgcctgtcatgcaagcatgagggcttcagttcagatccccaatagccacatgaaacagcagaaaacagtgactcacatctgtgaacccagcactgggtatggagtggaaacaggcagaagactggctaaccagtctagccaaccttctaattccaggctcagtaagaggtcatacctcaaaaaccaaggtggagagagattgaagaagacactcaatatcaatcatacacttgtatgtgcaaccccccgcacacacacacaccggggtgttatataattttatgaacacatttactcactaaacccaaggagaagagaagtggctgggttgagctgcataacccattcagttttcattgtgtgactttgacctcttgtcttttctctccctccatttgttcccttccctaagccgttcttgcatgcacaccaagggatccgaaaacctgctgagcctccttgaaccctcttgaagttcagccttcctcttgccatatgcttggtgcctagacatgtgatgttcatcacttgagtcagagtgtattcagtatctaccgtgtaccgggcacagtgcaaggctctggaaattcactagacaacaaagtcacatctgactgggtaaagaggatgatgaggctgggagtggggttcaagttctgattgggtgtcttcaggcagagctggggttagagaaggaaaagattggtaggtgtatgagtgtgtgggggggcatttctgacaaggcacagtcttgcagagtctggtgctgtgagtgagcctgcaagagagatggaggccacaggccagagtgtctgaagcgccagtcctgaggtagatcccctcccaaaatttagaacatgatattcagtatctgtgatggttaatatccacaggatttgtaacaaccatggaactaagcctctggcatgtggtaaaggcattttcagtcatagaccaattgggtgtgggtattttctcagtcatggctgcctcttcccaaatgactcaggcttgtgttaaggtgacgtaagactagtgcacacaggagggaagactcactttgagtctggcagcagtgtctctgagcctgggctcctgggctggataaggagacagcaagtggagtacaaacattgtctttgcttgctgactacaggagcaatgtgaccagctgcctcccactcctgctgccatggcccccactgtgatggaccgtactctccaactgtgcaccaagtaagccctccctttcctaagttgtctcgggtgtctcatcacagtgacaaggagagcagccaacatcttgttccatcagtgttccataaagtctggcaggagcacccgggtccagggaattaccttttctcgtcctgtctgtaagatgaagaggtccggccactggtccatataaacatcttagaggatgttggtcctgcagctcctttcctcactgtggaagtcctggggaagtggcagaaagacctgcagaggacacactggggttagctggaactctgtgtcaacagtgacatctcagagggtcagctctctaggataatcccaggcttttaggccttgggggtgctgactctgcactggcagaaactccaccaaagcctggcctctcctgcagaaatgtgcattcctcctttaaaattaactaactaactaatttactttaagtcccaaccacagtttccccttgctcccctcctcctcctagtccttctccccatcctcaccacccccatcagctccttctccatttctctcagaaaagaggaagcctcccatgatatcaccagccttggcatatcaagttgcagtagactaggtgcaaattctcctgttgaggctggacaaggcagcccagttaggggaaagggtcccagaagcaggcatcagagtcaaagacagcccctgctcctatttttaagagtcctgtaagaagactaagctacacaaccaggaggtttcctggttggcagttcagtctctgtgagcccctttgggcccaggtgagttgattcagtaggttttcttgtggtgtccttgatccttctggctcctacagtccttcctcccgcacattcaaatggttttttgagctctgcctaatgtttggttgtgggtctctgcatctgtttccatcagttgctgggtgaagtgtctccgatgacagtttgcattccatttttataaggctttgtcctttactatctctgccctggccggctggggagcctgcctttcagaatcttgctttttctcactggtgtcagaatctcaatgcttcccttacaacacacaatcactttggattcaccttgagtatgatgcagttccccaaactttagttcagatttgggtaccaaaattttacttcctctttcatcttcaaaatttttccttactattcacagatgtgacatattaggagtaaaatatctttttttttatttttatttttttcttcatttgaggcaaggtctcagtttgtagctcaacctggcttcaaactaagaaatctcctgcctcagcattccaagtactagattacagggaaacattgtcccttaagtacgctgttgccagtgtgggctcagctcaccacagcagagcttgccagagatactgacagagatgtgagcagccatgtgtgtctagtggctctggggtctgggaaaggatatggcagcatgctgtgttctttggttggacatttgggaagagttcccttgtctctaaacacagcaccagaacagttattgttcagtattttctgctgtaattttctttctttaagaaaaaaggttactgtttctagttatttattattattatttattattattatttactttttatctatgtgtggagcatatacagatgcaggaaggtgcccagagacctgaagagggcatcagatctcctggagcaggagttacaggcagttctgagctgccctatgagggtgctgggaaccaaactcaggtcctctgccatctctccagccctctacttaataatttctagagagatagaaacccaaaatatcctaaagatgacagtacaacatgaaagctaaatgacacccagtgcattaataacaggaagggtgaaaagtgattccttcaatgtacatggttggtaagggctaagattaaaaatgactatgtctggaaacagggttagttactgtgtgctgtattttctatcccatgcctaatgttccatacacgctgtctactcatgaaacatgatgccatagccatatgttagggttatgccatgaaaaccacaagagtagggagtgacataatttcaagacaaccaatggcatttcctgcctacatccagagccctacccccactgctggttatatttaggaaaggtaaactgtacttcaagtttcagtttgccctaaattctcattgtctccgtagtgacccacaatcagttcaggacttctcagagctgagccagtgggtctgagtggggcccagaactctgaatcactaaggagcgccagggtgaggctgacactatagacaacactaagcagcaagagcttggaagaagaggctggctttttttctgtatgaccttgataaagtcacttgacttttctagagctgagtgctatcaataaatgtttccaactctccctggtatccatggagtttgagataaattatttaagatcgttctcagttccattattttgacatgcaggacattgaagaatgaatctaagaatatggttggtcaccataggctgggcttataggaacagacctggaaatggggttctcctgagtcccctgggtcggctccagagagcgaagcctcagaggtgagtcaccagtgcaaatgcagaggtctctcatggcctcctaagataatggagggatgtgactctccacctggatagattcccttcacagctgtaggaagagcagaaattgactctaggctgggtgtggtacacttgcaacctcagcagcggaggcaggaggatcagaagtgtagagccgtcccgctggaaggtatgaaatagaaagaggataaagtctgctcttaatccgggggtctccagatcagggctgtttggtgtaagctgaatgtgttacatcataataagattgccttgaccttttgcaaagttatttcagtgtggactgtagacttcttcagctcctctagtaagcccctcaaagtgttcgtagtgtaggagacaaaagaaagctgcccagttttagcataggtggatcgggaagctagtttgcactgccacattatccattatgggccagacttaatagacaccctgtagaagtcctaagtactttgaaataattcaaaatgaaggggctgcagcgatctgatgtcctcaagggactttctgactgggtgtcactgttcaggaagacaccttggctatgctgtttaaaagttgatgcagaaagaggaaatgaagcatgttgactctaattaactgtctgcagcccattggaaaaggcttcctggccacttaacgttattccaataagcagacttgaaattttctatccagtttctttcatgaagacaaaccgttatttaaaaccttctaagttcgccattaactaaagtgaaaggccatttctgcttttttaaagccatagtatacagatcctaaggaggttgggaatgattttcacgcttcaaggaaaccgtgtcaacagaagctgcaagattccctcccagacaggagatagtcctcctgaacccctatgttaaggaacgtagctctcctcactgaggcaggaacatttccattcaactgtcattcaggaagtgacccaggagcataagaaatctgtaaacatttgcagtttggaatcccatgcgaagcagctgtgctggactgtgggtcaggggagaatcatgtctactgccctgttgagtgacatggggacaggcatggggaccaccccatcgcagcttcagggctgcaggtgagtgtggattaaaaaccacagacccaagagacctgcttctgatcaggggatgatggctcagtcaggcaagtgcttgcaagctcgaagacctgaacatggttcctgctattcatatacaaaaccagtcatggtagtgtgtgtgtgtgtgtgtgtgtgtgtgtgtgtaatccaaaaactggagtgggagagagaggtgatccctgggacttgatggcctacttggcaagttatagataaataaataaataaataaataaataaataaataaataaataaaaccctgtgttaaagaacaaggtggatggttccagagggtgacacctacagctgatctgatctctggctttacatgcaagtgcacacacacacacacacatagatacacacacacacacacacatacacacacacacacacacacacacacacacacacacacacattcatctatacagaaagacatatttcccagtcttcaaagaaagcagggagtcagcaagagtggggccctttccttgtctcaggaattgactgaaggccttttccatgtccgagtccaccactttgtttctgcctccttgactcagctgccgccattccttctgcctcacttccctgctgggtagccacctcctagatccccatcctatggagcaatctctgatggccttgagcagcttccttgtccccactcccaggactaaatatggcacaatggtcttgtctgtacacactccactttccttgttaggtagggtgtcagcacctgcagttgcaggtctgtgtctgatgcgccaagtgcacagttggcaataaatggctctgctgctttgacagcctaagagagcaccagaaactatgagggttgccttggtttggcctcatgttctgacactgtgcatgtggcatgttctcaaattttcccttagcttaggctgtcttgcatcttctattttatctgcctgcctgtctgcctgcctgcctgcctgcctgcctgcctgtctgtttgtatgcctatctgtgtgtctgtctgtttattagcctatctatctatctatctatctatctatctatctatctatctatctatctatctatctatccatccatccatccatccatccatccatccatctatctatctatctatctatctatctgagacaaatgctagctttggattatctatgtactataggatgaccttgaacttctgatccttctgtctacctcctgagtgctggagtgacagctgtgtgccaccacagttggcctttgtgcctgcagatgaattcagccaagcactctaccaattcagctacatcccagacctgggcatcttctacacttcttctctaaccatcatgtctcccctctcctctcattgacttactcggaaagtttaggttgttggctgacttatcattcaataaggatcttttgcaaagggcagcatggcctaagaagacgatgagtgcgaacagcagatggtccaggtgtttgcgcgcctcttggcatcaacatctaccaactgtgtgactttgtacaagccaattaacagctccaagttttggtggaaaaatggaagggataatttctgccaccaggcttggaagacaagtcaacaatatatgcaagaggacctccagtacatcgcatgtgatatcaagaacattgcaagtatatcaagtatactggcatgtgataagcacatactaagcattactttcctttgttttgccaccctcactacatacacataaacttaaaaataaatggattggattttcttcacaaagaaaatccaattaagttgctttgtacctgcacagggagcaaaccaattctttcctgtcctatggggccagtgactgtcacaagaactattgagatggtaagatcaaactacttcttcattagcgctaagttctgacacttgtcctaagcaagaggattgggatggtaatgccaatgagtttggttgtacgctggagacgtctagggagaattattgaagaattatggtgctgcaggctggagagatggctcagcatttcagagcagttcctatccaggtaactctgatggggagccaatgggtgaaatcctgctacaacctcttgggttctgaatttacttaagtggaaagcattcgaggagcttctgctggagttgctccatgcagtggcttctcagtgctagcagctcgcagtgctgggccttgagggtacagctgcaagcgcaagtgagatatcgagctgagaaagagcagagaggccgtcgtttagaacgccagtagcctggagctctagtgtaggacactcctaatgcactctgctttattgagtgagcaagcaggagcggaggaaagtatttaacacataattacatgcttaatcttgcataaaattatcacactaatgacatcacggtggcgaagcaaaaggtcagtccaagcacaggcatttagggttgcatctaatgggtgaggctttatctttgcagacagcaaattataccttctctccgtaagggttgagttgttttggctccagggcgtttgaagggaaagccaaatgcatggtagtaattttagatcaagtgatttactttagaaaacattatttgttgggagtgatttttttaaatcctgttgtgctttttgcctccaaaatcaactatgtactttatttgagttcatttatttgagtgtctatttgccaaattttattaagaactattgtgtgcctcagtctactgcctgctgtggacagcgtaacatcagccttgccctaagcactgtgctcttcaggtggagtcagaagaacaagcaacctctgtcctggtcatctcttgcagacggtggagttgggaggaaaggaacgcttttgcctttgtcacacagggacagaatgaagcgactcccaaagctgctcaggctcattctcctggggttgctggaccttctcagtagtgcctcaaacagttccttgtcccgccacatcttactggacctctcagcttgtttaattttatgctatttattgatcacatcattgttcttaaaaatgacaacagaaacattttagaagcctgatagtggcagcacatgcctttaatcccagcactcaggagtcagtggtgggtggggctctgaatttgagaccaatttggcctacacggtgagttcaaggacagcctgagctatactcagaaacccagtcttgaaaaacaagttggggggggggggatatttgacgtagtggccaatatttccttggttctcccttgctatgtctcctgtctctctcatgggtttttccagccttttaatcagagtgtgtttcatttggagatctggaagactgtgtagtctcgatggtgtcttataccaggtctaagaacctttctcccacttggtgtctaaagactgagcaagtggtacatctgccacttagatggagagttaatgaggaagctgagagccaacggctccttgacaacaatcagacaagtggcaaagtattttccaagttttcactgaagatgatttttcaacatctgggagaccatgcaaggaaccttgtgcctgaagacaggtggtggtcacttatgatctggtctctgtgacacatagccaactattattcatagcactacatctaatttgtggttttgaaggatgccagcccaagttaaatagcagaaccctgcttttcttggcttataatggccctcagcagctttgggagcagctccattctgtccctgtatgactaacaccaaaatgtttcctttcctcccaactctaccatctccaagaaacgatcaggttgacctcagttcatttatttacctcagcatttagttcatcatccgacatgtggattgaagatgcaactgcatggcaggctctgggtctggtgatggagatgcaataatgaatatagtagacaccaccatccctcttacagaattctcagtccagaagaggggatgggctaagtcaggctgctctggatgactgtccttaagaggagagtgatgttcatattcatgaagagtgaagtatatctagtatcacatctacagtcccaaaatcaccagaaatggccatctcagggttcacttggaagaactctgaaatgagtttccagttgaagccccaggcccttgtatagtgattatattacctcaatatgctgttaaattccctgagcctcattttcctcatcaagaatatgggagtaataacagaaatcaggtcggatggccacagggatgatgggaaataatgcctacattcagtgggtactcagtaatttttttttttttttttgccacttggaggaaatggcagatttttttgttgttgttcaaactgaccacatcaagccattttgtgtgatttatacttttctttaaaaagttcttttcagaagtggaaaacacatttctacatgatcttaattaatccacgattccataattcatttcctaatgagcccttcaagtggataatcacaactggtgttcattttgattccttgcatgctacacatttaaaagcagcttaattgttaaacatgtcactctattgggcattacccagacacagctgctggaagaagaacctgctcatgactcatgtgagatgcctggatgggtacaaatgacgctgtcgtgctggaagtatcatctgttctctgagcctgtattaactagtgcaactatttcagctgagaatcgatggggcaagttccagtaagagctctttatagagaactggagatggccgtgacagacatgaagatcgaggcacttctatgtaactatgtaactaacacattcattgagttccaatagggactcttcataaagccctctttaccagagagaagatcgatattccagaaagcaacgttttccaggccacatagcacaaagcaacatgaaacagaattttactccagagcagttctcttccaaagccaaagccctctgtcaacctgcatgtctttgcaaaggaaaccatacacccaactttgtatcaaagaacgaaaagccgtttgatgactattgcagctacattcttattgattccctgagtactacaattttcatagaactttactcataaagccacccaggctttactcatgtccatctttatggccttaggtaaatgtgttagttttctgcctctgacttatatgaataacaataatgaaattttcctcatagagttttttgtgatgaatgagttaatctgttacgtccttggtgataggataaatgttatatgtaatacatgtatgcaggtaactgaatatatgtaacatggatatctgcaagctatgaatgtgaaggtggcgtgacattacacatgtgaattaatgtttgaatggcatctgcaatggcaaagcattatgcattgcgtttatatgaagtgaatgaaatatattttacattgatataagagtggacttcgtttaaaaattggtacagtttagcattgtgctggttagtatttgtcaacccaacacaatttagagtcaccttaggagagagaaactcgactgaaggaacgcctccagaggattagcttgtgtgcatgtctatgggctccttttcttgattagtgattgttgtgggatggcccagcctacagtgggcagtgccattccagggaaggtgtcttgggttgtatagaagggaaggatgaccaagccaaagagagcaagtcagtaagcagcaccacttcctgacttctgcttcagttcttgcctccagtttcctgccttgggttcctgccctgactacccctggtgatggactgtaagctgaaataaactcctttctctccaagttgcctttggtcatgggatttatcacaacaacagagaagaaaactagaacaaatgtgttcagtagacattcatagatctgtaaatagatttgtgaaccaatgagttatttagaaattacttacaggaacacgggtaagaagtaatttataggagcctgggtgccttattagtggccacatcactgaagaaactgttgtctcctgctccccagctccccaaccatctttagcctccagatcctcagggaaggtctccatgatggaacaatagtgtgttcaatcttggaactgcccacaacaggttccacaacccccactactccgtttttcaaagtattccctaagccttgaaagagaagtgatacagatatactatgtagggttgagctttcaatgatcccttatttcagctaatagactatgaaggagtttctgtagtaaccactacccatagcaggaagaaatttctctgactaaaactgacaatcatctatgggcatgtggtgcttttaatgagaatgggcttcatagcctcagatatttgaatgcttaatcactaattagttcatctctttgggaaggcttaggacttatggccttgttggaggacatgtgtcactaggggtaggtctttgggtttcaaaagcccatgcccagcccagcccagtctctctctcctgtctctctctttctctctctctctctctctctctctctctctctctgtctgtctctctctgtctatctatctctgtctctctctcctgcctatggatcaggatataaagctctcagctactgtcctagtatcacgcctgtctgcttcctaccatgatgattatggactaattctctgaaactgtagaaagctcctcaaaaatgctttctttttataagtgttttgccttggtcatcatgtctttttacagtaacatagcagtcatttagacagggcttacatttaaataacatcttaatttttcaagaagaaaggggtggaattggccttggtgtggccatgaatttgtctgtaacggaggcccttcccctcctgctcctcatacacatgaggaaattcaaagagatgaatcaaggtttctttcatccgaaaagtattattttactcttgtttggaaaattgccaccaaggtctgttcctatcacttccttaccttctaatctgtctttggttaaatatgatttctatttgacgttctggtgatttcttcaatgaagtgctcagtcatactcacgggcaatctagagaagttgagggaggggagatttagcagcaaatgggaaggcaaataaaggtcgccgttgatcttggtaaatgacttccacaggcccgtacaggacagagttgaactccatcttgctgtcagcctctttctgttccttccaaacagcttggtctgtctctaaacctctttccaaagaggagctaaggatgtggccatggaaggtttagatgtcacagcagattgctgagaggtgttttgaggccaaggaaacacctatcatgagtgccacactaccccttccccctcacagtggccattgaatccctgtgattaagcttgtccacagcctcttctgtaaccgctctgaactcaccatgctcggatgtgtgaggaccctatgcaggcctggggaagccagcattgtcaacctcagactgggtctgtcatgatggcttctcctcccaccagaagcacaaagattgctttgctctgaatgctcctgttggctgagggaggaggtgggaagggcccagatctgggggaggtgggaagaggatgtctgagtcccagctccattgttgcttctttgctgtcagcacggttactggtgcagctggtgtacccctcccagcctcaatctgcatccacagaatgggatattagtgcactcttttacacttattgtgagagttattgtcagaggctaacactctttgcagctgcttgtttatacctatctatttatgtgcacatggaaattatgtttatgttatacacacaactatttacttttcctaaaatagataacaggccaaattaattgatacggctttgtcttgacccaggagatttcagaattcagaaaattaactgattattaacattgtattattttatggcaatgtggatgcgaatgtggttgccctctggggccagaagaaggtgtcccttccctggagctggatacacagacagtgtgagccacctgacttggatgctggtggttgagcctgggtcctctgtgagagcggtgtgccctcctgactactgctcagcaatctctgcagcatgcagtattagcagttaaaggcagaaagatatagcagagatattttgagctagatgccaagtttaagaaattatgttttacgtggatggatgtttgtctttatttatatgtgcaccacacgtatgcagtgcctgaggaggcccaaaagaacctggagcctatagacagctaagagctgcaatgtgggtgcgagaaaccaaacgagggtcatttgcaagagcatcacaccctcttaactgctgagctatctctctagccccatagatgacaattctgtgagtggatgatctgttttattgcattgtttatcttccagttgcaggtaaaaagtcctccagaagcaaatcagtccagagggaaaagcattcttataatactgtggccttttacagcccaaagggcagtgggcaactggagaaagggacccttcagtttctaagatttatttagatgcagtgcgaggctgtacttaaagacaaaggaaaaacgagtgtttcttctttgatggttttgggtcaaaggaaagcctgctcaaatgtttcattctgtggtgacagactcttgagaaatattcaattagacttttaatcttttttttaacttatattctcagaattgtctggaagatgctgatgagatgatgattcagcttgagttgtctacatcttgtggctgtgattctgggctctaaattcgaaacttcctatccaaaggactagaagagccacctgtgaggaagagaggctaaccaaattgggggccttgatttcctctgtccatacttgctcctcaaaagctcatccactttgggaagaggctgcaggcatcaagaagcacaaaaaattactttcctgtctcattctctttactgtgtgactggtattaaatagtcaacctctcagaattccagcttccttatctgtgacaattaaggctgcactgtttgtctccagtaattgttctgctttagagaaagatgtgttaagagcctggactgtgatcagcaggaatgaatgtaaattcttccgggaagaaaatgaactggtcattatgcccaacatctgccatcagaaacctgagccagagagcagtcagggcatagagttgatttctgaggaaaactgacttgactcatcagggagccgttactgaggcacttccaggttagaaggagctgggggcatggagaggaagaggtaagcaagccagacagaatactaagaggcagccacctcatgcactgtccggtcagccagcctttgtccatatatcctcattggaccccagagaaacaacagaccaccagcactgtgagcacacagtcatcattttaaatctctagtagctacatcgagaacccaaagaaatgagggagagtaattctgatagcatattttatttaacctaatgtgccctaagtattagcatttcaacatgcaataaaactacttttggcaccaggcggtggtgacacacacctttaatctcagcgcttgagaggcagaggtagttggccccttgtctacagagtgactttgggaacagccagagctacatacagagagaaaccctgtcttaaaaaaccaaatcaaggcaaccaacaaaccaaccaaccagacagccaaccaaacaaccaaaacacaaccaaacccaacccaacccaacccaacccaacccaacccaacccaacccaacccgaaaccaaaccaaaccaaaccaaaccaaaccaaaccaaaccaaaccaaaccaaaccaaaccaaaccagtggttaagagtactgactgctctttgagaggatacaggttcaattctcagcacccacatggcaacgcacacttgtctgtaactccagtttctgggtttctgacatcctcacacagacatacatgtaggcaaaacaccaatgaaccaaaaattaaaataaatttctctctctctctcatctatctatgtatctatatgtatgtatgtatgtatgtatgtatgtatgtatgtatgtatgtatgtatctatctatctatctatctatctatctatctatctatctatcttctggcacagtataccctttaaaggattagttagaggtttactgtgatctttatacttgtaaataatgcactgaagtctcagcacattttagattctacaattatgactataccattttttaaaacaacgacaataaacaatccatttttttccatgtgtataacaggtcccatattttacatgaatcccaccaatcaacttgattaacaccttcttgaggtttaagaaagcatcctggagacaaatctctgagcatgctcctgatgggcttcctggattaggttattgaggtggggagatggaccacagatatgggctacagcatcctgtggcctgggctgctgtactgaataacaagtagaagggaggtgagccctagcattcatttctctctgcttcccaactgtggatgcaatgtgaccagctgtctcagattcatgccatcatgacttctgactatggtggactgtactctggaactgtgagccaaaataacacttactcctttaagctgctgttgtcagaaagcttgtcacagccacaggaaagctaacaaccctgtcaggtgcatgttagtactcactcattcgtggaagaggagtctgaggtttagagacagtgagtagcttgctcaaggtcatttgagtttttccgtggaggaagcaggatttgaacacaggttgttttggttccaacccgttcacactcctctcccaagttatttgctagtcccctcactggctggtttgctttcctatcaggataatttgatatgatgatgcttgtactggctagttttgtgtcaacttgacacagctggggttatcacagagaaaggagcttcagttgaggaaatgcctccatgagatccaactctaaggcattttctcaattagtgatcaagggggaaaggccccttgtgggtggtaccatctctgggctggtagtcttgggttctataagagagcaggctgagcaagccaggggaggcaagccagtaaagaacatccctccatggcctctgcatcagctcctgctttctgacctgcttgagttccagtcctgacttccttggtgatgaacagcagtatggaggtgtaagccgaataaaccctttcctccccaactgcttcttggtcatgatgtttgtgcaggaatagaaaccctgactaagacaaattggtaccagcatagtggggtattcctgtgacaacctgaccatgttttggggaggtctgtggaaggactttggagctttgggcttgaagatccattcattgttaagagctctgtcagatgttttggtaggagcttggaagataatgttgagaacagtgcagaagatggaggcctggcttatgaaattcagagggaaaattaaagacttttcagggccattgctgttttgattgtgaagattctgtagttctggttagctggggctgaagaatcagctgtgattaacaagataccagaactactaaagcaaaaactttgcattactgggactattgatgctggttagctggagctaagaaattagcggtgattaagaagaggccagcatcattgaggtgacatcttctgggaagtgttttctgagagtacagtggctgtgttccagatatagccaaagttgtaccttatgctgtggctggacttggtaatgtgtaagggtcacccaggtggtactggttttgaaggcatgaaggagttgagcagagcagctgaggcttggcactgtgagaggccatggaaggccattggtgaaagtgcagcctcagttgcaattgatggcccaggactgaaggggtcatgcagtgttttggagatgccagtaccatgagatgaccaccaagagcagcagcagcagtggagtacagacatctggagcctagaggactacacgtgtactacaaggggcatggctggagaagtgacccaagcccttggaggagcctagaagatcgtgagttggatcccagacattggacggttggagattgatttttgctttgattgtgactgtgccctgatattttccctcttgaaggaagaaactgttttagtggagcctacagttaagagacttttaattgtaaaaagagtttggattttaaaagagatggatattttaaagagattgaaaatttaagaatatgtaaagactgtgggacttttaaagttgtttagatcttggggatgaataagaatgtaagggttgaggcttactagtgatgtgtttgtgtgtcaagttgacaaggggtcaattgtactggctagttttgtgtcaacttgacacagctggggttatcacagagaaaggagcttcagttgaggaaatgcctccatgagatccaactctaaggcattttctcaattagtgatcaagggggaaaggccccttgtgggtggtaccatctctgggctggtagtcttgggttctataagagagcaggctgagcaagccaggggaggcaagccagtaaagaacatccctccatggcctctgcatcagctcctgctttctgacctgcttgagttccagtcctgacttccttggtgatgaacagcagtatggaggtgtaagccgaataaaccctttcctccccaacttgcttcttggtcatgatgtttgtgcaggaatagaaaccctgactaagacaatgctgatatacccactttgaattttattatttatatttattttattatcattacaaaataacttgtatcatagccattctttgtgcgcgtgtgcaagtgtgtgtgtttacgcacaggtacatggatgagcatgtatgtgagtgtgaaggaaagaggtgtcatttctcaggcaccattaactttgtttcttattattttgattttttttttaaaatttttaagagtctctctaatctggaacttcccgggtagcctaggctggtaggccagtgagcacttgtaatccacctgtctcttcctctttcatgctgagattgcaagctcaggctaccatgtctggcttttttaggtgggttctggggatgctcatgtttgcaaggcaagcaagttaccaaccatgctgtccatccacccacacagacattcttaatcttcagcaaaagtttaatctaaactgttctctcatcacctcatgaggaacttagaactgctcatttcatctttgttctgagcttagtgtatatggttaaggtgaagggtaggatgaagagggtaccaaactactatggtttacagcagcttattatatgttataaagaaccaaggagtcctgagaaccccagtataagccagtgatcagtgtctaatgaggtagaaatgtttcttcctggtttgagcatcacatattgaatacttgtcatggaattatcacactttataaatacatataattactacatatcaattttaaaaactaagatgatttgagaaaaaagattttgggggaaaatatcccaaaaaggaatgaggggttttataaggaagactagtcaccatgtagggtgggggctcttcaagatgaataataccggatagcaaggcttctaattattcagagcccttgtgggacaatggagcttggcaggaaacctggtaaggtagagtgggtctgagtccctggaatcttgagtacacacctgagagggtaggcagctccctgctcccttccagatacctggcctggaacatgtgtcacacttcccacataaggaaatgcgacctgtggccatgtagcccaaaaacagagttctccatgctaatgaagcacctagaagccctgaggggttagccaataagctccccttcctagaccttctttcccacaaaaggtatttaatctctggtacactctgagaagtcagtacatattcatttacatgatgaataacagtaaacaatttggaaccaaggactgtctctttcatctccaaccaccatagggagcatggagaaggcctttgccttcagagccactgcctaagtctcccgtagaaggcctctgtgagcttccagacaaccgctactacctttgccaatgaatgagccaagccctagtcccaacccagcctaggctagacactatcctcagcctaaagaccccagtggtcctggccttgtcataggcctgtggactccctccccctcccctacacttcgttctgactactctgtgctgttttctagcagtgactagatacctgggagttggggaataccagctttggtttcccacatcttcaactgcattttcccaccacctgaactctatgtctccgtgcttccctaaagaccagcacccaatggccggcatgagataagcacagtcatgctccctgtgttttgcctccccagtggccttgccctcagaacacagttcaataagcccagggtgaagatgaggcaaattctcaaagtttttttgtcacatcacttaaagtgatattgggctggagagatggctctatggctaatagtacatgttgatcttgtaggggactcaagtttggttcccatcacccatgctggacagttcacaacctgctgtaactccctcagatccagggattccaatgccctcttctggcctcctcaggcacctgcactcatatatgcacatacccctcccctctaattaagacaataatgaaataaatctttaaaatgatactttaagccaaaataaaggtcccttcagactctgtttagccctgttactttcaaaatatattaatgaatgggaaggaaatagaagaaggaaacgatcactatgttttaaaagagatgtctaccaataaaaagaaagtgtggacaagacagctgccacctgagaacatgtcattgatgtccactctgactccccagccaggacctcatttctaagaaatttccttagcactgaaacagtaggttactggagaaacaagatgactgatcaactagaagacagacgtaatcctcatattttgtagtagttgcaccaaactataacttaacaatcacttgctattagtgacatagaagccttcagtcacaggagactcacacttcccctctctatctgttgcttagtccccttggaatatactaaatgaggagttgccaagctaccggctaatgcctctagtggtatggaactcatggctccaactcatcatgttgtttgacactccatctagatagaaatgtttccttaatatgagctagaatctgtctccccatggtcccattagtgttcctgcatctatactcaggattctgttccagatgttttgaaacagctggcaattttgagattactgcttctctgtgaactctgtgtactccgactgttctccccatggcttgactttaattcttcttattctggtcacctccttagaccctgctctgctgctttaacctctctctcccctaaggtactgtgggaatcttagtatctgctatttagtggtgctctgtgtatttcaggtgctataaactgctacaatccccctccactgacgaggaagctaaagcatagagaagttacctgccttctcaaagttggtgaggggagtaagtgggatgttcactcagcagcctatgtggagcctttacaatttcatttttctgagtatggctcttccattgtcacctggttggtcagaagatgacaaccctattgtgtcttctatttaggcatcttgagatgatgttcacatttctggctggtaatgaagctaggttcataaggggaattgaaggatgagtcagcttttgaaagtccttacagtgctataaaggtaggcagaggctcaacattttatcttgaagaagctagagtcctattgtgaattaactcttttaaatatttttggtttgactttttgttttctgtgatggagtcttgtccagttctgggttcaagtgacctccctgcgtaagtcttctttctacacagctgggatcaggggtatgagctattgtgtctggtgcatcatcatcattattgtgtgcataaatttatgtgtgtgtgtgcacatatgtccatgtatgtgttcatgtggaaatcagaggtcaaacttgggtgggtcctatttcattttttgagacaacgtctctcactaggtactaaggttcacacatttggcaaggctggctggccagtgagctgtaagggctctcctcctgtctctatcttcccagcagtgagattaagtgcagaccaccatgcctagcttgttaggtgggtgatggtggcagaactcaagtcctcgtgcttgggtagcgagcacttcatcaactgcgcaatctctccaacccctcatttttacattgatgtcaattacatattttcatattttattcaaagaagtcatgtgatcacattatatatatttacattatatatctatacatatatgtcagacacacacacacatatttaagacagtgatgaagataagttaaataaggatgaaagtagaaacagtattaaatgtcacagaagcaacccatggaggatctgagggggagaatgaaagatgaccaagagatcagacagtttttggaaagtattgggtcagaactggatgacgaattggattaagtgaaatagaggaattgaattgcttggaactctatttccaggcagttcagttcctgggagccagagagagagagttgtgtcacctactaacacgggggatagagtaaaatgaaaggagctttggcacagggtttgggtgaagtgtagaagatgctgggagaacaaaggtggaaactgcctgtgccgcaggtcatggatacctgctaagaaatttccaggctggccatactctcatgtgcacatggaagaattttaaaaatatttgtgggtagtgaagcttattcttaacccaggcatcagataatgcttggaggagtccaggtgaagagtgtgacttcatccatcttcctctggctctacagaggatgctgtagtttgactcatgttcccaggagtctggaaaagataagtccttgagctgtcctccatgccttcttgtatcaaaactcaagccgaatggtctaattttattttttgccttgtcatttgtaaataaatttgtgtttatgtcaggaacagccttcttgacaagagccacattctctgcagtgtgcttgtttggtacaaaatgttcatgttttacttaatatgtctgatgatggcaggtaacttctctcaagaagttatttccaattaaataatctaatatttctagtgtaatataattactaaaaatctattttatcaagagttattaagattagattatttctctctgcccttcccttctttcccagatgggtctcaaatttaatatgtagcttaggatgacctagaaaacatctgacctcccagtttacttttccttggtcctaggactactggtgtgcactgcactaccacagtggttcattggtgctggtggtgaaactgcatgccagacaagcgttctactcactaagctacatgcccagcccttgtctgaatgccactttaatttcatgggtacttttgaggtgggacttcagagaacagagtttttgtgagcaggattaatgctgtttttgtacctgtagagctccagggtcttaccttcttttctaggcttcttcctccagttacagagcagaaggttagctctctaaggatgaaccaaggggccatcaaaactaggtgccagtggtttcaactggacctgatctaggcctcaaagataagacatgaataaaattggagaggccatgaaatggggcataaagaacaatgagtgatggtgcttgaacttgggtcagttgagactctcttaagaagacctggctatgggagtgtggacagagtgcttgtgccctttccctagtgaactttcaacttcaagggaccgaaatctctgttcataatcgtatgcataaggaaggagcaacagggtgaagagaaatacaaggccactcctgtgaggattgaggccagttgttgcttggctccacccctctctcactagttagctcactccaactaccctcttggctcactgtgtgtcccatctaaatgtgaaaagcacgggaactgaggctgctccagagatcagaggaaagtagagaattccctataatgtgtaggacgttaccctaagcagatgccgtcagagggaaagcctcatctaacaccagtttagcacctggactattatcttctcagaaaacttctctcctttagaagtcaccagctgccatacccggggatccatcccataatcagcccccaaacgctgacaccattgcatacaccagcaagattttgctgaaagaaccctgttatagctgtctcttgtgaggctatgccggggcctggcaaacacagaagtagatgctcacagtcagctattggatggatcacagggcccccaatggaggagctagagaaaggagctaaagaggtctgcaaccctataggtggaacaacattatgaactaaccagtacccccggagctcatgtctctagctgcatatgtattagaagatggcctagtcggtcatcattgggaagagaggcctcttggtcttgcaaactttatatgcctcagtatgggggaacaccagggctaagaagtgggagtgggtgggtaggagagtgtcggggggagggtctgggggacttttgggatagcatttgaaatgtaaatgaagaaaatacctacttaaaaaaataaattagaaaaaaaaaaagaagtcaccagcgtgtggcattttgttatagtactaggaacagagaagatgtgaactgaagcagaaagccctgtcctgcaatggccgaggaacttggtgtctcactctttcccatgtgagtaacagggaatgaacagtgttgacagcaggcagggatctctatctgctgagctatctttctggccctcagttggtacttctgaatgtgaattcgttggtggcttctagtgtgcagatgcctagcttcaggcagtttgataaccgaggcagtaagaaaaaaagattctagtgaactgccagagttcccaagggcataaggatctggtaaattagggagtgggaggagtgggggaaggagtggctggtctgtatttgggggtgattgtcctggtggtgagcaccctgttctgttaaaaatgcaccgttctgaacaaaggaggtgcagcctctttgttatgctggacttggattcagaagaatcaagcctgaaattattgagcccttacttcagtaaagaaataatcttctgacaatacataaaggttatattgatcactaagaaagcattgagtggagaaaattacaagagaataataaatgggaaatgaaacacatccaatatataccgagatcagtcagggctctctgaggcagctgggtgtgggcatgtaggcttctctcttccctcctactcctagcactggaaagagacacaaggctatgctctggaaggagccagtgttccatcacaacaggctcggtccacaggtttccaagtcccatgtggagtgtctaagggattcacaggcataaagccgtccatatcatctcttctgaaactgtcaaccaagtataaagatttgaagtctttgaagtaacagacataataattgtgaacacagttggcttctgagtcccaggaaacctcaaggatagctcaggccagctgatttccagtcctcaagtaagccaggctcaattaggcccagagggaactgattactgtctgactggcaaggcacctcctcactctcctctatgctcttgttcattaaaatttgcctcagacattggtgttaacaggcacacaccaaaaacctgttgtatacaaagcaatcactaatttaccttcacaggacatacagcagagaaaaacacagatccccaaaaccacaaagcaacatgaaattgtagacaagacagaaattttgtgtatcttaacctagtacatttagaaagagagataaagagaaggcaaagattgtaaatctgtcctctcaactggccactgtgacttggaaaatatcactcaggtgttgagactgtgaacagtagatatgctagtggcctcactaataaactgacatttttgaagaacctaaaggaagcaaagggaaaaggaaaaaggaaaaaggaaaaggagagcatagtcagaggaaaagagggagggttagtcagagaaagggagatgtggtcagagggagggagattagtcagtggaagggggttagttagagggaagttagagggaggttagtcagagggaaggagattagttagagggaaggggtcagtcagagggagggagattagctagagggagggggttagtcagagggagtgagggaggttagtcagagggaaggagattagctagagggagggagttagtcagagggagggagattagtcagagggaggggttagtcagaaggagggaggggaggagggaggggaggttagttagtgggagggggttagtcagagggagggaggttagtcagagggagggggttagtcagagggaggggggaaggaagttaatcagagggagggagattagtcagaggggggggttagtcaaaggaagggagggagattagtcagagggagggagggaaggaagttaatcagagggagggaggttagtcagagggaaggagattagttagagggaaggggtcagtcagggggggggagattagctagagggagggggttagtcagagggagtgagggaggttagtcagagggaaggagattagctagagggagggagttagtcagagggagtgagattagccagagggaggaagattagccagagggaggaagattagccagagagagagagagagagagagagagagagagagagagagagagagagagagagagggctagtcagagggaaggagggaggttagtcagagagagggaagtttagacagagagaactagggaggattagaaacatggaagaaagggttagctagagggagagagggcagttagaggaaggaggagggttggttggagagaagtaaggaggtttaatcagaggaaaggagggaggctttcgagagggaggtgggaggcttagccagaagtaggtaggtaggagggtttagtcagaagtagggttcagctatggcaagaagaggaacaggagtccttgtcaaggcagacctgacagtctgaacactgctttttctgaggaacagaggctaatgtggctggagcaaagggactcacatagaagtcactagaagcattaatgccttataggaaggaagatgccaaaagggctgcagaccaatgccaggatttgtagggagagcctcatcacaggacaggatggatattgactgcaatggagcccacacagctggtgtgtggagtatgagtagccaggaaacgggtaggagcaatttttctgagagtacagacacaatcaagactagagttgaccagggccaggcaggatcaagtgacaggtccaccttgaaggtccaacttgaggtaggaagacccactctaaaacagtgttaccatcaccttggctagattcctggacaaaatacaaagtagaagaggaattgtgcattagtattcttctctctctgactggatgggtacacatggccatcttcctgcagctcctgacatggtgacattccagatattgtgaatggtatcctcaaataaacctttgtctttttaaatcgattgtgtgggataagagcactgagaaaagaagttaatgcagcaggcagatgtggacagtcacaaatgagtgaccagagacactctttaaaacaaaagcagagtgggcttgatttttatgagtgtctgtccagcttctcctgtgtctgtaaagtatctttgtttgcccacaatttatcccagtactggcaagacataaaaccaaagcctgaggtcccagggtggattctgtggtgttacgtacactcatattttccagaagccccagtttcctctggtagatgaagccagctaagtaagtggagtgttgctgtgtctaaaggagataatgcatgataggtgcctagcaacaaaggttttatgcaaatttcagcattagtaaactgtttggggcattcttgaaatgacctgcagctctcttcagcagtttcatgaatctttacctgatatttgaattagggagaagtttttgactaagagccattttatgataggttagtatttttaggtggctaaaaataatatttactgtttcaaaacttgtactaaagacatgcgacatttatgatgtaaataaaagcaattaagtgacaactgtggtaggtctgcctggttcccagcatccttgtcttgaacaatgccaaagttgatcctctcctgatcacccaggcattcgagagctctttgctggtcaacatgttgatgcccagtatcatggtaacttgaggttccttgtttgtgtgtgtgtatggacatatatatatatatatgtacatatatatatacacacacacacacacacacacacatatatatgtgtatatatatgcatgtaccacccttctgacttaagttgatcattactctctctctctcttccttccttccttccttccttccttccttccttccttccttccttccttccttcctccctccctccctccctccgttctttctttctttctttctttctttctttctttctttctttctttctttctttctttctttctttctttctttccttctttccttctttttgtctccctcccctccatctctctaccatctacctatctatcccttcagtgattttagctgggtcagacctcagcaagcagacaggtgtggctctttcccattttaccatctcaaggtacaagaactagtcacataagacaaaccacagggcacgacaaaatgaacttcatgggggtcacatgagctttgaggactctcagtgaacctgaaattatgtttatgtcatatataccttaatgggaaaataacgtccagcatcggaaatggttctaatcaactctgggtaaatcagggtctgtacacacagcaggtgtgggaagccaaattgataaggtcacttagggaaggcagatttgagaaactgacaaggtcttacactgtgaaccgaaggctaaccttcagcaatattgcagggtggggtggtggtggtggttgcagggcacggtgacagagctgtaatgattggtggtgcttgttgggtttgttttgctggatcactaaccagtccctcgggggaactgcaaattgctgtggtgttgctgctcagtcctagggcatcattggccatccactcattatttttatttgcttgggtgtctggagttttgtttgcttgtttttttttttttgtttgtttgtttctttgtttgttttttcttttgttttttgttttttgtttttttcactcatgccatacatgaaaaattagaagcacctcattgatgagccggcccctttttcatttgctctgtgaagcagatacattattctttaattactcttaatgttatgtgaggggaattaagacacaggtcagtgggatctgtgaaaaggaaatgcagacctgctgcccgcagagcctcattgtctcaccacagggtgggcagggctcctctggggaagtgaaagggcaaagctggtgtcctgacagcagagcttcttgatctttgaagatccatacctcccgctgagctgctctttctcgtttctgccagccaagacgctgaattttactttctaaaattcacagcacagaaaacaaaaacatacaggatctgcatctcatccccaagtcactccttggatggaaaaccaacatttagactgcagactgtaatcttcatgttgctctcaggacgatggagcttttcaatctttgagggatataatttgcaagctgcaaactaggatgatgggtgtgctgggcagatctggggtgggcgcgaagtaaagcgctcagtgttctggggtttgtggagaaggacagaaagtagagccatggggaaacagcttagagatcttgctgcagtaggtgatccaggcgtcaaggtttgaataccaagaacaatgcttagtggtcactacaggaatctttgaacatactgctttagtccatcctgtctgcatgccatggtcaatgagtgaatatattcctggggaaatagatcaagtgaatgctgtagtgatgtgactagaacaaaggagaaaggatgttggtaaaagtcctgtgtgatgaattagtccgatgtatggggtaagtgatgtgccatctcatagaggaagaggcacgagcctgtttctctctctcagggctcatattgttgatctcgaatgaggttttatagatggagatagaggggaggaaaaaggcagtgttatgagcagtgaagacctgccaatgtaagaccattgactcaggttttacaccgaataaaaagagaggtgggcaggggttgggtggggaggagagcaggggtcaccttcatctatccctctctgcctcctgatgtggacacaatgatccactgctccactaccagtctttctctgtcacgatgactgtgtcctttcaaaccatgagccaaaaataattcttcttcccctaagtcctttcttgttgcacatttggtcacaacaagaagagaaatagttaatacatgaagaggttgtgtgggatgctggatcctcagaaaggctcctgcctttggcatctctttgagactgttttacacacacacacacacacacacacacacacacacacacacacacatacacacacacacagagagagagagagagggggggtccaggaggagattatgcatgcacacagactacgtaggaacgtacacattcagagaaactgtatatgtacaaacacattcagacccttgtccctacctcacactcattctagtagctgatgaaaagcaggcctgggtgcctgactcagaatgtgggcgaggttgtgggaggagaagcaatgacaggttgtataggaggcaagttgaatcccatttaccctgtttatcatctctcaggttttcttcaggaaaataaagtaaaagatgggacaggaaggccagggagagaggagaggtggtttcactttatagaggagaaaatgaagaaggctgggttaggcatcccctcagtcacgcatctccacgcgcagcaaagaagagctaacacgactggctcatcatggaagggtgataagcaataggaagtacctaatggctgcctcatggtagcagcaatgcccttaaaaaggattgtaggttctgggaatgactgtccactgtgtttttatcttacaagaagacaggactaccattacctgattagtatagtagagtctgtgaacagcagggaacaatttaggttgggtgtgttaacactgattcagccagtcaattccccactacatatccactccacatgtgaacaggggacaataaacacacagttcctcttttaattgctgttctttatttaggagtgctcttgttgatttgctttctctgaggtcacacgagtgctacagctggcctgtgttggtacaattatccgcccaaccaaatgacaattcaaacttttgcttctatctctgtcttctcctgtcataagcacatgatccggggcaggggaggctttccctttctttggtaatggttagtatcaatacatgtataagttactctgagttaggcagacataagaacttccagcctttgcactgaggattgctcttgcagctacaccgctgtcagaggatttgtgctgggcattaatattcaaggtagactcatcctgaccctcataatttttgttgatggtgttttaaagacagagtctcatgaattcctggctgttttgaactgcaatgcagctgaagatggtcttgaactctgatcctcctacttctacctcataagtgctaggataatctgtatgcaccactgtgcctggtttatatagtgttgtggatcaaacatggggttctgtgcacgcaaggtaagcactccaccaactgaactacatcattagtccccaactcccattccttgacttaagaaatatatattgtaataggttaaagataactgctttgttggtaacaaaccagtttataattaagtacacaactgtgacccttgagtttatttgtacaaagatggaaatatgcaaagtcatgtgtttctgacaaataggatgtagagtttgtgtttgtttagcaaaatgataaattggtggtgatggaaagaacaggaggtccataaatcatggaagtccagcttcatcgctctagcttacctaggtcactctgttttcttgagccttgatgtcgtttcctataaagtaatgtcaccatggcttgcacttcgctgtgctttcccacttgagagcgagttccagatattcattgtcaccctccctgaaaatgaccatcaccttgtgactgtctccttccttatgaggatttcctcttgtttaggcagtgaaacaagcatcgaagggcttttcaagccacattcctcagaggtgctgaaggatataacgtggcccatgacctctgacttccaacttgagtaattgacccaccactctgaagtgatgtgtctggcttccatttcttacaggacattattgaggattaaaagacactgctcctcctactcagtgacactgcttcttgaaaagatctgtcagcttctgcttcttgtctttgctgtgctccttaattcatttaatagtctttattatatttcacccctcgaatacacccctaaccccttggcttcattttctcttcattgtccttgtctgactaaccaaccctgtgaaaactgctcttgtttctgattctatagtagtagtcatagcatggaaaggagccacgcagcttgacttaggtcttatttaaagcatgactgtaaatttcaacactcatctgaaggtcactggtggtttcaatgtcttttcctttggaaccttcaatttaattctttacctctagtcaaggctctcagagctccctggtagatggcctcgatttctatcacatctgcacggccactaacctctgcttttacctctcttgtatttcctcatgaaatgggtaccactgcttccgtcaagagcttcccttggccacattcaagatttggttctttcttatctttttatttatttgtttctatggttttgagagaagatctggctatgtagtttagaggctaggttggttttgagcccacaatcttcctgctgtggtatctccagtgtggatatcacgggtgtgcaacataacacttggctctctcccatctcttaaaggtgggtctctttcagttatttaccattttttttattaccaaccttgctgtttgtggtggttctaatgagaatctccaccaccacccaggtttatagatttgaacacttgttcactaagaagtagcactatttggaaggattaagaggtgttgccttgtcggaggaagtgtgtcactgggggtaggtttgggggtttcaaacatcccactccaagtcctgagtctctgtcttcatgctgtctgtggatctgatgtggaactctcagctacatctctagagccatgccttcctgtgtgctgccatgatgagaattgactaaatctctgaaactataagtcagccccaactaaatgctctcttttataagagttgctgtggtcatggtgtctctttatagtaacagaacactgaccaagacagaggctggcaccagaagagggtattgcgaggccaggcctgaccatgctgatcattggtagaatctggactttgaactaggaaaacagttgaatgctttaagcaggtttaatgggacatactcataagaaaatgaaagatgagagtgatgaactgtgggggttcagttcaaaaggtttcagagaagaatattagcaagtggtctagagactgtaattgtgatattttggaaaagaatgtggctgtttcctgtccttgttctaaacatttgcaagaggctaaatttgtatacaactgcatttcttccacgtgaagatttgtcttttgtttcatagaattagaactaatggggtagactgtaggtagaatgcaggaaatattgactcagataaataatacctgttaagaaagatttatggggaatggcattacctaagattaatgtgattttagtcctcctgtgtttagagaaacaatattgtatttctactgctcattcttgagcagaatatgcaatagcaccatggttcatcacagaagggaggggtaggagccagtatgtagttcgccacccctgtttctagattattttgctatacttggaggtttcctttaaaatgacttaaaattcatccccgttgagaattaatgcagacccagagaaactgccccaaatctctatctaagcatacaggggttacagattcacattgagggcctgacattttccctttgtactatacacaagggattaaaaaaagcaccccatttcttaatgtgaagccccttcaagcagaacctgaaaaggcgcacatctttattagtaagttaagtttctccgtgcttttaatgtgtgaatgtacataattatgtgcacatctgtagaggtcagaggtcaacctcaagcgtcttcctcagtagcttgccgccttatttttttgagataagatttatcaccgattaaaacttagagtttgccagtttggctagactggctgaccaagcagccaccagaatcgttttgtctttgccccccagcaccatgattgcaaatttgaaaatatccttgatttttatatagatgctgggaatcagaatcgggctcgtaggcttgggtggaagactctaccgactgagccactgccccggcgcctctgaggtgctattcactgggaaatatgacacatagtgataaggtcagctttatgttttctgaaatcattctttgaacagctaaaacatagggatcgtttctacattctatttatctaggagaagatggtggatttgttacagaaatttttagttatagaatctatttagttatttaaatctgctgtttgggtcaattttcaaagtctgacctcacgatagctatcattgcgtaacttctgtatgctcctcacccccacctagggtagtgattttccccttttcttaaaccaatttataaaaaagacagagaaaagttagcaaatactaaaaggtacaagaaattaagcaattacagttaaaattatattatctccaaaagttttttttttgtagtttatttagcaacacatttgtttttttttgttttttttgtttttttttttgtcttttaagggatagtttcactgtttaacatggccttcaaatacagtgctaaaatgctacctgtcctgtaatcaagctgaggcaggtgcatcatgaattggagaccactttgtacttcacatcacagcacaacgctgtctccaatctctctctctctctctctctctctcacacacacacacacacacacacacacaagggtatagttgtaatatgtcacatagaataaacacaagtgttgcctgtttggcatttttcattgctacaaatacccaaagcctcataatatatagagaacagtttggactcacagtgtgaaaagcttaagcatgtggttctgaggcctgctcagttctggtgagctctcctcttgctggatgactgttggtggcactgaatgtagagggggtaatcgcacagcgagacagaatgccaaagagagcaggggttggaggagtgactacaaaccctttcataggaactacattagtcctttctaaggtcagcacccccagtgactaattgcattgccctgcgctctgactcctaaaggttctaacagttcccagcatcctcaaacacaggaccaagtctccaacacatacacacttggggacacactcaaaccatgtccagcccacagaagctagaaaagcttcactcagacaaggtcagagtgagcttggctacaagctccatgctggtgttgtggcttgaatctgagctgtcccccacagtctcaggttttagaagccttgtctcaggttgtgttgctgtgttttaaaggtggggactagctgacagaagcagacagttcgggcatgatcttataactcctggttgtagctgttctctgattccctgtctatgccactcctactgctcacacagtaggcagagttgctcctggggccatgcctgctctgccacagacagctcaaattgctctgaaactgagccttctcttcctcaggctgcttcctgtgttaatttatcatagccagagaagtgactacgctttggaagggttaaacatgtcttctgtgaaccatctggggatgtggttgaatttatgagatgacaaccagccgaaaggaagaaattgtgtggacagtgctgccccgctgttgggagctgaagcaatttccagcacattacccacaagcaaaaagacgttgggccagtttttacatattaaagaaggtttggggttggagagatggctcagcagttaagagtgcttatggttttccaaaggacctgagttaagtgtccagcacccacatcaggtgatctcaactctgaaacaccagctttagattagatgccttcctgtggccccctcaggcactgagctcacattacatagttacacgcagacatactcatatataaagacatttcgaaaacaaacaaaaaaatttaaatacttccgttctgtattgattgactgcatcaaattctaagccagaaacactgtattctactcagtgccagaatctggaggagcactgtcttgacactggagttttaaatgcttgcgtcttaggttttcaagcctatcgttggtgaatattctttccccattcttcccttgaaggacctggaatgcaaatcatctaggaaggaagatagttttgaggtctgccattagctttgatggtagtgctgggtgagattcagaagtagagggtaatgaagatggcctaaccatgtccaagagttctattacccaactcctaactgctacgagcagataacatggaagaacagtaacagagagaggttcttgcatgagaacagagaatatcgagcagccagtactcactctcagttccaacgccctggtagtgacttttatgggtaacctcaaaatagtgtagtagtataattgacattttgcttttcttgcttggttacaaagaagtaccccattggggttaaatcttcttgtccttaaaatgattttatctgtgggctaaggatgtggtcatttggtgaagtgcctacctaggatgaatgatctgagccccatattaaactggtcctacagaagttcaaggtcattcgtggctacatagtgaatttgagatcagtttgggcttacaggagacccaaaaacaaaaccaaaaaacaaccccccaaaaaactaacaaaagaaaacaaaaactccttgcccccaaacaaaaaaaagcattcaaacttaactaaaagtgcattctatattaaatttcaaacaaaagattgaacatacaacttttagagtgtttcccaccaatatgaaatagaaaagaaagctaaggtgtaatgaaagcatgagggtggtctagcctaatgttctttcctaagaactaccgtgaactcaccaggtgtttcatggagggtttccctgggcccatgctatgtgggtgctggcccatgctatataggtgcagaggcttgtttcctgctgctgcagccccagatggctgggttgctgacagggccattaaagagaaggcaccctgtgaggtgctggtcatgcctcccttccctgctgctggcctgagaattgggacagggcccatctgctctttgcaggacttttatggcctcaaagcagatgcctgaaggtgggatatgtggtggccatttacacacactgtaggggaggagctttagtcactctgcttacatcctgcagccaggaacaagggccaaccatgctaaacaagctgcctttgaagctgcagggaccaagcagccctagccagaaagaactctctctagcccactgacattgctactagtcatatgaccttgaaaagtcactgcacatccggcctctgccatagcctttgtcatgtgtaaattctctctcttctaacttgtatagactcgtgatacagcatccgctcccactgatctcagagatgcacatttgtgactcccccgctgaactgaatctttagaattctgctggcttgaccaatgtcactccatggacccgtgatatccatattagcaaacagttattagataggcccacctgattccaggaactattctaactgcttcaggagtgggaagaggaaggcgtggcatccactaccaaggtctatcaacaaattttgagatttttgtagatgaattaaaatcagtgtgtctgcaaggagctacagttttatcatgtgcattacatctcattgcacaggaactgggagatggtgggccagacactgtcccacatgactgggttcagaaagactcacagcataaggaagaggttcggaaaatcaccacggaaggggcgaggacacactgaaaaagagtgattctagatgtgataaaggtccagcctggtgctggaggggaagaaaaactctcacccaagaggcaagctgagcagctctcatgaaaagagcccgccccccaccccccaacccctccctccgtgttcacaaacctccaattgtaattctgcttagtggcttacccagtggatggcccagtaacaaggggaatcccagttcaccatttcctaggattgggagggcagtggtcaggctccaccctaagagaggacgtgttgttcgaaatggagctactcctggagtctgagatcatggtctgggagtctgtgtataatctgctgcagccccaatgagaccccgccctggagacagttacacagaaccagagaactagactctgacaagcctgaaagaagaacaagctgcaagaggctctgctctggcaatggatgtgtaactttgcccttgatgatgggagcagatctcctagactaagaataagtagcacttgacacccttgaacctgatgtcagtgggtggatcatcctctggagccaccgggctgctgttctctgccttagagctgcagaactgagaggtccatgccttcataggggtgtggaacactttaaatgtccccaaagctttgcaaacagctaggttgtctgcttctctcccagacctcaatgctgtggttgcttttcagactcccagtgcactcaggagacaacctcctgtgaggactaggcacactctcagtgggtataagctcctttgtcttggaaaggtaagagaatttgcccagctcagagatggcaaagctaagtatggccagcagagacccttggctttaaggaagggaaactactaatgaagattggtctagtagacctcagctccttgtccaatacagattcaacacagcataaaccttagtgtccgggtgaacctatggtgtgcagtcaaagccttggcattatttaggcatggtgggcagaaacattgcgggggagttctcagagagagaatgatgctccagagacagagggtgggaacattttacagtaattacttggccttgtctcctggccatttgtgttgagtctcatttaaatagaatttacaagttcaagatcaccatcttgtgctgtaaattcagaatgaggaaccagggtccattaggaattagtctaatggcttgtgtaagccttgtaagtgactagggcagggtctgagcagttagagactggctcgtagaaaagtcacaggctaagaaggacagacaggctaagaaggacagaaggaaataaagaactacagaaaaccactatggtaaggatgaggctcctaaaagtgcagagaaaccaaaagatgcactccgatgttatcaacttatagaaatactgcttttaatatttataggatctttgctgcttcaggttacttacaacctgttggctatacattattttggacctggcatggatgaatacatagcttaaggggtaagctatgcatttatcttaggttgtaaaagcaagtgggaaattcaaggcatagtcaagttggttacattgttttaatgccaatttaaacttaaatagaccaagcacacagtaggacagcaggttgagcacacagtcttacatgatctcaaggcatatcattagcttggctgcaggtctggcaatgttcagtctcttgacggcaagaaggattttcagaagaagaaacacagtttttagtttttattctccgttttgaacatttgcctaattcactacagagaaattatattttgtctattttctaacattttgcctcctcctccaatagcatttttctttcctcttttcatttctttaaccttacttctcctctattttccaccatctccttttcttttctttcatattatttatctgctactttcacattaacttaataattgtcaacatcacagtgtgttttttactagggtctcattttctgctttatgatcactgtgagttactggtatcttagaagatcttaagtgtgtttctctcttgtgtggcttgatgatattgttgctaaaccacttggttcctcttctctgctactgtggcatgagccctccagagaaggatgctctctgagaagatccccaaataaaaccagaggggacattcaaggcaaaggatgtacagggttcagggtaggtgaggaatgagggagaaaagaacacaagaaaaaagtaaggcatgctgattcctctgaaagatcacaagtctcaactactgaattcaaagatactgaaatgggtaagatgctaagtgaaaatgccagaaacttactaccaaagtgatggggagacatccaagtacaaacaaccaggcagatttaatttaagaccaggaaggaaagctggaggcagagaaaagggtcagaaaaaaatgggcaaagaaaatcagcaatgtggatggaaaaacaaaaacaaaaaagaaccaaccaaccaatcatccaaccaaccaaccagccaaatgtccactggaaaaacacaaaatcagcatggccacaaactcctagacatgatcaagacactaaaacttagaagccctggggtacaagaaggaaatgagattaaaaactgaactcataaaaattttattcaatgaaattacaccataaaattttccaaacctagataaatagataaaagacatcagagacatttagattcccaaacagacatagccagagaagaatttcaccgtgacatattgatatagtgaatgatccatcagacatgcccacaggacacacatgtgaacaaaaagggatggcctttgctttcactctttttacaaccaagaggaaacaataggaaagtatcagagagtaattagaagggataaaaagttagaccctgcacacggtctttttaaagaaacagacaaacatgagcagcagagagaaagatgaagcccaggtgatatgtgagattgggctctcctgagtactcagataatgaggaagaggatgaaggacccacatttagattacaaaactgtcgtctgtgcttggtcagcatcttccattctggagtgacaccaggctttgcaaagtcataaacaaataaggtgcttcacccactctcaccatcccatctccaaggcccctgtggtagaaagggagtctttgtttctcacgggcaagaagcaggatggatgctggtgctcaccaagaagcaggcgatggatgctggtgctcagctcactatctttattttatccagctctgaatggaatggtgccatctgcagttaggatgggtcttctcatctccactcacccagtctagatgatccctcacagacatgcccagagttctcttctaggtgattctggagctagtcgagttgacagtcaatattaacccccatatcacctggaagtgaagaagtaagcagctttgtctgacctgttagcaatcagaccaaagtaaagtcgttcctggatcagaccaagctgggccagcacaatcctgtgcatcgctagggaatgtggcaggatcctggaaggccacttcacataaataaaggtcctgattcatcaagaagatgaacaattgtgaacgtggatacactgagccttggtgcccccaatggccttttctttttatttgtttggaagtggcagcataaggttggggagagagtgactgaaggcttcgtgatttcactcagaaataagcttaagattccatcagaaaagatgctgactgcagccagtgacaacgtcgagtacctgaaagtcactaagaaagtagagtctgtgttttcttctcactaaagttatataaacgttaaatagattcatctagatgtcctacaaaatatacatgaattaacagttcagtttgtaaaattttgaactagcaattaaaatactgtgagttatctatattgcatatttttcctttagacaaccttctccttgggctggagagatggctcagccatttagtgcttactgtgtaaacaccagaccagagttcagattcctggaagccatgtaaatgggaggcgggtgtaggggtgctcctgtgattccagctgggaagggaaaggacagctagctctggatttgagtgaaaggccttgtttcaatgaataaggtggagaagcaaattgaggatggttctagatatctacctctggcctccacacgcatgcacatggacacacacgagggaccgcacatacaaaaccatatatgaaaaatggaaaaccaaaaaattaagtttctccattctttcctataggaactgctcttaaaaccagcctataggtacccataaagtctcatcagattcctgccaatgaacagatcctaaatgctttcagtatttagctgattcagtgctattaccatgctatcacacagtgagatgaagacaaggcacagaagagttaagagacctccctatggacacacaggatgttttcagaggcagactcttcccaggcacaagctccacgataagcagtctcatgactgtagttacttcccatgttaggtgagttccagagatagttgttggaggagtgctggagtgtttttaaaaatgtgaagtactttataagtttaagtggttgctttagttgtcatagacatagttattgctgagactgcacgggaccccatgtaattctcatggggggaaggtcatgtcagcaccgtcctggttgatgttgaagtttagtaacacaacagacatctgagcacagtcaactagtgtaaagtagttctgtggtagacatctagaaggaatgaagtcttgctttccccaccttacctcaggaatcctggcaaatatggagacccatcctggctccagcccacagtgagtacttccccaaactctgtatgatgtttaactttggcccctcagactaagtcttcactggttctactctcatgtaatactctgtcctagtccataagatagacagcataaatgacatctccagctcccctcctgctgctgcttgtggctttggcattcctcagagatgtcctttcccctgctaccctgctcattgcatcagccattcagaggacctcactgtaatgggctccgcactcttgctccttttcccttaccttcagcatctcagatggccctgttgctgcagactcctaactggcatcttaggctacaaactgtatttctttcagttttccagtcttaactgtacatctgacttgcacttaatggctattaatgtctcccagttgccttcaagacagactgtaagctctttccacaacttggctgcatctggctctttggacaccattgtccatcatacttcctaactgacctcatgctgcagctatgccatactgttctggaggtggtcatgtgctcccatgttcctgggacatgtcccaacaatttattttcctaccaatgtttcatagcaactgtcccttttggggagcttgtgatgcaacttattcacgagagtacttgcctagccggtatgaggccctcagtatggtataaagtgggcaggatgggccatacctgctgtaatcgcatcactaggcaagtggaagcagaaggatcaggagtttacggtcatctttggctacacagcgagattgagatcagcctgggttacacgagacaatatctcagaaaagaaaaacaacccctttccatatggtaaggcttgttagggtgcacccacaagcagcttcttgattgtgctgagttggggttccctgccagtccctgccactgcacggtcttctctgcagacaccagctcttacattccttccacaataggtcggaggttcttgagcttttgcacgctgcacctgcattcacagctgcatagcacctgctacagctgttgcacatctcagcgttttaaacgtgcaagcctggtctccatttagattggaacttttggtggatagtgatcatttacaatatgaattggcttccatatttgttgactttaattgtgcttcctacagctaacttgattgggctgatctctaaaagaagacactatgtctaattccttcttcctatggttcctgggagaatctcaaggaggaaaatctgtgcagtgatggatttgtggcagaaacctgatgaaattaccattgatagattgtattgtggttgaacttggcacagcattttctgtgacagacttggtatgagccgctaggtctctggaatggtcactgaaactggatgtcccatggaagcttgtttcaaggacttgatccttggtttgtagagcctttgggaggctggcctgatctggtaacttgaggcctatgaaattattcctgcctctggttcctggatgggtctctctgcttcctgatctaccacttgaacagaggtcaataagcctttcctgtcaccttgggtggaaacccctctgacacctcattccccgtgagttgttctgtcagccatgtgtcataacagtgcaaaggagcacagttatccctctcacagtaaagcacatggatggcttaattctagaacattctacagaagaacattacacttcttttcctcccccattgcacccttgtgtacatttaccatggccagctgttcaaaaggagaaaatccacttcatagtgctttgtgagtgcttttaatctcagaacatttaaaaatatactgtgcccaaagtaaggtaggcaagcaataaatctgttgacttactgagtgtgaaataagtgactggcctctgtgctcctggtaggtaagacagacagacagacagacaggcaaataaacagaaaacccaaactcaacaaactattatttgagttgcctgactcaaaactcttgggtagcctatctggaagtgcttttctttcttggggtagaagaatttatttctcttcagataagtagattcatagagaggaatggcctatggtggatgcaggttgaaagggacaggatcagtccatgaaacagaaaattaatttgcccattagagttgatgtgggtataactctggggacatagtttcaatctctttcaggattattaggataagaagcacccttcctattacctaatgaggtcctgcctgttgggagacccataaacctcttgcatctgtagagtggtgtggaatcaggttctgatggcaagcctaactctacggtctctgtgagtgggtatgaaagtctatctggttgtttatgggctgtgtgtgttaacagatgagtctgcacacagatgccttcaacccatgtcagactggatgaggccaaggggagctgaagcgagctaagccagcctaagctccggagcaggctctagaaactatgctgtgagttcctcttttaagctgaatggttgagtagctgtgctaatgtcctcatcagggaagaattgctgctgccaggttgctgacaggataggtttttgcacatgacttttgtagcctgagattataacatcatttcaccttaagattcattttggaaaaaatgattgtctaagctgtactttttttctcgagacccttgatgttaactccttgtgttcccctcttccaaaattgtcagctaacaagacggtggcaatggtgtcagtgtgttatttgcatcccaacttaacttcttacccaagttatttctttagttatgaggagagttgtcacatctgactccaaaatttgagagtatttctcattacaagtcctactctgtttgtcacaggaaagaatcctgtttataaattgccccctccccctccctccttccccactctgggggggtatggggtggatttcaggtcatctaggctgattatgaacttctgatcctcctccctccacctctaaaactctgaggttacaagtgtacaccactgcaccctgctttatttggctctggaggtgaaaccagggctttgtgcatgcttggactacatcctaccaactgggccacctgctgagctccatgcttagccctgtctgccatcttacatagttactctaggtgtaatccccgaagtaaaagaagagactggttcccagtttccatctctgcctatagcagatcctctgtcacatggctccatacccaaataaagccgggagagagcgagcctcccaggagcatggacaggcctgtgtgagcaggtaggaccaccactgcttctcagagaaacctgcctggaaccctcaggacacaggaaccgaggggcagcctggaacaggagcctttaggtttccatctctgcctgtagctgatcctatgccacagagatgcatacaaaaataccaccaggagagagctggtctcccagagtgtctacatacctgcgaacccaggtaaggccaccacttctcttcaagttgctggcccaagaaggacactcacagagccaccaggacacaggaaccaaggatcacctagggacaggatccttctggcctctatcttcaccccagagctgactggatactacaactctccatacccaaattcttcctagagagaacaggtatgctgggagtactgacacacaggcttgaaggatggacaagtcaaagtcagagacagcaagaccagctaataccagagataaccagatggcaaaaggcaagcacaagaacataagcaacagaaaccaaggctacttggcatcatcagaacccagttctcctaccatggtgaaccctggttaccccaacacaccagaaaagcaaaatgcaaaaagctcctaatccaaaacatccaggaaatccaggacacaatgagaaaaccaaatgtaaggatagtaggtataaaagagagtgacgattcccaacttaaagggccagtaaatatcttcaacaaaattatagaagaaaacttctctaacctaaagaaagagatgcccatgaacatacaagaagcatacagaactccaaagagattggaccagagaagaaactcccctgtcacataataatcaaaacaccaagcacacaaaacaaagaaagaatattaaaagcagtaagggaaaaagatcaagtaacatataaaggcagacctatcagaattacaccagacttctcaacagagactatgaaagctagaagatcctgggggaatctctctctctctctctctctctctctctctctctctctctcgctcgctcgctcgctcttgctcttgctcttgctctttgtttgttttttttttttgagacagggtttctctgtgtaaccctggctgtcctggaactcactctgtagaccaggctggcctcaaactcagaaatccacctgcctctgactcccaagttctgggattaaaggtgtgcaccatcactgcctggcacctgggggggatctcatacaaaccctaagagaacacaaatgccagcccagaatactatacccagcaaaactcttaattaccatacatggagaaaccaagatattccatgacaaaaccaaatttacacactatcattccacaaatcaagtcatacaaaggataatagatggaaaacaccaacacaggagggaaactacaccttagaaaaagcaagaaagtaatctttccagaaatccaatagaagataaccacgcaaacataaaaataacaccaataatgacagggagtagccaatctaatatcagataaaattgactttcaaacaaaagtcacaaaaagataagaaaggatacttcatactcatcaaaggaaagaatctgccaagaagaactcttgattctgaacatctatgctccaaatgcaagagcacccagaattctcaactgaggaatactggagggctgagaagcacctaaagaaatgttcaacatccttaatcatcagggaaatgcaaatcaaaacaacccacttcaacagttccacttcacaccagtcaggatcgctaagattaaaaattcaggtgacagcagatgctggtgaggatgtggagaaagaggaacactcctccattgctggtgggattgcaagcttgtacaaccactctggacgtcagtctggtggttcctcagaaaattggacatagtactaccggaggatccagcaattcctctcctgggcatatacccagaagatgtttcaactggtaataaggacacatgctccactatgttcatagcagccttatttataatagccagaagctggaaagaatccagatgcccctcaacagaggaatggatacagaaaatgtggtacatttacacaatggagtactacttagctattaaaaacgatgaattcatgaaattcttaggcaagtggatggagctagaaaatatcatcctgagtaagataacccaatcacaaaaggacacacatgatatgcactcaccgataagcagatattaacccagaagcttggaatacccaagataaaattcatggaccacatgaaactcaagaagacagaagactaaagtatggatacttcagtccttcttagaagagagaacaaaatgcccatgggaggagttacagagacaaagtgtggagcagagactaaaggaaaggccaaccagatactgcctcatctggggatccagcccatatacagtcatcaaacccagacactattgtgggtgccaacaggtgcttcctgaaaggagccttatatagctgtctcctgaggggctttaccagtacctgataaatacagaggtgaatgctctcagtcaaccattggactgactgagcacagggtccccataggaggagctagagaaaggacccaaggagctgaaggggtttgcaaccctataggaggaacaacaagatgaactaaccagtacctctatagctcccagggactaaaccactaaccaaagagtacacatggagggacccatggctccagctgcatatgtagcagaggatggccttgttggtcatcaatgggaggagaggaccctggtcctgtgaaggctctatgccccagtgtaggggaatgccagggccaggaagcaggagttggtgggttggtgagcaggggtagggggatgggatagggaggttttggaggggaaactgggaaaggggataatgtttgaaatgtaaataaaaaatatctaataaaaaaagaaatatatgtattcagttgcattgaataaaacttgaaacaagagagagagagagagagagagagaacgagctaaagtgttaactcagtctctttcccccagaggttagaaatactcctgacaaatccaattcagcaacattccaatccgttcctctcagctgtcataatttcaccccaatttatccatgaaaactccagagaagctccttaattaatcctgtgcactaaggacgccgagcaatgccaagtgagttagtgatctaagtttattgctttaagcatctcctagatccaaactgtagaaattcttgctagtgccagcatccagctcttcaaagtctttgacttctccttccacaggacttttctgaaatgccgggagtgagtgtgcgggtcacaggatgagcaggggcgccaaacgatacctaggtgacatttttctcttagatagctgtccagaaacattctcgttcaccttatggaacaggtgaggagggtcaggggaagccagcttcagagagagttgggatgacatttctgctgtggacatgctctgaaggtgaaagggccttacagctctgtgccaggtactgccgtttgatggcccacatgttacgaatactaacttaccctgtcgtagaagaatttggtcttctaaggattttttttttttgaaagtgaagaagacaagtttaattcatctatttttccctgatgcattttaatttaattatattgttatagttctgtgataagtctaaatatacctggtagtagagataaggaaactaagtagtggcaaaggaaagatttgaactcaggtctgttcgtctctgaggactgcttcatcaccattggaccatggtgcctctgggtagttgaacgcactgttcataaaatggaatgttatcaatgaagttctttgtgttctccttgacatcacttgtatctgtaactcacattctccttggattgttacagccattattactcatcagggagagatatatgtccttgagtttcttaagtacaagcacttgtctggtctcttctagcagaggacaagtctcagtcaatatttcagcataatggacacagtgtcactaagacacaaggcccgtgcattgctaaggaatagtttttgttccaaggtaatatcaagtgtgaggctctgctctcaatcttcagtagctggcttctgtttgaggacatcaattcttgactgttgagtgcaccaagcacagaattctttctgcaggcccagggaaaaaccacagctcaaagtccagtgctgagaatgtgccagtatgtagggctcctcacagaggcatgggaagcaggattgtcccacactgcccaggtccctgtacccactcttcaaccatcattttttcatttctggactttgatgttttaagattatttcccaagccttgtgccttgtgacatttggcattgttttagctggtatgatctgtgtggtggttgaataaaaatggcctccataggcccatagggaatggtactataagtggccttgttggagggagtatgtcgctgggtgggctttgaggttttaaatgctcaagccaggcccagtggctctcttccagctgtcctgccaattgactgtagacctctcagctccctctctagcaccatgtctgcctgcatgctgtgatgcttccctccatgacaataacggactaaacctctaaaactgtaagccagccccaatgaaatgttttcctttataagtattgctgtggtcatggtgtctcttcacagcaataggacaccaactaagatggtctgtgagaagtttctttttctcttttattcacaagcagggaagcttgacataagaatggagagggaaaagagcgaatgtttgctagaaagaatttgctatatttagatgaacagcctgttttcaaagcagatgagtcccaggagacagtgtgctcattgattactttcttttcatttgctattgttgaatacaatgctgctatgctataatctgcatgagtgtaatagcgacccaagaccggcagaattaggtctctgtgttcacagaaatatccaggagggaatatggaagtttttacgagtttcttacacgtatgcatgtgtacacataggtatgcatgtatgtaaaggttgaagagcaaacttacatgtcttattcaggtgttgttcatcatgtggtttgaggaaggatatctcattggtcttgggcttgccaagtagcggtaggctggcctgagagcaagccccaagatctggctgtctctgccttccgagtgctgggattaccagcacttgacaccacacttggctttttatgatggtgctgcagattgaactcaggtcttcccagctgtgtggcaaacacttcgccacagggactgaggtatctactcagtccctgctccgagtttagattgtagttctacctacgtctgacaggttaaccatcagactgctggaaaccctggttgctgggggtactttagaagactcagccatgttgcttgcatgcccacttccatggctagctggtgccatactcatgacagtaacttcactgcctgcagccacagtggacatctgccatcaggtggggaagccagcccagggcacttgccatggatacatgaggtaggatttgagataggaaactacacagctgtgaaaaagcatcggggtcaagggaggtcatggtgacctggagagaaatgctcttcgggcaacagtttttgataccaagaaaggtttcaaggctcaagcacaagactaagcaactgtcctgttggtacagctttggggtaacttggatgtgaattgttatcagctcagtgattgtcagtggcttaagttctctcatgtgctgccttctcactcagcaaaatgaagatagtattttccttatgggcctgtgaggattggatggattggcatagagaaccttgacagctgtgcttgatgtttcgacaaatcgtgcgtcagtgtttttattgttgtttgtttttgtatgtgtgtgtatctgtgtgtgtatgtatgtgtgtatctgtgtgtgtatgtatgtgtgtttatgtgtatgtgtgtgtttatgtgtgtgtgtgtgtttatgtgtgtgtatatgtgtgtgttgcatcatatgggtgtgtggaggcctttctgaaacagggccttgcactgaaccaggaagtatgccattttgactaggctgggtgttagtgactcctggcatccacttgtttctgccccacccccctattctggggggggggggtcacaggcatgcccaactttttatgtgggttcttggatcaaacttagctcctcacatttggacagagagcacgcttacccatcaagccttcctcccctgtccactatcccactgattttgtctgacttcctgatacagggtctaatacatcccatgctatcctccagttcaggaggtgtcaggagacaacctggaacttgtgataccctgtctctgctgttataaccattacaggcctacatcactgcttttcggttcagctgtgttaaggatcactcccagggtttcatgcatgcttggaaggcatttcaccacctaagttacacctccagctcttgcaattgcccaagaagcaacatgctaagtgtttttttttttaaatcaaaatccaacaacattatgaaatatattctattggtatctttatggttgtggaaactgaggcacagaaatcttagttaacacctccatgatcatttagctagtagttggtcgaattggcatgtaaactaggtttttctggctctggaatctgcttgttgctcacagtctattacttactgcctctgtgctgacctgtattagcatgagaaaatcaaagggagagcaggagagcccaggactagagagagggcagcttaaaacagagtggggcccaatcacatgtctggggaaggctggtagtgctgatgtctccccatcttggaatacactagatcttttcaaagattcctgctctgacaccggctgaagtgaggctctgtcccaggtcctatgacaaaggagacatagggaagatagtcacagtggatatcaactcttattctgtcttgatggcttgccaaagtacttgtgcccatgggaacagaattgtttgatctggtcatcactgtccattgaatactacaacacgcagtaagccctcctaaaatactcagtgggtgaatgtggcgaaaccaggaagcattaaaagaatgtaaaatagtattactttttaaaaaatgtttgctactttgtttgtttatttattgtgtgtgtgtatgttgtttatttgtgtgtgtgagtgtgtgtctgtactcagcacagtacctgtatggaagacaactttcaggagtcatttttcccctctgactatgagagtcctggtagtcaggccaggcaataggaacctttatgactgaactgtctccctggctgtcactactttcttctaagactgacatgaatttttttctagagatttctgacatatcagtttatttaatctcagaaaaggaacttcaacaaaaagatgatgtcatagtcatgaagtgagcccctccccccaatttgtgctatttgacagctaatgaagatacatttctcattctacattcctgttaacaaattttatcagacactatgcataacaacaaaacagccattatagcctcatttaaggtgaaatagcatgtcattaacttgctgcattaaatgtattttctcctaaacatagtaatctcaaagagattacagtctccctccatctcagtcagtagttaaaataagatttaatgtccatcactaaagaaaatgattgcaatgaatatgaccttctagagtgtcagaagcatacacatggtgatgtaaaatctgttaatggtattgcaagaatccccagaaatagatgtttcataaccaaacgttctcatcgaacaatactgctgcttttcttttggaaaatgtgtagcaatagcagcggtcgatacagttcaacacttctttggctttcctttgatcagcgtgcatcaaatgcttaaaatttaatgcctgagcttataacaccatgagctccaaagacagaagtaaatgaaaagccaacctttcaggctgcaccctcacacaagctttgcacttgcatttcctgccctcaggtgactaaatccgttagctttgagaacatagtcagaggaactttgctaggacgaggaatagagatcggaaagtgtcactaatagagagaactataggaaccaggggctttctctgactaagcctgtgtgtgcctgcggaattttgccaacagcaagagcacaggattcacattgcttccaggagcacctaagggcctgtgtttgctttttcctgggataaatgagggaggatgctaagctgctaggagcacctataaccttgggaggtagacattgctttaaggggtggtgccagggtgaaggtgagagatgggcacagttccgatatctgctgtggccacgagaagttactcctgtgttttaattttctcattgctgtgacaaaatgcctgacaaagccaccagaggatttattttggctcatagtttgaggctgtcttcatcatggtaagaaagacaccgttagcaggagcctgaggcagctggtcatattgcatccacagctaggaagcagggagagatgagtgcaggcacttgacctgctgtctgtcacttttgtgcttactcagtccatgggatacttaattagatcattctggagacttcccaaaggtttgtctccatgtagattctaaatcccattaagatcacagtcaaaggccttgtaatttttttgtcttgaaagtccaagtattgagttcatgtccgtaacatctagagttgactcattttagtgtacttgaaatatgtatagaaactactctctagagagttggagccaaggggactattgtcacagcctttctgtgtgctgtgtgtggaggcacagtggtctacggtagacatcctttcctttgccttctagggatctcactcactgtagtactcagcttagccctagaccattccctaaacgacgtgtcttactttgtcctggactctacccacatttctgttacacagcctaagtaacttagtcccaacctccagcatccccctaccagggtaggattggatacctattggccaacatgtaccatagcacagtggtgggaaggaagccccacaccatattgaaacaatattctagtgtgtgtgaggccagcaattctacaccatgttagggatcacctgtccccaaccatatgctggcactgtctctgcaggcatcactttgggtttttttccttgatagcccctgtttactgagctgacaagtgccccagctgactgcctcataacagtgcagggaggatgcagatgagcctcgatttcaacagaggagatgttaattattccagggacagacttgcctgagtggggccttattgttttctgttttggttccagtcttacagaatccaaacaaaagacattcagaattttgcttaagctttcagtttgaaaaaaaaaaaaaaagaaagtcatccttcccttgggtcctctaagtgtgtaagaggtcaaatgacaatcaagcttgtagagtggctaacaccactagagttatttattattgcatagccgctgcttatatatacacagtcagcatcagagtaggggagttatgacgcaggactggggtgtgcacaggtgagataggctggatgcagatttctgtcttgctggagacaatgccgcatgttccagtggagattttctgagtgtgagatgcgtttgactttttgtgaatgaatgtccctgatttccctacccattcaccacagagcggttttaatggctttactccatgaaatacgtgctgacggggaaatcgcctttacaagatgcttgtgacttctgattcgatcgtttctttgtgaaatgtatttttatgaaggatattaacagttggttagattccctccacctgcccgctgtggtcataaatcagggcatctacagtagttaagaaagatggatttgttaaaatttgctattattcttctgtaatgaggatcttaagcactggatgggtgctgattagttacccattaattaaaaagtcgagtagctctataattaataggcaactccacacctatcttgtgagctttgcactgatgtagttggaatttattccaggaggatttaaatagcttgtaaggcaagtttgtttccccaccatgtaacaactggtggtgcacagtatgccatcaccctgagcccaggatctgccccaggtggtggggctacatcctgtgttttccaagctgagggataggtcagagtctgagtcccatgatgacagtggaaactccttgaagacaagggctttccatttttctctcagtccagaagagaaagggatgcagagaaaggggtcttcttgggaaaggcagagggaaaggcttattaggaacgagccacacacagttattgggagaaagtaaaggaggcctgataggatggagactaaaggcctgagagaaacagtttaaaaatcaatgtgacaagacacacatgggatgtccccacttcctcacaaaagaagtaaatatttgctaagtttccagtcttctaggtattctacccaggctgcacacattgctttttagcatagccctttgagtgcatatattcattctgtaaatgagggaaagagactggattaaatatccagcaggattcacattcccacctacaatgaaggggaagttcaagagcaggtgcttagctgatgctgtaaccttgactgtagactcaaagacaagttgatccattcaacatatagacctgctatgttccgaggcagtatgatttctcctactatcttttctttgcatttcatgttttacccagtccatcagcttctgagtcttgtcttattaagttcttgtagacccattgcttgtgaaagatgaatgatttgtatctcaggtctgttgttcagaaaattaaattttcttgttcctttgaacctgtgatttttcacctgtaaaacggagcttagtcagcatccacaactcctgatgttgagtgtggcaaaagagatgatggatgcattagcactatggtagacattcacgatggcaggctctcaacacccatgttcaaaggtccattgtctagcagtaagggaatcagatgctgcatttgtatctaatactacacaccacacacacacacacacacacacacacacacacacacacacctcacaactaaacaaccttgggatggttacttttaatagttaacttgacctaaccgagaatcacctgtgaagagtcttcatgagaaattgtctagatcagtttggcgggggactgtcttgattgagttagttgatgtggtgtccactgtgggtggtaacctttcttaggtttggtgtctggattgaatgaggagacagaaacaagctaagtaccaactccttatgctctcagactctcgatgcattgagaacagttagctcaggcttttgccaatgaccttctccactatgataaactgtgcctttgtcagggtgttttgtcacagcaagagtaaaagtaacatgtgtccttgttatatgttggagcatcttttgggtatatgcccaggagtggtataactggggcctcaggtagaactatttcccattttctgaggaacagccagactgatttccagagtggttgtatcagtttgcaatcccatcagcaatggaggagtgttcctctttctccacatcctcgacagtatctgctgtcacctgagtttttgatcttagccattttgactggtgtgaggtggaatttcagggttgttttgaaaacaaggacacatgctccactaagtttatagcagccttatttataatagtcagaagctgaaaacaatccagatgtttctcaacagtggaatggatacagaaaatgtggtacacacagctattaaaatatgacttcatgaaatttgaaggcagatggatggaactagaaattatcattcttagtaaggtaacccagtaacaaaagaaaacacatggtgtgtactcactgataactgtatattaggcaaaaagcttggaatacacacgatacaactcacagaccatataaagttcaagaagaaggaagaccaaaatgtggatgcttcagttctacttagaagggggaacaatataatcctaggaggtagagggaggaaggggcctgggagggagagaggagggggagggaaaggggaacaggatcaggtataggggaagacaggggagaagtacagagggtaaggaaatttaacagagggatgaggcagtgggggatgggaaactgtgggtggccactagaaagtcccagatgccaatgaagcaagaggttcccaggacccaatggggaggacattagctgaaatacccaacaaaggggagatagaacttgtagagaccatatccagtgattaggcatggcccccaattgaaggatggggctacccacccatctcagaatattaactcagaattgttccggtctaaagaaaatgcagggacagagagtggaggagagactgaaggaaaaaccatccagagactgccctacctggggatccatcgcatatgcagacattaacccagacactattacagatgccaagaagctcttgctgacaggagcctggtatagctatcccctgagagggtctatcagagcctgagcagtacagatatagattcttgcagccaaccattagactgagcacggggaccccaatggaggagctagagaaaggactgaaggagctgaagggggttgcaaccccataggaagaacaacaatatcaaccagggacatttgaaacgtaaataaataaaataaccaatgaaaaagagtaaaagtaactatgacaatgacatatggtggataatgaagaaactcttgaggatggcttactggctgggcatctaaggctgtgctttgcatagcacatctaggattttcaagggagaaaaggagagggaggaagaagaaacagagttgatgatagtagtattggaggaggggaatcgggagggaaagaaggaggtttattaacaatgaaaccagaaagtttaatacaaagcatgaatttttgcattctcttagaaagtgacaaaacctattaataactggttgatgtcccacatccatgtggactgagccatttatgtgagatctagctgcatcatcaggctggctgcatagtctgcttcccctaactgttacccatgggtcatatcatcgttactatcatcttctttgcctctggtttggaccagttttgtgtcatctccagtgtgctattggacttgagtggctctttatgctatctgcctgccccttgagcacttgtgcccatgaactcttgctaagggcatcttcttccttttgcctatgttctaataatagcacactgtttctggaggtcaggaagatttagcgtttccaccttcagaaataatgttcagtcatcatccagaatgcaagggaagggtaacatcctgttaagttatctgccctctggagagcttccactggccttgctaatttgctggaaaatttggtgagacccaggctgttgaactagataattcatttgcctttgaggaattcctttagctctgcaatggggaaaagaatctggagtttttccccagaggaaaattctttggaacacttaaacaacacaataaattcttatctctgaggctgtgtgaccatgaagttgcttctgcagtgctttttgtttttgccacagagttctttgcttcaatgtgtcacctggggtaagtaggtgttataattctagatttaccagtgacagtcccgccaagaggttcagagacagcacctatgatggttaatcttaattgttagtttggctggatttaaagtcaccgtcgaaacacatttccaggcaggtctgtgagggcttacttagattaggttaattgagaaggtaagacccatcctaaatgtgggtaccgttttgcagactaggatattggactgaatgaaaaggagatatcgcggtgagtataagcacccatctttctctgctgtctgactgtggatacaacgtgaccagctcctaccaccatagctttctgccatgatggatggcatccttgaactgtgagttgaaataaaacatttccttctctaacttgcttttcccaggacttttggtgcagcaatgagaaaagtaagtactaaagtccctgaagtcacattgagtcacacggcctgtggcctgagaggtgacactgacctgctcactctgatgtccctgctcatgttccttctgtctctccccaccacacactgtttccttgttatctaactaaagacattgttttaatctaagccctccctcccctcatcatctacaatgggcaattggaaattatacatcttaattaaaactactgtcttgccatggaatttcacttcctacacattgggaaagaatgaaagtcagtaaatattagttgcaaggacgttgtggaccaatttgatccctgaattcatggcacttacatggagaagaggaagaacagactctaatcaagtaattcagggtaatgtgattactagctgttgctgggttcaggacagaggaagtctctgtgcttaggcattcatattccatggatgaattgagagcacagtgaagccttgggaagaatggaaattgagggacattttgggggtgagctagaaatctagagcaatggaaactcccaagaatctagctaagattctgagtaaggagggatatggagcttgaactgtctgtctcctgtgtccaggagatactttcagaggagagattcgtacatcaacccagccacaaaatctttgacctagaatttgttctgcctttacgatgtgctgcagaaaaggtggtgcaggacttgtaggattgaccaaccaatgactggtccagtttaagacccatgcaagaaagggacattgcctggagggccaggaaccagaggctcctaggatagaactaaacatgactggccaaaaaaagtgaatgaaatgattcctaaagatactctggtatacttgtagactagagcctagcataattgccatcagtgaggcttcatccagcaactgatggaaacagatgcagagacccacagccaaacattaggtggagctcaggaagatagaggggaaggattgtaggagccagatgggtcaaggacaccacaagaaaacccacagaatcaactaacctggggtcaaaggggctcacagtgttggaaccaacaatcagggagcttgcctgggtctaacctaagctgtctgaacatatgttatggtagtgtagcatggtcttcttgtgggactcctaacagtaggagtaggggctgtctctgactcttttgccttcttttggggcccttgtcctcatactgggttgcttcatccaaccttaatatgaggagatatacctattcttattgcaatctgttatgccatgtttggttgctagtcccaggaggcctagtctttactgaagggaaactgaggaggagtggatctggagagcctcctgtctcactttcttgagcactgagatcacacacctaaacctctgtctagtttcaagaaatatttctatcagcacataaacttgagaagttatcactaatgacatcagctgatgcatatacagtattgcacagccttcctctatgtgaatatcttgagttttcttgacagaagtcattacaactgggctctactttgtaggatttgattcgaatcctgaataatgcagtcacctccaagatgacttcctgatatcagtttatattttacatgcaccagatcaagccttcacgtatacctccattagtgtctttttctttttaaattaaatatacaggtggactccagaaaatcaaataaccccattaaaaatggggctcagagctaaacaaagaattctcacttgaagaataccgaatgctgagaagcacctgaaaaaatgttcaacatccttaatcatcggggaaatgcaaatcaaaacaactctgagattccacctcacaccagtcagaatggctaagatcaaaaattcaggtgacagcagatgttggcgaggatgtggagaaagaagaacacgcctccattgttggtgggattgcaagcttgtacaaccactctggaaatcagtctggtggttcctcagaaaattggacatagtactaccggaggatcccgcaatacctctcctgggcatatatccagaagatgttccaactagtaagaaggacacatgctccactatgttcatagcagccttatttataatagccagaagctggaaagaacccagatgcccttcaacagaggaatggatacagaaaatgtggtacatttacacaatggagtactactcagctattaaaaagaatgaatttatgaaattcctaggcaaacagatggacctggagggcatcatcctgagtaaggtaacccaatcacaaaagaactcaaatgatatgtactcactgataagtggataagcccagaaacttagaatacccaagatataagatacaatttgcgaaatacatgaaactcaagaagaaagaagaccaaagtgtggacactttgtcccttcttagaattgggaacaaaacacccatggaaggagttacaggaacacagtttggagctgagacaaaaggatggaccacctagagactgccatatccagggatccatcccataatcagcttctaaacgctgacaccattgcatacactagcaagattttgctgaaaggacccagatatagctgtctcttgtgagactatgccggggcctagcagacacagaagtggatgcccacggtcagctattggatggatcacagggcctccaacggaggagctaaagaaagtacccaaggagctaaaggggtctgcaaccctataggtggaacaacaatatgaactacccagtaccctccagagctcgtgtctctagctgcatatgtatcagaagatggcctagttgtccatcagtggaaagagaggcccattggtcgtgcaaactttatctgtctcagtacaggggaacgccagggccaaggagtgggagtgggtgggtgggggagcaggtgggggacttttgggatagctttgaaaatgtaaatgaaataaatacctaataaaaaaattttaaaaattaaatatacatataaattttataaaaatatatgtatatatgtgtgtatatatatatatgtatatatatgcatatatacatatatatgtatatatatatgtgtatatatatatgtatatatatatatatgtctactttcaccacttatggggaagtttttaagggcagagagtatgttgtgtcacaggtgtctggcacatacttaacacatgctgttgattcaacaaaccactgagtgaatacttgacattgtaaacaagtttacatctgtacattcaggttcctagattcacctttgatctccttttcactgatgaagagtactgtaacactccctgaaaagtgacgaggaagaggtttgggtagtaaactaaccctccttataactgtacttgttaaaatgtgaggaaagcctgtttaatcctctgaatgcctatctagaaccgttcagtgcctgctttgggggggggggggtcaacattgactttgctgaaaggcatcacagccatgtttagctgtggcatttgggagacaaattccaggtctcagttatccttccacatttgctgttctttgacggggctgggcgatgttctttatctacacacaccttggattgctacctggccagagctggttccaagtgttcggtatctatgattcatttaaaacatttagcattcttgttatgtctgtgaggaaaatacttggttagcattattcctttctctgacttctcagcttcttttggtggcaggtgtttgtgtgattttggcatctgtctcccgtgaggctcatttccaggcatctctggagccagtgctcattctgaatgtcatccagttccatccgtcaacctgcttaccgcgtgggcagaggtgaatgggcctctggcgtcctgtcaggtgttgcagtagctcctggagcctgtgctggacattcctatttagctgcaggaaggcaacattcagaaaatagagtacagactgctcttgggggaagaatctaaggaggctctagcaggcatgaaggcaggaaacatggtctggcaaaacaactgcagagtagaaccaagactttctgagttcaaatcaccactcaccataagctggtggtcacacagctcatttactaacacattagaaaagctatgcttgaatttatctattgtcttgttttgtatgcatttgtatgtatgtatatatgtgtgtatgtatatatgtatgcatgcatgtatgtatgtatgtctgtatgagaaagccaaaggacaaccttgagtgctgtttcttgggagccagccaccctattctttgagacagggtttctcactgactgggggttactgatttcattagattggctggccagcgagccctaggctttgtctgtctccctctctcggcgctgggattatggacacaagccattgctcctgactttcaatgcaggttttaggaattaaactgaggacctaatttttgcaaggcaatctctttacagattctgcattctggcagtatgtactgtttatttgttttcaattgatgactaacaactgcatgtttggaggagtataattccatgtgttgacatcatagaaagagccagccaaatggatatactcatcaccacatcaatttatctttccccaaatagtgagaatgttaaaaaatattttatcaaatttgaaatatatatcttatgaaaactgttgttaccactaaaagattatcttttagtctggcgccctagccaaagctctgggccctttgactaatatcatcttttgtcctctctcttcccctgaagtctaggtatctatttagtaacatcaccaaatcctcttatgtggtacaacagagaggtttctgtctaattaagcatattggttaattgggagttattttctttgccacacttgaatatagtttcaagtaagtgtgcagttctggagaaggctgagggcctattagaggagcctgtgcctttctctgccacaatatggcctgattctggcaaggcctcttattcttcaagtctcagaggtgtcacgaacactcaaagggtgtgtgacatgggcctgggtatagcaaacatgaaacacatggaaaatatgatctgtcctcagcatgtgacgagtacagctgagccaccctgagtagtggttacctctgaacttgtggtcttgggtcaagggcctttctctgccctttgtgctgcttttgtagaagctcccgtgctttgttggcttaagggggttttgtttttgttgtcgttgggggcttgttttgtactttggtggactgtagattgaacccaggtccccaagcatgctaggcaagtacagtactgctaagccatttccccagcctgggtttgttaatttcttttaatgtttatttttatctacccttatgcattccctttcttttcccttaatctctccattaaaaaaagtatctttgcattgctctaccactcagcccttggcccgaaatcttccttttcagcaacttagtacttgtctctcttactccaatagcatctcctttaacctggaagctcttagcttgtattttgcaccctgtctgtttctgacttttgaattgtaataatagttgcaaaaccacctcatttcaaattgttttatatattgagggatgacatgacccagtgccaagttcagcatgccgtgtgtatgatgcacagtggagacaatgttcagaaatagatttccctctgcttaggtatgtaccagtttaggtctaccatagtcagatttgggaaatgctcttagaaaggtcaagttgttttatggtgaatcatgaggaccctggaacttgaactcatactaacacaacctcctaaactcttctcttagtctcaaggcaagccagtctcacatttgctcacacccaagcagtgtagacttaaagagacaaaccagtgtcattttcatctagacagcaacttgacctgagactttggtccttcggttgttacaacctttggttcttggtgtctcctcctacctagtttatagagcttatgtttgtttaagagctgcgatccagggtgtcccatgggccctttcagctctgaacatcgttctggactgcccaggtgtggactgctcacttctctctcatggctttccaccacttgtccattttataatatagcaaagtgccttcctaccttctttgagatggtgtgtagacagacactaaagcttgccacaagtagtggactaccatcctatctcagcacactgtttaatgaggtgttagagcagccaagaaggtgaatttgacccactactctttgacatagagacaaagcatgaagggagtactggattgacgatgggctaagtatagcaagttctttggaagtgaaatatcttaacttctgtacaaaacctgggactctcaggcactttggctatcaaagtttgagaggatctgtggaaggcattaaaaatgataacaagtgctccttcatagtctttagaagttagtatgccatgaccagatgactgataccatcgtcacactaaacttagagggtgcttgtagtagataaagattagaatgaaggattattgcagaatctgttcccagaacaggaacctaaggaataaaacctaaaacgtagctgtgttatttatctgtcatttgagcacaagtaaaggccctgggcaaggaattgcatttaaaaaagatgaggccagtgaggattaattctcatagagatatccagaggttcattaaggcaagaaattctgagcacataccaggctccaggctcatccctaagagtcacagcgatgtcagtggaaatcaaggtcttttctgttaagcatgttttactttagtgaaaagagactgaggaaacacaagaatcaataagagagtcagtctttaggatgcatgagtgctttctctggatctaaacatctgtggatcaaaaatatttggaaagacaatcacatctgtgtagaatatatagtgttctttgccattgttgtctaattctatatgataagtgtttacatcatgcttacatgtattggtgatttcaggttgctagaggcaagttctggctggttttggttctatacacacctcttttgctattttatatcagtgactgtgttctggaaaccctcaggcaaggcacacataaatataataccactttatttcttctgtctctattgaagtccctcattccagattgccctgcctcgttgctgggaggaagggatgctcttgagagctcaagacggacctgagcagatgggtctttccaggctgccctctcagtctgttcatgacaccagtgccctccacacatctatttctacatggttgggtagtcttccttgatcccaagcacgaaaatgcagaatcttccagatgtttgtgctttaatttctgagggcttctgcatcgtgaaaatttaattaaatttattaaattcattaattaaatatatttaaaataaattaaataaaccaatcgaagctttctcttgctaagctattttttcgttgttggagtattgtctacccacttacaacagacagaaaaatgtgtggcatcctgtctctcctgtgttataatacccacataacaaagttcctaaagtgcttcaaggtggcaacactccaaatctgtcattcttgcttgactgaggtgcagaaataattctacagagaggaacttttccttatcatggttttctataattctgaggacgagtcacgtggaagtggcagaatttatagtgagcttagtgacgtctcaatgctgccagaagcattctggctaaaagactcctgtttggctctgaattagtaccatcttttaataaatgaattaaaaaagcatgtttattattttatatttatcacaggttttctgttgctaagaggacatacttttctattttggtcacagagctcttaagtatctgaggtagtgtctgacacataactgccatttagatacctggtgggagaatgcagggcagtcagaacagaagggtatggctggctttagcgtatgtggtgagggacagcccatctgcaggtagggctgaaagaagagtgacaaagagatgtcaaccacttggtgggttgcagagaaaaccaacaaagtccaggcagatgtgacacaaggttctattgcaggaacaagcttggcttttgaagatggaagaaaggagccattggcaagggcagatgtcacatcagcagggtggatgtttcctaagcactcatgaagagttggtcttttcatgtttggtgagtagaaatagacaagtcttaggtaggagaagccttgatttgatttacatttgaagaaagagcattccaaatgctattgaagaaatgcctttatggaaaccgggaagacaaattaggaaattcctggaatagctgcggttgaatgaggagatgtttgtgtatgtagtgatgataaatagagttaaaaggggaaaatatacagatgttttctgccttaattgctaccagtgcctggcaactctcttttctcaaactaatttatattttaatttatgtgtgtctctgcatgtgcaccatgtacatgtgggtgtccagaggagagtagaatgtcagaacccctgaagctggagttatgggcagccatggagccatctaatgtggttgctggaaaccaaagtcgggtgctcagccagcatatgctgttaaccatgagcagttgcctctgcctcctaattcttattataagcacctgtatcacgggcaaggcatgcaactggggatgtgaagctcatatgataacatcaaggtgaagctcatgtgataacatcaaggcacagggctctacagcaacacacaaccaatggccattattgttgtgtaccatgtaagtttggttgggaatctggtttccctgtggcaggtggtggatgtcacactgtgaactgatgtcactctgattatgctgtggtcttagttgttgctatgagattccatagaagtctccttttcattttgctgagataatggccatgttgtcagcctcagcatcccaatcagtggctatactgaaaagattcctgtcagctatcaatagagggtatgtgggggacaggagggatcgtgcctatttattctaagcctctgagaaagttggggttttgtgtgtgtgtgtgtgtgtgtgtgtgtgtgtgtgtgtgcagtataatctaatgtggtatgatggacaaatgtcttgaggcaaaagtgtgcagtcagaaaagtaatccatcttccgggaaatctttgggaatggccaccacgacgctttcatctcagctgtctgtttgactggatgcagaatcccctaggaagccactgctaggagtgtttccagagaggttccctgaggaaggaaggctcagtctgagtgtagctggcactgttcctttgtatgtctcttcctctgcttcctggtccacacagatgggctttcccactgttgcggttgggagccgctcctgcctttcccagccttgaaggactgtattctcaaaccattgagatatggaaactgttcctcccttaatttgcttattgtctggtatggttcccggcagtaagaaaagtcactaatataactaccgtgcaaagaaaacctcccaatctgcttaaatatagctaagaagccaagcagaagcaaggtgtgaaatatacctggaaatagaatacaaacccagcccttctccaatatttcttaggaaaacgctttccagaggcacctttgacccagctgacttaagctgagcattgccgtaactgaaaatctcatcccatgaaatatgaaagtcaagatagcatgaagctaaaggaacagtgggaagagataaagatggtgagatcatagattacactggagactttaaaaaaatagaagaaggtacaaaatgaatgaaacacactgttggatgttgggttgctagcagccacagaccctgactctgtcaggcacaatccttttacccatcttcctaatcaatgctctgagatgggagcatgctgattgtacggtacatgaaacagcagaggaaatctggtgagatccagacagcgggatgcattcggctgacttactcattcattagctctgggtacattttagtcagttattccaatagtacaggactgaggaaccattgcttctccatctttcctctatacttgtgctcccttggcaaacttaacgagcacccttttccttttccttgtgcaatggctgcacagagttttccagtgcctggtacctggtaccacggaggtagcttctttgtttaacctatatttattttgggaaaaattatgtcataggccagaataacacacagatctttctctttaagagttatctaggattaaaaaaaaaaaaagacttagctaggaaactccaaacaaaacagctacaacaaagagacttatctgagactagatacgccttaatagaccgaaacatgttcccttggttccctatcctgaggtgagaggcttgagctttcaggaaaatgaagcaagtgcacatgatgacacagggttgcttcctgaggaaatttccagaagtagaagatgttctcagctcaatagtagataaggctcgaggtctgaaatgtacacactcttaatttcaatgtagagtgtggccatagaagacaacctgttttagggacagaactgtagctgtgggtaggggtagagggagcagtgaatgagagagaatgacatttcattctggaatccatctcatggcttttgcctctgggacagacagtgctaacatgattcacaacacagctcagaagcagacatttgtctgatggaaggtgccattgctcgatgttcctgcctagtgttcactgtataaaaataagcaatgccatctcttttctgcaggtgttcccccctctgacttgcccattatatttccccaaatagcctcactgaatcactgcaaaggttttcatggaaccaaatatgtctttcatgtcctctgactcccagatctcaagctctcaatgctgttggggtccaagtctaagtgagtcacttatctttattatgtctgatccgtgcacaaattcattaataaaaactgtagtccagaggctgcttggaatgaaagagcaatattaatatgcaccaccacaatcagagactgtcctggagcctggacatcctgaagagatgactcaataattattatgtgtgatgaatggaggaaatcaagaagccaggttcccacatgaagcctgtacctgctttccaggcaccgtgtgttgcaagaaataggcatggaagcagatggtggcaagatggtgtgaaaagcccatcattagcagtaggtgtggagcagaacaagaactttaaagcatcatctcacccatcctggacgggtggtgttagcttcctattgctgccataagaaattatccatggcttgaaaagtttctaggggttggtcactgttttttttttttcttcttcttattgctctcctcttccacctttaaagtcagcaacattgcatcattatgaccgttcttcctgggtaacattttcatctagccagaaagatgttttccacttaggtgctttatgcaaattatattgggcctaccagattaacacagggtcatctctccagctcaaggtcattgacacaatcagatctgcaaagtaccttctgtgaaatatggtaaaacaatttctgatgtgacgatagaacatggtatctttgggtgcccattgttcagtgtaacacaataaggaagaggaaatgaagaagaacatattaaaaagatgtgacatttgacctaatcctaaagcctaattaacattatcaaggataacaggggaaatggaggaatatagagaaggtattcttggcatataagaatctcatatttgggggaatatgtcttgaggcctgtggacagatttgaaacatattaaaaattagaaatgatttttcctccttggcatttaaaaaggtataccctgttacttcaacaagcagactaagatttgtgctattactaacttattaattactgcttgattagcagcccaaatgagggatgccacttggtattattattcatgggagagttttttgttcaattatcttctttaaaaacagtgattgataaccaagataatttgacaacttggtcacaatagatgtcaagatcaagggaagagaaactggaactggagagagagagagagagagagagagagagagagactccttaattaactgaggtgagagaataattactgacattagtaagagactgagaattgtgagctacactgacacagatctaaagtaatcagaagtggatagttctttcttttctttttgctcacttcaatctaccttcctttctttctccatcttccttttcttcttctttctatctttgttttagagatagtacctcaagtagcccaggctggccttgaactcaccatatagtcaaggaagacctaaactactgatcctcctgtgtctgcttccgcagatctgtgtagatgtgtgccagcacactggttttatgtggtgctggggactgaacccagggcttataaaggaattctaccagctgagcaccagtgccaagtcactcattgtattgtattttctagaaaagtctctctatagtgaaacgtaggagcagtagaggtgctaatggatatccggatgtctgttgtatgacatgacttcttattataagaaggcaaagaagaatggggctaggactctgatctgtgaaagccagcttgatgcgcctcagattcagtgtttactagagaagagacatggaaatgcaagaaaggaaccaacaaacaaacccattgactcagaactttcccctcaataaaaataatgccttcaagaatggcatggaatgaaaacattttcaactacaagaaacagcaagactattgatatagacctgttctaaaataagaaaggaaacccaactggctagttttatgtcagcttgacacaagctagtatcatttggtaggagggaaccttagttgacaaaatgttcctgccaggctgggctgtgggaaagcctatggggacattttcttgattgacaactgatgtgggtgggtccagctcctgtgggtaataccatccatgggttggtggtcttgggtgctataagacagcaggctgagcaaaccagtaagtagtgtttgcccttggcctcggctttagtttttctgagttcctcctcttacttccctcagtgatgaacagttacttagaagttttaagatgaaataagccctttcctccccaagtcccttttgatatgttatatcatggcaataagaagcacaattaagatactttcagacatgcagggaaagagaccaccagaaatgggagaaggtagccgggcgtggtagcacatgcttttaatcccagcacttgggaggcagaggcaggtggatttctgagttcgaggccagcctggtctacagagaaaccctgtctcgaaaaacaaaacaaaacaaaacaaaacaaaacaaaacaaaacaaacaaaacaaaacaatgagagaagggcagtatattcctcatgagattcttaagtattgatagttgaaaaaaataataacattatatgttttattactacccagaacattcattaacacgataaagttagagatagtaaaaatcacactagagggcagaaaaatgacccagctggtaaagtgcttaccagacaagcctgacgacccaggctcaatccccgggacttatggtggaggtcaagaactgattcctgaagtttgttctctgacctccacatgtatgttgtgacaccatccatcaacagcagaagcaccagtaatcataaataaaataacctcaatgcacagatcatatacactgaagttaagtattgaaaatatttaaattgaagacagacaggaagaggtatgcatctgtaatgccaggtcttggggaggcagaggcaagaagatcataaatgtgaggtcagccagaaacatacagtaaggccttgtctttttttttttttttttttttttaaagtaaaccagtaaaccccaaatgctcaaatggtcaaaatgttccaggaatggtaaacaaaaaaatgggaagtggaggaaataagtaataaaatggtagaaaataaattcacaataacattaagtacaaatgatctaaggacatcaaagaaaaaatattaagatggatttgaaaaacaaaggaagcaattgtatgtaaaagacacttcctggtcccttccagtcagcaccagcaccaacacaccttgggcaccgagtcttcggacaccccaaggtccccacaggtctctccacaggatcttaggacctctggtgagtggaacacaactgctgctccaatccaatcacgcaggacctgagacagcattaattagggaagcagaaaacccagcctgaccagggtcacaagtcccttccagtcagcaccatcaccagcaccagggcaccttgggcttggagtctgcggacaccccaaggttcccagaggactctccacgggatcttaatacctctggtgaatggaacacaacttctgccaggaggcaggtccgaacgccagatatctgtccaccttccctgctagaggagagcttgcctgcagagagtgctctaaccactaaaacttaggagagatctagtctcccaggtctgctgatagagactaacataatcacctgaggaacaaactctaaccagagacaactataaaaactaactccagagattattagatggagacaggcaaacgtaagaatcttactaacagaaaccaagaccactcaccatcatcagaacccagcactcccacctcagccactcctggacaccccaacacacatgaaaagctagagccggatttaaaagtatatctcatgatgatggtagaggacatcaagaaggactttaataactcacttaaagaaatacaggagaacagtgctaaacaggtagaagaccttaaagaggaagcacaaaaatcccttaaagaattgcaggaaaacatgactaaacaggtgatggaattgaataaaaccatccaagacctaaaaggggaagtagatacaataaagaaaacccaatgtgaggcaacactggagatagaaaccctaggaaagaaatctggaaccatagattcgagcatcagcagtagaatacaagagatggaagagagactctcaggtgcagaagattccatagagaacatcggcacaacaatcaaagaaaatggaaaatgcaaaaagatcctgactcaaaacatccaggaaatgcaggacacaatgagaagaccaaacttacggataataggagttgatgagaatgaagattttcaacttaaagggccagcaaatatcttcaacaaaattatagaagaaaacttcccaaacctaatgaatgacatgcccatgaacatacaagaagcctacagaactccaaaaaagaccagaaaagaaattcctcccgacacataataatcagaacaataaatgcactaaataaagatagaatattaaaagcagtaagggaaaagatcaagtaacatataaagacaggcctatcagaattacaccagacttttcaccagagactatgaaagccagaagagcctggacagatgttatacagacactaagagaacacaaatgccagcccaggctactatacccagccaaagtctcaattaccatagatggagaaaccaaagtattccacgacaaaaccaaattcacacattatctttccacgaatccagcctttcaaaggataataacagaaaaaaaaaaaacaatacaagaacagaaaccacacttagaaaaagcaagaaagtaatccttcaacaaaccaaagacagccacaagaacagaatgccaactctaacaacaaaaataatagaaaggaacaaatagttttccttaatatctcttaatatcaatggactcaattccccaataaaaagacatagactaacagactggctacacaaacaggacccaacattttgctgtttacaggaaacccatctcaggggaaaagacagacactacctcagagtgaaaggctggaaaacaattttccaagcaaatagtctgaagaaacaagctggagtagccattctaatattgaataaaatcgacttccaacccaaagttatcaaaaaagacaaggagggacacttcatactcatcaaaggtaaaatcttccaagaggaactcttaattctgaatatctatgttccaaatgcaagggcagccacattcattaaagaaacattagtaaagctcaaagcatacattgcacctcacacaataacagtggaagacttcaacaccccactttcatcaataaacagattgtggaaacagaaactaaagagggacacagtgaaactaacagaagttatgaaacaaatggacttaacagatatctagaaaacattttatcctgaaacaaaaggataaaccttcttctcagcatcttattgtaccttctccaaaattgaccatataattggtcacaaaacaggcctcaacagatacaaaaatattgaaattgtcccatgcatcctatcagaccaccatggcctaaggctgatcttcaataacaacataaataatggaaagccaacattcacgtggaaaatgaacaacacacttctcaatgatacattggtcaaggaaggaataaacaaagaaattaaagactttttcgagtttaatgaaaatgaagccacaacatacccaaacttacgggacacaatgaaagcatttctaagagggaaactcatagctctgagtgcctctaaaaagaaactagagagagcacaccctagcagcttgacaacacacctaaaagctctagaaaaagggaagcatattcgcccaagaggagtagaaggcaggaagtaatcaaactcaggggtgaaatcaaccaagtggaaacaagaacaactattcaaagaatcaaccaatcaaggagctggttctttgagaaaatcaacaagatagataaacccttagccagactcactagagggcacagggaaagcatcctaattaacaaaatcagaaatgaaaagggagacataacaatagatcctgaagaaatccaaaacactatcagatccttctacaaaaggctatactcaacaaaactggagaacctgtacgaaatggacaaatttctagacagataccaggtaccaaagttaaatcaggatcaagttaacgatctaaacagtcccatatcccctaaagaaatagaagcagtcattaatagtctcccaaacaaaaaaatcccaggaccagatgggtttagtgcagagttctatcagaccttcaaagaagatctaatcctagttcttcacaaactattccacaaaatagaagtagaaggtactctacccaactcattctatgaagccacaattactctaatacctaaagcacagaaagatccaacaaagatagaggacttcagaccaatttcccttgtgaatatggatgtaaagatactcaataaaatttgtgctaaccaaacccaagaacacctcaaaagaatcatccatcctgaccaagtagattttattccagggatgcagggatggtttaatatgcggaaatccatcaatgtaatccattatataaacaaactcaaagacaaaaaccacatgatcatctccttagatgcggagaaagcatttggcaaaatccaacacccattcatgataaaattcttggaaagatcaggaattcaaggtccatacctacacatgataaaaagcaatctacagcaaactagtagccaacatcaaagtaaatggtgagaagctggaagcaatcccattaacatcagggactagacaaggctgcccactttctccctacctgttgaacattgtactgaagtcctagccagagcaattcgacaacaaaaagagatcgaggggatacaaattggaaaggaagaactcaaaatatcactttttgcagatgatatgatagtatatataagtgaccctaaaaattccaccagagaactcctatacctgataaacagcttcggtgaagtggctggatataaaattaactcaaacaagtcaatggcctttctgtacacaaagaataaacaggctgagaaagaaattagggaaacaacacccctctcaatagtcacaaataatataaaataccttgccgtgactctaactaaggaagtgaaagatctgtatgataagaacttcaagtctctgaagaaagaaattaaagaagatgtcagaagatggaaagatctcccatgctcatggattggcaggatcaacattgtaaaaatggctatcttgccaaaagcaatttacagattcaatgcaatccccatcaaaattccaactcaattcttcaacgaattagaaagagcaatctgcaaaatcatccggaataacaaaaaacctaggatagcaaaaactcttctcaaggataaaagaacctgtggtggaatcaccacgtctgacctaaagctttactacagagcaattgtggtaaaaactgcatggtactggtatagcaacagacaagtagaccaatggaatagaattgaagacccagaaatgaacccacacacctatggtcacttgatctttgacaagggagctaaaaccatccagtggaagaaagacagcattttcaacaaatggtgctggcacaactggctgttatcatgtagaagaatgcaaattggtccattcccatctccttgtactaaggtcaaatctaagtggatcaaggaactccacataaaaccagagacactgaaacttatagaggagaaagtgggaaaaagcctcgaagatataggtgaaagacccacaacgtgaggactcccccacgttctgactcaggagaggcgacaccccaaaatcaccaatgagaaatggtcttgctgcaaattgcaagaggatttttattcaagagtgctctcgggcccacagtcttataccacgcaggggtagaggaccgtggtgccccgagtagctgagtaagggggtatttaaaggaaggaaccacaactcaaggaggtgggaagggcgttgttggaaaataccaaaaataccagttaagagtcacaagtgtcaggttatctctcaagacagtttctaagagcccctaacaatctaagagcccctagcaatagcacctttgcatagtgggttccagtagtggtcagggtgactttctttgaatgaacactctttgaacccaggaagcgggtgggtggaggaaggaatgtcgctatctgctttatgattagcataccttggagcattgagtttattactctttcaataggcacaggggaaaatttcctgaatagaacaacaatggcttgtcctgtaagatgcagaattgacaaatgggacctcatgaaactgcaaagcttctgcaaggcaaaagacaccgtcaataagacaaaagaccaccaacagattgggaaaggatttttacctatcctaaatcagataggggactaatatcaaataaccccattaaaaatggggctcagagctaaacaaagaattctcacctgaggaataccgaatggctgagaagcacctgaaaaaatgttcagcatccttaatcatcagagaaatgcaaatacaaacaaccctgagattccacctcacaccagtcagattggctaagatcaaaaattcagatcacagcagatgctaatgaggatgtggagaaagaggaacactcctcattgctggtgggattgcaagctggtacaaccactgtggaaatcagtctggtggttcctcagaaaattggacatagtactactggaggatcccgcaatacctctcctgggcatatacccagaagttgttccaactggtaagaaagacatatgctccactatgtttataggagtcttatttataatagccagaagctggaaagaacccagatgcccctcaacagaggaatggatacagaaaatgtggtacatttacacaatggagtactactcagctattaaaaagaatgaatttatgaaattgttgggagctattaaggcaacactattgtcctgatctctgaattgggcctctcccccctgagaagaaaagggggtcaaaagcaggccacgggacgcacctctccgagaaagtcagcgcaggatgtcctgacctcaagatgtatcctgctaccaccaagttcctgcttccccgtgtagtcaccaaaaaaatttctgctgccccatcccgcctgctgagaagtacttcctctctttccactgccccatccctcctgctaaggtacatttcctttgcccattcctcctgctgaaaggcacttccccttttgcttgtgcatttaaacctcgggcctggctaatacatttgggggctttgatgcattccagaatgtctccgtgtcgttattcgcacaaggccctcgtctctctctaccccccacttggttcttaggaggaggtcccctcgagatcctcgaataactggacctgctagatgggtcatgaaattcctaggcaaatggttggaccttgagggcatcatcctgagtaagataacccaatcacaaaagaactcaaatgatatgttctcactgataagtggatattagcccagaaacttagaatacccaagatataagatacaatttgcaaaacacatgaaactcaagaagaacgaagaccaaagtgtgaacactttgccccttcttagaattgggaacaaaacacccatggaaggagttacagagacacagtttggagctgagacaaaaggatggaccatctagagactgccatatccagggatccatcccttaatcagcctccaaacgctgacaccattgcatacactagcaagattttgctgaaaggacccagatatagctgtctcttgtgagactaggccggggtctagcaaacacagaagtggatgctcacagtcagctattggatggatcacagggcccccaatggaggagctagagaaagtacccaaggagctaaatggaactgcaaccctaaaggtggaacaacaatatgaataaccagtaccccggagctctggtctgtagttgcatatgtatcaaaagatggcctagttggccatcactggaaagagaggcccattggacttgcaaacttcatatgcctcagtacatggaacgccacaccaaacagtgggagtgggtgggtaggggagtggcgggagagggtatgggggacttttgggatagcattggaaatgtaaatgaggaaaatatctaataaaaaacattaaaaaagaaaaaaagaaaacatttcctttaaaggccagagagatgctcagtggttaaatgtgcctagcaccaaaccagagttcagctctcatgactggaaggagagaaatgattccctcaaattgtcagctgacctacatgtgcctgccatggcacgcacacactattacacacacatgtgtacacatgcttatacatacaagtatacatgcatactcacacacatacaaatatgcacgtacacacctcacatctaaaaactaaatataataagaaaagaaaaaaaaaacttcagacaaaataatgcaggtagtaaaagctaaggaagtatggaagtgccttgtcatgcaaatcctaattgagagagctctggggtagctacattaatgtgtgacaggatcaattatcagggcttaggaaaggttcatttcatgataaaaggtcaattcagtaaaaacgagtaatagatttccacgtgtatgcacctaacaactttgaaaatacacaaaacaaagccctgatataacttaaacatgctgcagacccatccaggactgctgagatgatggctcagtggtccagatagatgcctgctgccctgctagaggacctaaggttactttctgggtcccacactgtggaaggagagagctgacatcctccacacacttacccaggcatgtgtgcatctagacacactcaagataagtgtaataaaaggaaacagacacatttctaattgtagttggaaattcctcattttcctatcaacaacctaaagaaactataggtacaaaatcagtaaagatgcagaagttctaagcaatgccacacaccaccttggtcagtctagaattagcacagagacctgtccagtcattgcacaggaaattattctttttaagcacatgtggcaaatacatcacaatggaccgtattttggaccaaaacaatgtttaacaagttgaaaaacacctgaaataatacaaagtatgttttctgaccataatagaattaaagccaactcatatgtttgtaagagtccaggaaaaaaagtcctccaactactttagttgctaaaaataatgtcaaaaataatatgtacctatttatatgttaaaaaccatggaacactgaaaaacaaaataaagacattcatagactgatacctattataataaacatgttgattactcccaaactgatatgcaggctttttctatcaccataagaattctggcagaatgttttgaatacagacaacgcatctctgaatattatgtagaaagccgaagaagatctgaagcagttttgaaacagataataaagccagagaaatgacatttctgttttcagtcttaccatgagggtcgggggatcaaatctgggtggtattggtgaggatcagacacacagacaaaagtgccaaattcagaacctcttcataacgagagccaggttacgctgctttctggatctgtgccaacgtccctgagcaaagcggtttaaaagaagcaaggcttgtggtgactcacagtttcagtcagtgtctggctgcactgctacaggccaaagtcaaggctgaggttcctgattcctcaaggtgtggaggagcctgcggtgggtgggacgggtgcttagctcgctatccaggaggcaaagactgagagggaagggtccagacaagatctgcccttcaaaggcatgataggagggatgcgcttgctgcaactgagcccattctgaaagcccggtcagctatgaactaagccatggattaatgctaacttcaacaggagaggctggggcatttcataacaatgaccaactgatttcttttcataaaagtagaaagaaaattcagtgaagagaggatgtttttctttcaacaaaggtgctgaaacaattccatgcaaatgaagaactgtaatcttgcctcctcctccaggacacgagtgactagaatagatggacatggtgaaactcttaggaaaagcacaggactcgggcaaagttcctagaatgatgcactcacaatgtacagttcacgtgagaaggaacctgaagcagctctgaatggaaggaaaacgtttgtaagtcacaggtggcaaagaactcatatccagagtttgtgacagtccaaaatatcaaaagtaagaactcgaacaatctgatttttaaaacgtgcaagccttttcactagtgatgcagaattagcacagaacacacgatcaaatcatcagccacatgggaaatgtgaattaaagccaagataaggagccggagatatgcctcagtgggtaaagggcttggtgcacacacttgaggaactgagttcagatctccagtagccacacaagaaacagtgcatagtggtgagcagctttggttccagcaacacggacagaggcaggcaggcacaagggctttgatggccacctagtttagcaggttggatgagatccccctgagtcaggaaggaatataaaaacagcattgtagagcaggttctcacagaaccaagcatacacttacttaacgactcaacgattatacctgggccttttattcaggagagtaaaactcaaagttccaaagaagtgtaaacacggatgactatagaagattatttgtagtactataattaaacctacccaaatgcaaggaaggataggtcactattgtaaggcgctactcagtagcaaaaggcagaaactggtcattcagcatgaatgaatgcaagtccatcatgctcactgggataagccacaggtagggacgaggttggaggtgacctctggaattcttttatgtagcattttagaaaaggcatgagtagagggcagggttattcaaggctccaggtaggggatgattctataacaaagatagaaattagtagatttgacggagtaccgtaattcggctatactggtatatacacacacatgcacacacacacacacacacacacacacacacacacacacacacacacacacgaatgcacatatatgtggcataatatgaatgtgaggtcagagagcagcatttggggattgctactttcttttcaccaggttggtcctggggatgcagctcagctcacaaggctccagaaaagcgccattatggcggctttattaattattgaggtggctccaagctacctagccaactcaataatttccttttaaatgagagggaggaaaagtggaatatttggatttggagtaagagaaatcgactaatctactgtctctaatttgtgatcatgacttttatgtcaaactagaagaaatataaacatcatgaactcgtttgctcatgagcacagcagtgtcaggttttgtaaggagaaagtctgagaggaagggagttcaaatgcggggagggagccggggaggcagagtaccgcctctgccctctgagctgatggttgatcactcctcagtggctgacaacccaagtgcagtccggccagctgccatccaagcattatgcagccagttccctccttcctagtccctggagatcaaggtcaagtgtgatgtccctgaatgctgaagagaacactgaaactgagtgactggggatgttcacagttcctgcgactgcctgcctcgtggcacagggctaggtagcctgtgactggtctgcttgcaggaatgcctgccatcccagggccgatggatgtggtgaagggagaagaaagggcaagcttcaggaaacgtcagggcaggtgcaagtcaagtactgaaaatacaagatgctgctgagctgtaagatgctgtgctccttaaatgatcctaatccagtctaaaaccagggtgctgatgtccaggaggagtcacagggctggcctggagaatgtgagactatctcagcttagtgaccatctacagtcctcattaaatcctaccttatcaacactcagagatttgcctggtcccatggaggaatagctcccattacacccaggacctcaaatgctcaacttgaatttattgagccagagacttgtctttctatagtgtcagtaaggccacatatttggataggtaattaaatagggaagaggagagagggaaataacagactgtcatatactgcagcacctcaccaagaatcccccagaagaggcagcatcgtgcactgaacccaaaatattactctcagcccctgtatcattccagcttagcacatggccataagcagtggcccagtgtagtccagttcaaatctcagataatctacaacgtctctggcctcagatctggaaagcaaggccctatcagatgaactcatttgcctcagagatgaaatcatccagtgccctcaccggctttaactcagatcttccatttctagggtaaggcaaagcaaatgagcccattctacttaactctgaaacaaaaaggtgactttcttgaaggggaaaattagacagatgtagagatagatagaatctcatgcacttggtcagagtgtgtgtatttgtgtatgtgtggtgtatgcatatatgcacgttgagatgtgtatgtgtgcatacatatacatgcctgtaggtgtgtgtgtgtgtgtgtgtgtgtgtgtttagcattgagtctccctgtccctctttatcatattggttgaagcagagtctctcaacttcatgtctcatttgtacttttacaatccaccaaacccagtaagtccttcccatacgctcatgtgggtggggtcacccattggaacctgggcagcatacctgtgaccacctccatgcaaagaaaagtgacttcctgcctccacatctatcagttatcattagctcctcagctaggggcagggcatcagaatctcctctgtcctccatgctggggttcctaactggtttgaacttgtgcaggtaaacacaccagctgtgagttaatgtgtgcaacagccacatcatgttcagaggccaggcttccatagctctgctcactttaaaaatctcagcagccatcaggacaaagagtcttttgtaaggagaagacatcggaactggctctccctttgtttcttgagggaagtacccatcagtaatctgcttggtgctcctcggtgaccctggggctatcatacacctaagtattctctcataatagatggcagactgtgaagtaggtgtacagatgctcaccaaagaagctcataatgtgggctttgcaagccccaagaggccacaaaacacattactgtgttgactgacaagatggtttcctgatgctgttttaattgcaggtataaaattagttgtgttgcttgatgtgggcagaggaagcactgggcttcagttgctccctgctattggggtgaggagtcagggtgggagggttttgatcttttggtgtccgtgctaaggtagagagcctgaattgtagctgcacttagcttcaccattacttggatggacaggaaaaccttgtgacaatgtcagcttgggggataaataaaggcacaagagcagtcctgggtgggacctgaggggattagaggcaggttcaacaacatggccaggtagtgttggtcacaaatccccgatccaaatggacctcaggacaaatgaagccaagcatcataacatgagaacactagctgcttcttttagatctttcatttaaacctagaaacattgtggtgttgagacctatatcataaacatgtgcacccacggaatccccacccccataaacgtgtttgatgtccttttgttgtcatggaaatcctggaacttgaatagctcatactttcttaatgctatcaaaatttgtccaaagaaaacatcagcacaagccgggcatgctggccttttgatttattaccctaaacaatgctttatgtttgtaaggcggcacctaaagggagggctgattatgttgtgtatggatacgaagccgttttcttaagtgaaccatatcctgggagaggtgatgctcatgaacatgtttcccagtctgtcctggggtcagataccatctagctcagatgctctagaaccttcaaagtgaccactgtataaatgcatgggaaccccctgtccccaagatattccaaggcattgtggtggtaaggagtgtaggctgtaggtctggctgtgcctataataagccctgtattttcatgagcattgcctttcttgaaattcagtttcttagtaatcaaagggggagagggcatgatatttaactcataaaatcatttcgttgttttgttttcaataactttagtctttgcaatttataaaatagttcaaactattgtattcactgtattgtaacagtgggaatgtgtatctactgttctgattactggaataaatatatgtcttatttctttatttttgtaattctagctgcaaaatgaaaactatagcttaaggctgtgacagacaacacgtggatagctagtaagtccttgacatatcagtccagagtcctcctcaggcaaagctccaacgtggagagagtcagtagcaaacctttgatagtgtcagtgctgtgaaaacctttggcactgagacgtcaaaaataataagtggaagagagttcagaaattcagctaagatgtaggatctacctgctggcagctttcttctatctcttgatgtgatggttaatggtaattgccaaatggacaggatctagggtcatccctgggtgacatctctaagatgtcacaagttcatcgactctgatatcctcactgccattgctgctgccaacaatcaccatggcgtccatgacatcagaatttagcttcattgaccgtcacatgtggactagagatgaatggctctctaagaatcctccagatctttggcataagattgactgactggggacagccagccttgtggatctagtgggtaccagatcctcagcctctctattgtgaagacagctattgttggaccacccaggccatgttatataagccaacttaataactcccctattaatatatatttattctgtttcttctgatccctagagaaacctgactcagacactgggatgaagcagcccattgctaatccagaaggaccactgacagttggataaatcgttctttgttaaatgagatgtgtggactcaggtagggatggatgacggtaggtaaggacactccctccccaactagggaaaggattgatgacacaggagaaaatggggatatcctggcagcttatcctagggacaatcggagtcacagaccaccacagatcttagatcaccaagattctgaaaaactgagccactgttcccaggaacctcaggtatcagtctgctctgtatagctgtcacattctgtgaaagggaagttgtaacttgagctgctggtagcagaagaccagactatcaactaaacatgcgtggcatctaaatatgccagaagcacctagcatttaaaaattaatcattatttaattaaacattaataaataatcacccatggaaaaggcacaggtctcaactgggtatagagaataaatctaaccagagcagctcagtatggcttctagatttatattaatatgcagaggacaggaaagcagcccagtgagaggccctacctgtccctacttgatataagtgctggatcattactgctcaggaacactggaaaatccatcacggtgcggaaaacatggacattaaggagcaacacccatgaaacctctgtgtggatccgcaggacacagcttttagaatctgtctcaatcatcagcatgacaagacacacagacagacctatagcctgacagggcagtaagcaggcagcctatagctaggcagacaggcagataggcagccaaacaggcaggccaacagacaggcagacagacaagtagacaatccatgtatgcattcggacaggcagacaggcagagcagtatcaactcttcatacatccccagttcacatgaacggagctgagtgtttaagagttaaactctcccgtggttcttgcaatccccctagaatagagctctaaaaggagacagacagctgtttctgaaaaacacgaggcaacaatcagccactttgcttagcacagcacaaagctctggggaacgcaagctgctattcaaatcagccccaaactctttccctcttttgaagccctcgcatgggaaagtaggctgctatcttcaaaacccctctgtaatttacctctgaaaagggggccagcatctgcttgtctcttctgtgctctttgaccaccagggctgacacacaactcagtgagggacccagagttttgaaacactagccatgccttttctagacaaaggagcactccagctgtgattgccaaggtcactgttgtggtgaagtccacagtggggcaaaacagcttggccataggttactatttacaagcctattcaacctcaaacatttctgttgcaacagtaccctggccctggtaacatggctgggctgcctcctctcattggctctgtagctaacaaaccacagagtgctttttctgtccctagcatatgcccctctttcctcttcccagatgtcctccccagttttgactggtcacatgctcacatgccttcaagacctaggttaaaggcactcccttggaggagtccccaggtgacttagggaaaagaggttttttttttctctctacaccatgcctggctatgcccacactctgaagcccaggcaatgtgtctgctttgttgtctgtccttctgtgactgtctctagggcaaggactgttgtttaggttacaagactgaatgaatgggtgggaggtttgaaggtatatttgctggttgaataaattgagtaaagatggaaagaaaatgtaaaccatgagcaggggcagtgaggagaggggaacatcccacacctacccctgcccccacccctgccctccacccctgcctcctgccctctgccctccacccctgcctcctgccctctaccctccacctctgcctcctgccccccgcccccccactcctgcctcctgctccctgcctcctgctccctgcctccacccctgcctcttacccccttcccccgaccccgcctcctgccctcacccctgcttcctgccccctgccctcacccctgcccccacccgcacctcctgccctctgccccccattcctgcctcctgccctcctgtccccccacccctccccctgcttgcttctttgtctgtttctgtgattgaaggaagggaaaagcaatttaaccaaaaccatgaatcttttctttggaaaattaatatcaaaggtttttctggctagtagctatttttggaaggacctcatttctcatggacaagagaaaaatggtgtagtgagaccttaagtttaaccagaataattcaagatttcatgtatgatgaggaattttattgttacttaaaaagtaagcagactttaatgaaccggctcaggcacatgcctcctccacagggtcatgctgagacacctgtacattctggggtgtgacaggtgcactgcagtacaagcgtcctcaaagggctgcaattttatacactcagtcattctcagagtacccctaaaggtatcatctagagacagtttagcctgaaagtaccacagcatggttcaccaggtggagtagtaggatctcagagagccttggaactgcagaatgggtgacagagggcagcggcaaagcactatagttccttgtatgttaattccaactgcatgtggctctgtggatgggatagcttatagctgtggttgggtttctagagctcttggacagaatctctaaagagtgggagagacttgagcattacatagattcagcacctgtatggccattagggggtctacgtggaccgacctcacagagctgttctgatgactgagagtactgtgtctttagatacttgggggatctggatgcagatactctgtgtgtctgtccacataggatgtgagaggacaataacccaatgcagagtgaaatcgatgtgtttgcagtgaccatcacgtgccagtcactggcgttctgtgaggcctcatgtcagccaccatcttgattgtacaaggacacagagaatgtttaagatcactcaccctatggggaacactgtcctcttagcacagcagttatcactgtctaaattcacacagttgtgactacccttgagacacccgcaatgctgagtgtgttgacattcccatataggaaggtgtggggaggaccattagactctcacctggtattccagccattcctcctgtactttcttccagttgtttgtgttcttgttcctgcaacttgtgggctcagggagcactagcctcctgaatctaggtggttaactatagttatagggaagttatcattcttggtccagtgagactctttagggctgtctttgaagggcgacccttacagtcctggaagcaattcctctttgagccatgtattctcatgtaagtaagcccaataaattcactggtccctcaaactggacttggctagaataattcctttagtctgttgctggttccctatctggagtgaggagacacttgttcatggctaccccagaaaaatgcatgcaacttccacctcactttcccttaaattcagtgtttactatgtaaagtgagacaaattctaaagacaaagtagattctgtgtcccattccagagccatgtgctggcctttcgtttcactcttcccgttttagctccaagggaagaagtctactctctggtactccaggtcacaagtgtgctgtggaaaacaggctaaatgtttagtcaaatctctctgaacaacacaacacatgctggaaaccccaccttgcatacaaagtacctttgtactgtggttgaagcaacagtctctggggttggcctgttctggctttggtgtttattccttttgtgaagataggcaggtatagcctctttggggttaggttcccttctgtaagacggagtgaatgaaatcagctgctccggggttcttaagaaaacagcatttgtcccaacgtctggtgctgtatgtgtgtcataaatgtcacctgtcactcctggtgtttctccactagactaagtgccagaagagcaacattcctgcctgccttttgcttgtcttaagcacccagaccatccagtgtcacctggcaacatctgatgaattgagtcatgttatcttcacactggctattgtttcttggtttccttctagaggacatatactactaatggaacaatattcactgctatcatgaggtaggtatacaaaatatatgattaaaaaatctttttaaattttatgtatatgagttttttgcctgcatgtatgtaagcatgctatgggagaaggccaaaagaaggcatcgggtcccctgaaattggagttttggacggttatgagctgccatcttggtgctgggaactgaacctggtgttctgcaagagaagcagttgttctcaattgctgagccatctcccagaccaaaacactacaaatttgaatcagttccaaattgcaccctttacacacaacatctctaaattatagcatctaggtggttagttcccttaagatgttaatctcactgccatgtcttgagaagaagagacaagaattcagcagatgcactacgaatctctggtgcacatagaatagtatgctagtattagtagctaaggtgaaatcagttttaaaattcacttttttaggctagcatacaaagaagtgaatttccttaaggcatgttcctacatacatgttcatatacagtatgacttcccttgaggtggacatatttaaaacttaagtggcaaggtagtaagattatagctacaacatccagggagaaagaagatcagattttgtgtaagtttcaggaacataagtagacatcttatctgatggagaacggttggaattgaggaaagccagagttgcttggtgtcacctgagagtgtacaattaattttctgtcatgtctataaccacacggagtttacacttctcattttagagatggggaagtaaaacttggacagataattggctcaaacagagcacaattatgctgagtcagggttttctaacttgaactagatccgatagaatatttctagtaaatggagagttaagtaaaagtttgtcccagcctcatttcttcaggccatagataacagcagtgatgcctggatcccttgggttctaggtgaacattctgcacatttcctaagattcagggttctcctgctctttggagggaccaatggcatcgaggaaggagcctctctggcttcgaaatgcctttaaaccccagataaagctaagctggaattccacttgtatctgagattgtatacttcgataagggctgggagggatgagtaagggtagacttgcacacatgtgtgacacacatacatttatacttcatattgtatagaagaaagtgcacacacatattcttactggcttagtacatgttagtgatttgtttgttttgtgttaatctgtgcccagcctggatgcccccagagaatacaaggtggatatagataaatgctaactagactcagtactgtgagaagcacctgagcccagacatccatagaatgaggaaatagtgcagggatggccacaagagaggcacagacacgtaaatctcagaaacatagctgaccacaagagcagagggaagagactaagctctggagtgactgactgcctttgcctccattcccccaagctctacgccccagcctgctggctgggaatgagctgtaatgcactgtgcagtattatcctgctgtctactcagattgcatagagtgcacctggagttccgtctgtttctgctcattgggtttgtggcaatcggcagcacgaggacccatatctctgctggaatatcataggtctttcttctcggttcttagagagttagtgcccagctgtcctgcagggccagtagggcaaggccagtagcagggcaatctggtgtcaagaccgtggagctttggacgaggtggaagtgtagggaacccaagattacttagtttctgtctgtgtaggacaatggaacagaaataagtaccaaatgccagccttggtattatggcttttatttgctctatggtaatttagcttcacgatgaaaatagagacaggataacatggtggcaaagtgttgcattcttcatgaactgggtttgcaattaatttaaaaaaaaaaatgtccgtatttatttatttttgtgtgtgcgtgtgcgggggagggggtatctgtgagcacctgtatcatggcacacatggaagccagaggtcagctttgtggaatcagttctctccttccacctttctttgggttccaaggattggattcgggtcatcaggcttgcatggcaagggatttatccactgagctatctcacaggcccttactttgaattccgactccccgttgacaatcgtcatggagtcaccgattatcatctcccagggactcgcagtttcgacttctgtgacagtagtgattgttgagtgcaacataaagttagcaaacacaaggtaggaagcaagtcacatagttctggaatgttacggatgtttgattggtaccctattgacaacatccgcatgaggacaggaccatgtcctcccagctcatcactgcatctccagctgctcagacatccagaagcgagccttcagtgcacatttaaatgtgggtcagaaagatgaatgaattcatgatgggtgtgacagaggaaacagcagaaggagaagatctcaaactaggagactgaattctaatgctgacattataaagggaagtactggtaaaataaacttaactgaaacatctccaagctttgcttcctgtacacacacacacatacacacacacacacacacacacacacacacacacacacacacaccagaaggaagccattgatagcaaccttgtctctaggcctctgatttcctctagctgacaagtgttctgcatctcaggcctcttctaggtacccgcaaagagtgccctccagtaaggttttctccatcgtctctcacaatcctggttcacctcccagcttggaagtgagtagctccgggattgtgtcagggacaagagcagagctccagggacgctctaaaggaaatgttcccgggcacctcaaaaagtctgtagcacccaattggaattccagaaaggattttgacatgggattccagttgctttactaataaaagtggtcaaaactttttgcttctggaattgtgatggagataaacaaggtatatatggagccgcttaaataagcaatgcaaaagaaagcccgggagagggcaagcaagaccagagctgtttggattaacatcaatgtgtcagattttaatttctatttagaatatgttgaacttctaacctgcaattctgatagtttatttgaagttattgaacttaaccaaatgaacagcataatattttaaaacattcatatatatatatatctgtctcagaaattgtccttgctggtggttgtgttagaaacttttgctatacaaacacccatttgtagagtaaccattttgggttaccccaatttatgctattgccctgcactgttagctagcttcagaaaacttgtacaaaattaaacacaatcttctcctgttcatgcatggaatctagggttccctggttcatgtatagaattcggggtttcttttccagttctcattcaagcagccccacatatgtcttgttccatccctatcagaattgcagaaggagaaagttttgaccgtgtttacaggtgaaacagctaggattccatgtcaaattcctttctgggatttgtattgcgggctgcagactttctgaggtgccatagataaaaagcagtttctaccagcagctcttaatcctcaggccaagccctggaaaggcatgcttccttcttttgtggttcagttgcaacacttgtagcctatgtctgaatgctcaattcaacacttctcagtgctgaagaccaggtgattttgccaggatgtctggaaagcgggaagacttgttgcctagcaaccagaagcagtctccggcttggtgtttgcagccctcctgactttttaatacactgagcagatgttaagcctcctgtttgaattttaaaggcataaaacagagtagtaaaaagtggagacagcatttgcatttgcaaactaacaaattggcttcagctccaaatctgggagtttgcagagactcatttccttcatgttgattttccttcttcctcccttaaatagaacttgtacaatgctatttttgtttcctttgacctatgaggggagttaagcttcttataaaccagcggtgctggctgagaatgttggtaagaagggcgtggatagaggacaacacgagaacatcatccacttcttcgctcactatttgctcagcgctccattaaccgatgccttactgcttagcaattacgagccacacacctgacagacctcatcctcaatgaccacatttggagttacttaacttgttactaagtttcgatttctttgtaaggggtaataataatgggaccaataacagagcctgttttccaggagccttgagggtaagaatgaagagagtaggggatgaaaccaccacagctgctggaagagagagctcttggtgaactgtgatgctattgctggcattaccgttgtttataaggtccattcaatgacagtgagtgtgacctctgtagtcagactattcatatatctttaagcaagttttataactatttagtggctcagtgtgtttaggcataagaagagatgaccagttggtggcattgtcatgagaattaaattgagaaggttgttctttcagcagctaacccaatactacgcacatggtattagagcttaaagatgttggctgctgtcatgggcatcatcattatccaccactgcccacagagttaccaagatgagcaaattatgctcctgtctccaagaagtccagtggaaatacaggcaccttgggatcatatctagctcagggaactaggatgtgcctacgtgcaggaagccagaagctctgaacagaagattatagacaccccagaagaggcgtagccctcctcacacagccaatgggaactatagtttggtgaaacagttgactttcatattaaaatttcaggacacagtgtttcatgaactgagcagcaaccaacagggagcagtttggagcactaccaaagcagcacacaaagaagacgtttatgggacagatgctgatgactggctaaacttgtgcagactatcatagagggagaactcaagacagctgatccaagaccttgtcacctgctcaaaatatgctaaacttcagttccattttaactagccacttacagaagtcaagtatgagctggtttctatgtgcttaggaggacccagggtcttagaaacaccttactctacaaagcacagatgtcgttattttaatggttctcatgcttggctacacactagaattattttaaaaatatttgatgtttatacttgctttacagagggcctgagaactgtggaatataatgtatcttcaggatgttttaaaagttcttcaatggttttaatgggcagccagatgtgggatgatggtaatcaccacagcacagctggtagaagcatctcaagagagttgtgagtgcctctctcactctgacccctgccatgacggtagaattcagagcagccattgcaatgctgtactgtggtttcaatttggaatgtttcacaaagagacatgggtcaaaggcttggttcccaggccgtagagttgccaagaggtggaacaactttaaaagataggtcaaagtgggagaaagccctccagaggtgagtttcaggtagagacattgagaccttggccccttttgcttcctggccactatcaagtgagcagttccctcttccatagattccaccacgattcatgtcacagcaggcacccaaacaatggatcaactcgtcagggatttaacctttcctaagtataagtttactccctcggggactttgccacacagagggcaaattaacacaaggagcaatgcatttgacgtttcaagatggtagtactgacacttgtctggaatctatcatcttagtgaaccatcataataatgctaacatctgcctctcatttacacagacgcggaaagcactgagctctctcactgagaatctcactgctggtaaatagcaagtgtgtctactagaacaccagctctagtagtgtgattgattcccttccaccagatttcctgaaagtagagtctgcagacctgtagccccgcttgctctcaccccctctttcaggcctttgggtttctactggtacttgtaatcgaaggcatggattggttgctccctctgttgggagctctggggcttctgtgtgagcacatcccataagtcagggcatcactggtggagtagagccttggtcctcacagggacatggaaatggtgcacacatagactgtagggtaaactcagaggggactgggagggctgaggagagaacgttgctggtagagttgggccaggtcagggccacagctgctcctgtagctggggaagaagctggggcctggcctattgagatgagcgaggaagatcatcctcgtttcttggtgttctcaaaggctcagacatacccgcattgattggaagtcagatcgtgagctctggaagaggagcgagacttttcttgctgagccacctgcttgggttttagaacagtgtgcactttctgcatgctctagatcttctcaatgccccccaaaaggctggcctgtgacagaggcgaatactgccccaacagagctaatggcccccaatcacaggaagaaacaacagctgctatgtgaggaggccctacaaaatgcactgggcattttgcatacattacctcatttaatcacaaaacattgtgcgtttgggattgtgacaactctgagacaaatgaaagcactgaattgtgaaggctggaagggttttgcagaacatgaactgggtggagatttgagagctggaccaatatttccagcctccatcctgactccaagctcagggaacgctgtgaggaaatgaagagcaagcagggtgtatgatggagcagcagcttgtgcctggcctccaccacatggaaaggtcaaaggacaagagttccccttccaggctgcagaaacaactcagtcggtaaattgcttatcatgcaaccataaaaaccccagttcaatgctcataacctgcattaaaaaacaaataaacaagcaaactggatgtagtaacctgtttcaaattccagcatggcagaggcaaagactggtgatctctggggatcaccaggcctatgagaaaccttgtctcagtaagcaagatgactgacagctgaagaaggacacctgaggttgactcttggccttcatatgcacatacgtgcacactcccagccagcccctcaagttctcattccctatttgaagacttgtaggtgtttttgatttgaaagcaatgagaaaaatggaagcagggagttgataagttgaagtttgaaatatgtttccacgtttataattgtatcagtatctgctccccacgccacaaagctcccactctctccccgccccctgtttcctcttttctaagtaaatacatttagcagtattaaggcatggtctctcctcccattctatttcctgaaggagatggcttttaccccaatttgggtgttttgtgctaaatgtaattatttcagctatactgattataagtagcagttcaaagcttaagaatgaataattaacaaaagttttgttagaaaagacgagactgtaatagacaactataaaaagcactctttttttagtctttcccaaaatacaaatattattgcatagcccttctggcatgtgtgtgtagtgagaactcattttcaaaccttgcttcctatgtgattcagctccaacttcaacatttctgtaatcatttatttcataagagcaaggcgcactcttacgtgtcatcagaaagtaggcaagcaaggctctacgcacagtgctttagcgtctggtcctgttcatggtaaagctgatcttattatgattatttgatacccagtcaggcctgatcctgacagattccccaaatctccatagagactgttccagtcccaggacttggcttataggtagaagcgtggctcctatagggtttgttcatcctcctctttgtcgtttgatataagaagcagatgcccaggcacatgtccaaggagccaaacatatatgcatattgctgacctgacaggccagagatttgcgaggaatctgcccaagagtgtgtgctgaaaccaccagacagtcaatgtggaatctagttagcaagcaggttcccaggatgtgggctgcaggagaagcccgagttgagtgtttaggttaaaggcagaggctctatgggaactcatggaaagggcctgggattttgactcagagaactttagatagggagaagctcaaaagaaagtgtgtgttttgagtctgaagggaaaggaagcctcatgctgatggttgtggtgttgacagatctctggggaggtggaaataggaatgaggtgactctggagatccgcgaaagcttcattttacaggggttagccacgggtagtagctagaaaggatcctggccctccacatgcattcctttctttctagtgtggaaaccccatgaaggtgcaggggctggagtgacccagaggaaatgaactggggtactgccctctttcttgcctcctgagtcttaaattctcccatcataagtaagagaggacagagggccttctctctttttctccccttttcatggggggtctttacagatcagaagatgtttgcccacagcaaggctgacagctactgtgtgaccagacatctgtgactactgaacacttaaggaacagctttatggtgagtatcatatggacagccctgacctagatgagtgtgaacctgtgatgtgccactgcacacagaatacatataggaatggtgtactggctggttttgtgtcaacttgacacagctggagttatcacagagaaaggagcttcagttgaagaaatgcctccatgagatccagctgtaaggcattttctcaattagtgatcaagggggaagggccccttgtgggtgggaccatctctgggctggtagtcttgggttctataagaaagcaagctagtgaagcaagccagtaatgaacatccctccacggcctctgcatcagctcctgctttctgacttgcttgagttccagtcctgacttccttggtgatgaacagcagtatggaagtgtaagctgaataaaccctttcctccccagcttgcttctaggtcatgatgtttgtgcaggaatagaaaccccaactaagacagaatggtgtctgggatattttacaattatcacataacaaagtagaatttgtcttttacaagatgatctgtctctctgggaactaccatgactcagggaactatcatggaacattcattttgggagcataaattaaattatagtgcaaattaaacatagggcatgccattcttgaaaccagactgtaatctatgaaggatggacaggacaaaatacaattatgcaaacacaaaccctttatccactgctgaagccacatatttcgaataacagttttatagtctcaagaaacttccttctgtgtcccaagcttgtgttcactggtctctaaagaaaggtatttcttttattgtctaagtaattcaccttagacatgccccctgtggattttcttttagctcaaagcttttagaattgtgtggatagatgcccgtttgtcaagatctcatgatcaatatttgagatcactgagttgagtcactcagagttttgagaggacttggctctacagcaataatgcttcttccggaagagtcaatatgtgctcacccacggaagcgtaagtgtagccacgcattcaaggcctatggcgagtctaaagtgtccggtagctggaaaactgttatcactacagctgttcagtcccccttcccctgcttctttctcatttcatcttcctcgttccccccttccttcttatcctgctgcattttcacattttctctcatcatgtgacaactttaatggaactagtggtctgtgtgatgaaccagttcctatcctcttgtcccagctgtctgatcttgtccttggaaggaagatatatggttatcttacaaaattagcacatggctacttataatctgtatgttgctgataaaggaaacagccaggatgaagctgctgaggcaggattaaaggaaggagaacgtacttgtgcacttggaaccaggcgttagacactcttcggtgtaaaatgcacgcaccaactccatctgcttctctagaagatggggacatgatagtgaagtctcagagggacttcatatgccatggctaacaatttttagcactgacatttatatagaagtgaatgctattggaatttcaaagaaaaaccatcagatgaaatctattttttgctttgaaaaacacacatagaatgcaaacagcactaagtcagcttagattggttgccccagagaattcctgcggggagggccttcagctcttgctatgtaggttagccagggctcagtgtcacattcagctaggcaaatgctgtgctttaagaacctgattttagagtatttcaatacaagaataattttccctctcccttttcttccatcttttccttctctcccactttttttttctgttgtggtgcgcgtgcatgcgtgcgtgcgtgcgtgtgtgtgtgtgtgtgtgtttgatgtgtagactgtgtaggagactgttgctgtcttgctttattgctctctgccctacgttcttgagacagaatctctgactgaacctggaactcatagtttcagacagggctgtctgtcttgaaaccccagcaatcctcttgtctctggccctgccatcaggactgatgctaacaggcacaacttggttgctggggatggaactcaggtcctcatgtttatacagtgaactttcctctctcctgacccctctcctcatggtgagggtgtggttagtgagtggcaagagctgagctgttgcatctcaagggccatttgctgactgcgtcttttagggtctcttctccacaacacaggcaggggatttagaatgctgtgttctgtaaggagaggcaacatgatagattgtaggctcccatgatgtgttagtatgacgtccacactttggacatactcacctatttattaagagtttaagtttaaaatagaacattaagggaagttgatattttagatggtgatgtgaaattagttcacggaaaatcaatactaaataaaaactaaaacgcagtgttaaattatgtcagctagtttaattggttctgtgtttctgaacagttaatgtagggttttatttttctcgttatatctgcacagaattatctagaagattaggtgagattatgaacatgaaaacattctgtgaagtcaaaggcttactggccaggagacagggaggcaccagaacattttccgagaggcttctatgtttggattgcaagttggtctgagcagatggtgtctaagcttcctttcaaccaggagccccatgaggcaagatcttccttgggtgaaccctccaatgagctgcacctacacgcaaacctttcaaaaggaggcccctagtttatgtgagtgatctggccctaaatgtttttatcattagaataatgttaggctaatttcccccagagggctacccttaaagagaacagatttctccatctatcttggcagttccccccccttcttcttccctcccctcccctcccctcccctcctccactcctcatccctggatctctctcttccacccattctttgccttgccctctatgttctctctccttctttctcctgcttttgtttcttaggtttagaatggcttgctcttgctgagagtgtctctgtttagtgttttatggcagtgttttgactttctttagattgttttagcacatcaagtctttgtgccaaattattttgggtattgttttcaggctaatattgtgagttgatgtaaggataaaaactgctttagaatgtaagaaggctacatgtaactataatggtgctaacgcaacaaaataactaccgagagattgtcagccattctctatatatgcagcaccgaacatattattatcacataaaagataaaatagttcttaaccgtgctcagggacagcattacaatttgtattcactcgcattgataactttgaaattctgttttatacatttatttgttttaaaaaaaagaaagcatagatctttaactgtatacagttttactacattatttaataatttctgttatataattttaaatgtacatgatctaaatttgcaccaaatgtcagttgtatcacattagaagtaacacttgggtgtgctcttagcagcatctttccttatttttatctgatatttctggagcctcagttcagtcaaactttctactttataaaactgagaagtacaacagtacataagaaagaaaagaacacaagcatttgagcaaacactcccaacttcctttaaatatgcatttcatgtgtgtctagctagctatgagctaaggtacagctacgtatagagtccctcctctctctctctctctctctctctctctctctctctctctctctctcactagtttctactgtaatatttccacttttaaagaagatgctgtagaataaatattttggataacatgagtggagtggaagactcaatttgtagtcaatgtccattacttctctaaaatgtcaacaagacacatagacttgtgcagttaacaatttcttctcagagaaaagaaaagagacctgagcatttctcacaggatttggtattaaatggggtcatttgggtgaccttgctccacagctatgcaaattcaaggtaagtgttactactgtcaaagcacacctttgaacactgcccaaatcattataaaggaagaggaaattgttcttaaaatatcatgattattaacatgctcattattagcaagtcaatttataaactagccctttggatcatcaggaatggtgtccatgggtctgaccaactgtgggtcaatagtagccactgaaagaaactatcctacgtgcacatccgtgtttaatgccagtccatccacagtagctaggaagtggaattgagtcagatgttcattatctaaagaatggattatgaaaatgcagttcatatataatgaagtattaacccaggcataaagaatataaaatgatagaatttgcagtcaaatggatggatggaactgaacaaaattatactgtgtgagattaccaaggctacaaaagataaacaccatatgtccatatgagggccctagcttccaatatttttgtttgtttgttttttctgtggagtacacatggaatctgggagactagaaacagatcattggtgtgtgtgtgtgtgtgtgttgggatacagtaggaatagtataacacaactaaaattaaagtagagaagagaacactggctggtgaccaaaatggtcaggaaggtagtggtgtgatgggaagagggaaaagaagagttaaaggagtccttaaccacaatgaagtgtgtgcatggaagggctgcttaggaacatactgtattcaatccaagaatatgattagaggagacggtacgcacgtgatgtgaaagaacagagggtgtatgctgggaagtaatggtttaactggggatagagatggagatggcagtagaagagggagagagtaaagggtggagtaaccaaaactaagggagtatggaaaagcctcatgaaacaacactagttcatgagctaatagaaaaaaatgaaattggatagacatataccacattagtgaacgatgctaactaatctaagaagacatgggtgatttgtgtgagaaatattaaaaaagaatgacaagttcccacccttgagccagcaactctctgccttggcggtctggctgggctgttcttatctcatagagactctttggcctggagctcctgaaacgtctccactcagctcactaggtttccactgttgggtggctaccatgacagcccgagcttcctttgtggtgcacatcaggcaaacccgcactttgccaccttacctttctctcttgaacccagaagagccgatgcatgaaagaaaatgcagcacaaacttagttcagaaacaattgctgacacaacaactaaaatcctaatttaatccttattaaatctaaatcctccagtggtgaaatcctgatggatccgccattgaaactgggagacactcgcaattacatcctgtcctcacgtgatccccatacaaaaggacctgactctttcctgcttcctctcttcccctctacaacccagaagtcccgcctactctcccagtgactggctcctttagtccttaatcctttaatcatttaaccatttagggggttggttcacaagaagtcacctgagtatgactcactcctcgtctgcagcccctcccaggagagtagaattagcatcaacatacaaacaacaccaggcccatccacaacagtgataaaatgaaaatcacagtgccgtgcatgggatacccttccacaagttattggttagggaggtccccaacgcatacaaaacagtatgggctattgacgttgttcttggttgcctaccataactgaatgctaagaccttattctttacgacaccacacaatttggttgtaaaaaaaaatggagaaattcttgaaatgaccaagaaactgtccctgctgggtaacatttatagttctagaggactctaggcaaagatacagaggacaggagcagagctgtgtcatgcaggagcagggctgagacaagctggaacatggctgtgacatgctggagcagggctgtgatatactggagcagggttgtgacatgctggagcagggctgtgacatgctgtcttctaggtccaacatgagcacacagtagctttacctgcctaagacccacacaagatcacgttcctttacaatgccagcagggaggggagagaggctctgcaggcctcagtcctagctagctaagagctatggatagctgatagctgcaggaggagggagagtcacttttctttgagatgtgtgtgtgtgtgtgtgtgtgtgtgtgtgtgtgtgtgtgtgtgtttcccatgccccagtgcataatgatagcaccaactggagtcagggagtgaaaataagtaaagtttttgaaaagagaaagatcgacctttattaccactatccctagagcaatgcagaatgacagtgacttacacagcattacattgtaccaagcgtcagcagtaccctgcaggtgattgacagcacacagaaggatgtgcacagctcatgtggaaattcactgcattttacatattgtcgtatattttatcttattgtaaaaatggtttctcatttcctgaatctggggcaactaaagagtgagcatacacttctgtagtgtactctgccactgagctatagtcttagcatgtatttctattttattttttattgctactttggatgaaagaatgccatgaatagaccctagtaataggaatttacgttggaactcataaggcttagaatattttcttattttttagaatcttagaatttttttatttaaaaatgtatgaggcatagagatttctgtaaatattttgttttacacccaaagtgctgatgttgagaaaagatcttgaactcacggcaatcctcctgcctcagcttcctgagtgctgggattaaatgcatggattgctatacccaagttcatagttttgtccccatctattctctacattttacattcttttggattttcttttacctgtgaaggactctgtagaaacatttgcgattcctggagcaacaagctctggtatcaaagccaacacatgctggcttcaggaacatggactgcacttaacaccttaactcctcttaattattttttcttacattcataattttttgtcttatctgtaataattaatgtatataaaagcactgctaaatttaaagatttcacaaaaaaatggaatttgggctagaagcttaatttgtggtataaacattagagattctaccttcatgtatccctccctccatttttcacttcatatcatggcttctaaaatctcagatagaaaaataaacaatcaaacaaacacaggcctccaagggagcaggtttccctttacagtgaaaatgtcctgggcccctcagccccagagtaggtcatttatccagttctgcattgtctatgttctattctatggactctacccactataaattgactatcttccagtaagttaattgttattttctgtgctgtggcttaattcagaatccaaggtgtcatcaatcaataatgtctaatgagaaagctcctaaagttggcatgaaggtataaccacacacttggaggttaaacattcagggtataacacccataagcagctctggctattctagacataaaatggcagaagtcgggtccaaagctaaaccttaaaaccttggccccggaacaccttccacctgtgcaccgggagtctcatcaacctcatccttcctggccgtcgattctgagaatctcatctcaaccgtaaaaaccaaagcagggagctgtcaatcaggggagtaagtccctaattctccatttctgggttttctcacttttgcctgatctttttcctgcccttatatttcattcacaagcccaggaatagtactcaaacgctaattgagtcagggtagcaacagcggcccgcagtcctcagcattctcagtaggaagatctctcttgtgctgggtatgggtatttcccttccaattatattcactcgtgatttctgcttgaagaagaagaaagcttttattttccaaaaaagtttgtgtttgatttttaaaaaaaaaatttcacttatattttaaggatgtttttaggtaagaaaggtaaacaaaagagaaaggaagaaaggaaggaaggaagggagggagggagggagggagggagggagggagggagggagggagggagggaggaaaggaaggaaggaaggaaggaaggaaggaaggaaggaaggaaggaaggaaggaaagaaggaagaggatcaagaactcagaatgccagtgtcctgtagtattttttaacagttctgaatggtcctaaaacttttcttttctgtagtgttttcccactaagtctgtgctgttgggaacaaaaggagggatttgggaggtaaataaagaaagctctgatctctcagtgaaactgctcaggtctctgtggctctctctgcagtgccctttgcaggtctcctcacatgacacttgggcaggatgctaattgtcacaaacagcaggacacttagctttctgcagaatgcacatctctctagctatctctgcaaaagtccttgttagtaaaatctacttgattcccaccgggcagcaatgcagaaactgctactcctacgcacaggtctagcataaaagtataatgagattcaacaaaagaaactttgggcttgaacattaatcttccttttatcaggatgtgacccaagaatacctgatctgactttctgcattgttattcatggagttctttgtcctcctgtggaagtaaaccaaggttagccctcttcaatttgggaaatgtcatggtggcagccagagatgtagagagggacctccattctgatgccaaggatcaaccttgtgcagattcctggatggaaatacaggttactttgtgctttcctttgtaacctacactggaataccttgtccttgaatagtgtttggttttctaaatcaaatctcaaatctacataaactcatgatcaaaagctcattgagacgcgatttttcctttttaaatgcaaggttccctgaactaaccagacagagtatgttcagatacactcttaactcaccagttacagtttgtatttgtattatatttgtatttgtttgtgtttggggaaacttacaatggaagagaagcactacacacctgcacaccgttatagagctatagcctggaaaggcacaccccttgccctccctgtaggagggctctccacatgtctccctcctaaggtagcagtatttgagcgaactgcacagacaggaagaatactttcaccttcctgtcctcctctgatgcatgtctttcaacccagaaagaacttttctgatcttctctagagacaaatagtaaggctctcatgagagaagtgctttcccctaacaaacaaggagcatccttatctctgaaggtacagaaaggagtgtgagcagccaggcctggtgagactcctcacacttccttactataagctataggctctgtccaatgacacatctccaatgctacccacttcttcaccaaaactagtattacaaatgtacaggagatttctgcctcatgaaaacttatcttaaatccagctacatgtttttctcttgctaatttatctcttatcatagaaactttagccatgaacatggaccggatgaacaaagacatttctcattccttttgtgttaaagtccactttcctgtttaaagatgtgtgtgtccgttaagattttctttgtttctttctcagtgaagtggttaggagttgcttatggaagaatgctagctgggtttacaatcaatatctcacagtggttttacaagagcgtgagattgtagtagcaacgctttttggtaacacccaggggagtttctattttgacttctaagcagagattgcaaagactaaaggataatttatgtaggaaatagtgaattgcgaacgtaggttcccctttgcttgcacctacacgtaactgcttgtttcttcagaataaaactttgaagatggcagcacttgccagactgtggggatatttttgaaaaactctgtggtgaggagataaaaatttttttggtttagagttaataattatttgacaaaatattaccatctacatttcaatacctctgtcaggcaggagatgatgtgcaaaaacaaggtagagtaaaatattaaatattaatctctgaatttaaaaatggaaccagtgttcatgatctggcaaggatgagtggtgaatagctgttttgcctcctgcctgtcttccaatcgttctaaaacttacagtccggcatgggctagcttcatgccttggtgtcatagttgatatgcccatgaaagacttcccatcagtgcagaaactcctaattggtcaaaatactgagaataagtcactgttgcatgtacaggcctaagtaggtcatcaatatcaagttcccaagtctcagggaacatcatgtaaaaggggacagaaataagagctggcagatggagaaaaatgttatgagatgctctgttctgcatagacacggccattacaatcatgaacacacaccatctgtgcttatttacacaggatctcacaaggttgggtcctgttgacattctgtcatcatgcgaggaactaatgggaacatgcccctccatgaagagccattggtagttaatggctgctggaggaggacatcttcagtgatagactgaactatttatagtagtatatagtatagtaggaacataaatacacacatttatgttcctataaataccctctcgcctatgacatgcaggggaccccaattaaacacagtagatagatatacatacatagacacaaatgaacgtagaaaggatgctatttgagaagtggggtccagtgggaaggggaggggaacacataatggtgatagggtggatataatcaaaacaaattacacatatgtatgaaaaagccaaaaggaaattaataataagaaggataagcgttgtttgtttatttattttttaacatttattatcatgtggtaggagtttgtattccatggcacatctatgaaggtcaaagggcaaccttatggagtcagctctatcatcccattttgacacaggttccagggacagaactcagactgccagtattgtttgccaagtgcctttatctcatgaactgtcttgtcaccaactttggcttttttagactaacctgtgggagggctacagctccatgcctacatcaggacagatggtgccaggggatacaatgaatataaacctggacttttcccacatcagagccctttttgtttttctccttgtaatcaacacacctcctctccatctgtgaccacaaatccagggggaacctggcacaagtagtcacgtctccccggggaaccacctaacatgcaaggttctgaaagagaaggctgaacaaaaagggaggccttccagatggaaacgacatatgcatttggttaggtaataaatggagcacacagaagagagttttggctaagcatttgctaagactgcaaactcagggacattagcaaagagtagttttagtcacagcaggccactgagcttttaaaatgtgttcagtgtatgctgggatgtcctgtaagtaaaacacatagcagaatttgaagaggctataaaaaggataggaacatatttcattggtgttttttttttatatgatattctaagttaactaaagtaagtcatcaaaactcatctaaacgattttcttttattcagtatagccagccaacaatttgaaattacttctggcttgcatttgtgattctcacagtattgctactggaccttgctgccctcaagaggaagactctttaagaaatgcttcatggagaagcgataaaaggaaataatactcaaatgtggtctcttgctatagcaacaaacaaacaaacaaacaaacaaacaaggtaccaaattgagccaaatgatgactactaatgactcttatgcattgagtatgtgacagtcactcggttctctcttaatcacacacacaccttggtctgtctctgttttctgtcttacagataggaaagacggaagtttagcaattgggtatgggtgtgaaacatttaggaggtggagcctcaatacaggaagtgagtcaccggggacaggctttgaggttttgtaacctgcccccatttgtctgttctttgcttcctaacaacggatgcaatgtgacaactgtcttactttcctgctgctatgctgggccctccaagaatggactgtttcccctcagactgcaatccacacaggtccctcctcccttagactctccccttctcagatatttggttctaatgatgaggaaagtaactaacacaccacacgccgtgcccttgcacttggccaaagaaacagagatcaaagtgagcaactctcgggagactctggcaatagaaataatagaaacattatagctaaagaccagtaggctatgaacagcaatgacttaagccaggtttgactcaatacatgaggtggtaagaatggtagaagaaaaccctgagtcctaagctagggttttgatggttaaaagaaaatccctgagtctccaaactcaccagaatttgttccagcaataaatagatagatagatagatagatagatagatagatagatagatagatagatagatagatagatagatataaatagatatagatttagagacagagggcttccactacatgtaagtcattgtctactatatgtaaggcacttacatacagcgatgtaaaaataactataaaacgcaaccccagcctcccatcactatgagcaagccccagaagccaccaggaagtagcaaggttggtgtggtggaatagcagcacctctatggggttctcagactcacactctttctcacccaggttctttactgtgactgtagacaaatcacttctctcttctagcaccaagttttcttatctgtgaagttcatgtgcatttatctatttattcaaaggtgtagtcttgtgtatcaggctccttgaactcactctgtagcagaggatggctttgaatttcttatcttttgactccatctcttatgtgcaaccatgcctgacttgtgtgatctggggatggtatcgagggctttgactctgctagccaaaagcttgcctcaccaagctatatccctagttcctggtgtaccgttgtctttcctaatcaccatagaagctgaaaggaaaaaaaaaaatccagaagagcatcgtattgatgcccctgaaattatgactgaattgtgtccttctaaaccctttcaaagttgaaaatttcatgaatcaaaagtgaatttagctcagccacacagttcagtacagggagccagtctgggtatttttgatctcaaagctaactagtcactgcagctcatggctgctgcccagttccaaaaacaaacaaacaaacaaacaaaaaaaaccaaacaaaaaaacaaaaacaaaaacaaaaacaaaaaaacaacccagcatcctgttgcgtattgctagccgagaggacaaggttaaaatgaaaactcaacttgtagctttctctgagcatgatcagcctaatgtgatcacgccagcagcgcttagaacattgggaaagtacaagactaagaatggagaacagcagtgtgcaaatcagctttgtgacctgccctgtgatgtgtcagacttaggagttcattcactagccaggctgaggcaagaagaggatggagccactgttgtggggatgcaaggttcacagacacggccaggcatcccggttttctttctgtcgctgtgctgaatgtcatggccaaaagcaattcggggaaggaaagggtttgcttcatcttccatgtttcagttcaccattgagaaagtcagagcaggaactcaagcaggatcagaggagctgctcattggcttcgacacccatcgctctctatcacaattctctggttgcttttggatgaagccaggcccacctgcctatggatgctgtcaatcatgtgggctgagtcctcccacagtaatcatcaagagaattcctcagaaacatagccccgagccaatttgtttgaggcaattcttccactgagaggttgttctatgtcatgtcatgttgacaataaaaactaagccagaacctcaggctcctagctcaattctagtcacacccaattgagaaagccattgactgtgttagccatttttaaaactcattgagaggattctggtaggatgaataagctgttaaaggcgtatgacacaagtctggtgaccccaattctatctatagaaatcgccagtcaacctggttgggcccatatagtgaaggggagaactgactcacatgctctgtcctctgatctcttcctgttcatgtttacatacccacacacagacacacacacacacacacacgtaacaaaatagtttttaaaaattatcaaggataagtcccaacaatacatttacaatataactcaaactcagagattattgcggaagagaggaacaaagaaattataagaggcaaaggaacagtgaacttgctatgaaattgtatctcctaggaatgtcagaaactacacccgtaaaatcttaccaacatggctgcctaaacacgacctgcatgaggatgacatcaagaggcattctaactagatgggggaaggtcacaagacctcactactacacaaagaactatcagggatgctgggagttggagaaatagctttccccaggaaaagcacatcaagtacttttccagtaccaaatagacagctctgaagatatgcataaaggtaacattctatgctaagttcatatttcttaagataacgctataaagttggtgtgctcagcatattttattagtgagaaggtgtagccttgtgagttagtgcggttggagggtcataaggacacacattctttgacacagggtctgtacttggtctcttgctgcccggagtgtgatgtttgaggtttggaataaaacctcgatgactgtatccataataagactttgggaagctaccatgaagatgcagacccaggctctgctgcggttgcaagcgctgtcttgcagaacttctaatgacgggcactatttctgttctcaggcaaacagagctgcctatgcccttcctcagggtccttcacctctgttggcattcccagaagtgggcaggggagtttattctaacagcctttttagccttgtaggccactcttcccttaccaggacacacattattaaggctacagggatgaagattgtcaatgggctcattgcctctgaacaaggcaggtgagtgagatgtgagcagcccatgggcaatgtgggcccttaagttacttagacaggtgtgcactgagctgctaagagccatgagaggaaaggtattagagaaaggacttccgggagagccacaaaaccagattacaaatcactatatgaagattgagttataatagtcctttttcatttagttgcaaagtattttatctatgtttttattttcctatgttttcagttttcaaaatggcaaatcaaaactcttgggctatggagatggtttagtgggtgagcttgacaaggataagggcttgtgtctgtatccacaatcccgatgtaaacactgagtttaaccatacattcctgtcgacattgctttgaggtggagacaggtcaatgcctggtgtttgctgccagccagtcagagtatcagaaatggcaagctcaagtttagtgagagatcttatctcaaaacagaacaacaccagaacaaaagggtggaaagcaacagaagaaaaaaaagatgctgacctctggcctccatgtgcagatacaggcacaagtgcactttttccatctctctgtctctccacagctcatgcaggtttcagaaagccttgctgggagttgtaggtgctgtcatcatagcagtcggatgtgtaaaagaaaatgtgtgcctttagccagacgggccataaagagaccttgctcatccttagggagacataggtagagtcagattaaaggaagagacccagccccactccctgccagctctctaaccttatctctccccaacaagctttgctgtaatattactggtattgggaatgctgcaggcagccttattcccactgaaggtagaaaatggaaacaattggctgctaatttgtgtgcagcaggagatgctccagggcttctcaaggtctctggatctgcctggtaacaaccctgttgtctgggcaggccctatcctcccttccttacttgccaagctcagtctgtgcatttgctcatgcagccgcgtggcaaaaagccccgtgaaaccactggaaggcctctcaaggacagggcatcttgtgaatgggccatttgaaacctccactccatctcattcaagtcttttgggaaagaggtgcaggtgatgtccttgaatgttagaagctctggagtggccaattgctggcccactgtcctatggagtgttcccatctcaggtcactataagtgcttggggttcttgtcctgacttttggtcatctctgctttaaccgacaccttataggttaagcagggtgcagaaggcagaaataaaagtagggtataacttcctttttcatccaagagaccttaatatgagtatgtagtttctaaaaactttaatagtcagtcattttcctggtataagttgagcctttacttaataatagtatattacactagtaatatgtgctaatgcggctggtgatcttctggagccagttaataaatgaaaaaaaaaaaaaaaacaaaaaacaaaaaacaaacaactaccaagatttgtgggaactgtgagagagaatcaagggggaatttattttagaacgaaaatcaagaaaagtctattgtgctcttaaatcaatcccagtaagggaagtcaggttgctgtcgattcccatgttaagccaagatatctttctcaaaggatcttaacacataaggatctgagaatgcgcatttgtcagcccgtcttttcctcctcctccttctccttcctcctccttcctccccctcctccctttcttcctcctctgccccctcctcctcttcttcctctcttctctgtgtagccttggctttggctgtcctggaactcactctgtagatcaggctggtctcaaactcacagagatctgcccacctttgccttctgagtgctggaattaaagacatgcaccactaccacccagcaaccagaagctccttgaagggacaaggtctaactctccaggaaccggtgaccctcagggttgctggttctggactacatcacaaaggagatgactagcatgtacgaatgcttcccagggtaatcaatatcccttctgatcaaacatttttataagtctggaggtcaaacaaaagatgtctggatgtgatcaacacggcagagcctctcccttcaactaccttcttcctacttggatgtcttttctgtcttctgatgaggtacagttcactcagctctgacacaaactccaggttggaagtgtgtcaggaggagctcatgaaagacagcaaagggaaggagggtcttttgtgtgtcatacattccctcctggtcgcatctctttgcctgtccattgtccttgtccctcagttcattctttgttcagaccctagagttgttattcatgtaaatgtcctctcatggcttccagagttttcttagcaatgccatttaccaaacagcaatgaaacagacagaaattcaagattcagagggctctgtgacttgtagacacacacagaaccattcccatagctctgaagacagaattggaaaaagttaccacacgaggaaagctaggctaaagagaatttatctctttcagggactgggaactcagctctgtaatcccagttatttgggagatggaggcaggaccacgggtaggagactaacttaggctagagcaaattccagtttgtacacttcgtgaggctgtctctcaaggagaaataaaagagagctaggaacatagtttagaagagagcgcttgcccagtgtgaggaggtatgctcaatactgagcacaattactttctcagaaccagcatatccttgtgtgacatgggggtccctttgacttgggtaggaggatctgcctcctatggtcctgtgaggattccaatgtgctgaagttggtttataaccaaggaaatgttaggagtaagtgagtgtcaaacaacacagacaaaaatggtgtagtgtgtgttttgactttgccaccttgggtcagtgagtcagtcaggtgttggggtttctttaaggacattagcaatgagagcatattgtcacatggcttagtttctgcctattctgggcttatgcattccaggaactgatataaactttgaacatggccctgagtagcacgctggggaggaagaagagggcaggactcaagccattacagcaggtcggttctgctccaggtgctgaggtggacctgggcagggaggtggaggataatggtgaatagctaggcagggtatggaggcagacttggattgtatgaagaaaggagatagttctcagtgccaggatgttttctttctctgtgcaaatgaattccatgtgtctgtctccttttcttctgccaggacttggctgaaatactcaagttggcttgaaggctttgttggaggtaccgtccagtcaaggtcttgagacttgtatcacggattgtgtccatattttggagctggacatgtgtcctgagtggccttcagttctgtgttggagcctgtacctgttagtgatgctcagttgctaaccccaacccattctcctttccaagctgcatgcttacgattaggtgcttcatcctcatacaagaggatcaacacagtgtcaagagacttgacttggagttctgagctcactgtggtctttctgggtttcagtgttctcagtgttcttagtgttagaatgatggtaatgtgccttaggtacttataggacatgcaagtacctaacggccccaccgcagaatccatggctacgtaagtagtcaatgcactattgttattctatgtggacagattacataaagcataggtgctcctatcagtctgacaggaatctgagcctctttctcatctgtacttgaagcttgtggtgcagtgatgtcctggaccctctgacttgttctctgactttggttgttgattgtctattcctagagcagagtttcttcttttgttctcagaagcagtcagcagaacacagcagaatttctctcttagatatgcttttccaggaaaacgcgtgaacactgatcagagattccatgtatttgtcaaagcaaactttcgtgaatgttaaataatggaactatgcccagagatgacttaccccctttccttgtccatgcctgtccttgcttggctttgtcctgagcccactccaagcaggtgtgtcagaagtcctgacacatacagaaatcgagcccagttggaaatctggcaacccatccttttgaactgaattccaccctggtgtccttggagtgccctcagagtcatgacaacacctggtacctgcctttgttcaagctgagggataaactccattattagaacatcatcgggtcctgaatgtgttggctgctgttgctattgtgcaatttaaatatacaaggctttcaaatgagtttattaaaaggcccattgtgttttaaaaggctgaaaaactttgctataggacatggaggtgagtgaataaaatgaatcaaaaatattttaaaattacgtttttcattcaatatttagcaaaattttttactgaatacctgtgtttagcagacacactaagccaaagataataacaataaaatttcctgccctattacagcagtatgtctccctaggctataaggtgtcccacccattcctgtgttccctctgtgtcctgattgcctggagataaacagcctttgttctgcattcttgccacaaggccatcctgcctcacctcatgcaacatcaaatccagccttcctggaagccacacctctgaagccaagagacaaaatgaacctttctggcttgcaaaccatttctctcaggtgcttgctgtggggtgagggctgactgacgtagatcgggaagagagtccagagcacacaggtagacatgcagaaagagggcgtggttctggtagacaagtggcatccagaggaggctctgaaagactggagactgtggttctgccattgggctacagctgaaggccataaggcgaaagacagttcaactgtggtagagcactgtgggctgctgtaggtggatgtgtgagggctggcacagcagctggtaggggagaaagtgaggaattccttacacagttgcttctccacccttcccccgagtgaaatcagacataaggtcagctgaggaggaggatggggcatgagaaacagagaggaaagggacgttgcattctgcagtagactaggagatgtatcatgcttgctcttaggctcactgaggtgtatgtttatgaagaaaaagaaaagtaacttccactgtacacatctcgccagctgtattaacctcatgggcttgagggcaaggggactgggcagttaacttcaaccaggactgggattttgccaaatgagtgtagcaagggcaagggaacgaaggacatgtgtgaagggagaaaaaatgatggctgtggagtccgaggtagggaagggaaacggtctgacagagacagctaggaggccaggatggtgggaaggcagtcggtcatgaactgtgccagcaactggttttagtaagatagcgcatgtgtcctgggacagagagactgctctgtgtgtggtagtcagtagggagacaccctgcaagcttagactacagacatattgcaggggttagaagacaggcagtggctagaaccctaagatggggatggaaggtatcagagggcaggcaggccttccggacactaaaggatggggttttgggttttagaaggctcacgcgtggtcttagttaccgtttctgttgctgttatgaaacagccagacaaaggcaatttaagggagggagggagggtttagggtacagtccattgtcagggatgccaaggcagttggtcacattgtatctgttgtctggaagcagagagcagtggctacgtttactcagctcatattctcctttctatgtcttccaggacccaagtgcagggtggtgccatcttcctttagggtaaatcttgtcgccccattaacctaagcaaggtcgtcctttacaagcatgcccactggctaacccaaacaaccctcatgggtctgctttaagcttctcttctaagtgactgcagattctctaacgttgacagttaacgcgatcacatctatccactatgggcgctgagggtttaatgagtttctctactttcgatagcaagacatctgtttagagtgcactatcagctttctctgcaggtatacatcaggctttggccgcaacagattgcactcttgtgaaatggaggagtccgtgtcagcgtaggaaatgaaggctaacactatggatgggcttacgatgcggcacacattcagagggggcacacaccgcaggcaaagcactgtccgttgcagtgggatagggaattcaagacccagatgccgataggtgggtaaatgtgactgcaggagctggcagagctgtttttgtagctagccttacgtgctgtccctctgaactttccaggcaacagaacccctctaggacagtgtcacaccacagccacctctctttactgcctactttcctgactcagcatgcttcaattagccatagaaactttaaaagcgtacattgccctcctggagtccacggaggtcaagaaaacctatcctaaaatctcaaagtctggggttctcacctcttcccttcacattagctatgtacccctagaaaagccacttgaaccatcgtctcataggtaaaatggggcccccatttagatgtggcaaccaatgaggaaaagtctctaccagggcagttctctctcagaacagtcctagcacacagaaaaggcctgctcaattttaaccacccaggtgtgaagaaaaaaaaccaaaaaaaaaaaaaaaaccaccttcctgtttgagctctttctggatggcactcccacaccagccagccagccagcgtagcgatgcttggggggtggggtggggtgcgatagaggatggccactctggtctgcagtaacccccagtgaaaactgatggggattaactccaatttttattaatagagcagacttgtagagttccctgagccaaaggtgtgcacttcttgttccaggtaaccccggaaatgtagcaccccattctctctatttacacaggaaggaagctatgctgttgctctgagcttctgtgtcagccgccaataagccagagggaacaggaatagagacagctgagtgaagtgaattaaaatgtgccacagccacatgcaaggtagcttttctctgcttcttgtaagacccccagcctggactggtcaggctacggcatgaaccgttcatgccgccttctgattttgtatttttttttttttttttttttttttttttgtgagctccaagctcacgctcagagactctggggctgagataatgagtctagactgctcatttgctctgcctggcagatgggagcacctgccacggggcaggctggctcgacagaggttggacagtgccagacgagtcagagccttcctctgagtgccacaaggttatacaattaagggagggattgaatcgaaacatcttatgtcaaccctcgagcaagcaaaaagtacatcttcctgttcttcaggttgggaatttagtggaattaccctgaatggggaacttgaatcataagaaagttttcttacaatgttcctagaagtttctggaagtaataaaaactgtgttttgattctttttggacctctttagagcctgtaggattcaacaagcatcaaacaagtaatctctttctttctctctctctctctctctctctgtgtgtgtgtgtgtgtgtgtgtgtgtgtgtgcctgtgtgcatgtgtgtacatgactgcatgtgtgtgcttatgtatgtatatacctctgtgtgcctgtgtgcatgtgtgtgtgtgcttatgtatgcgtatacctctgtgtgtgtgcctgtgtgcatgtgtgtgtgtgcctgagtgtgcttatgtatttgctctgtgtatgtgcacacactaattattttaacaaatgaattggatttgagattggggctgtaagtgttttccctctaggttgtaacttcttccttgctccaaccactcatgtacccaatcataaatcctacttagtatctcactaagtaggagtcagcttctcttgcctgaccctaaagagctcaaagaattggagaaacatctacagtgggagcctggacctggattctctctctctctctctctctctctctctctctctctctctctttctctctctctatccatccatccatctatctatctatctatctatctatctatctatctatctatctatctattggagataggataatactgcctctggtcacatctggtctattggtgtagggaatagaagctagggttttgtgccttctgattaagcagtctatctgagctatatcctacccactagaggtagagtttagcacaagagcagatacccacaaatgaatgacccagggcaaatcacagcacctcccactcacagctttctatcaaaagaagagacaatcaatcgagggactttacagcccatcaacagggtcctgatcagtgcctactcaagtccaatgtaaaatttaagagttaatgactttggacctcagttttatcagttccagcttttctatgtttgagatgctctaagccacagtcttacttcaacttggacaatgacccctgatttttgtttgtgttttgctttttattttaacatttttctgttttgtgtgcatagtgtttagcctgtatgtatgtatgtatgtatgtatgtatgtatgtatgtatgtatgaatgtatatatttatcacatgtatccactgacagtagaggccagaaaaaaacatcggagcccctggaactggagataaggacagctgtaagctgccatgacggttctgggagttgagcctgaatcctctggaagagcagcaattacatgttaccgagacatctctccagcccgttctttagttcccattttgttgttttgaagcaggatctcatgtagtccaagatgatcttgaacgtctaatcctcctgttcctaactcttgagtgcctgggattatagggtggaccaccatgttcagtttatgtagtgccagggaccaaacccagggatttgtgtatgctaagtaagtgttctacaactaagctacatcccaggacatggtctcaggtctgcttaattgtggctcagtctaaaatcacccagtaccatcatgataagggccttgggatcctggcatgtagcactgaaagcattaacaatgttgctaagatctctaaggagccttctagctttaaaattgtctcctttgttttatatgatagaccttccttaggctctgtcccctataatgttctgctataccgcctaagacatgccatacctctaagatctgccatacctcctaagacctgacataccacccaagacctgctatcctgactcaaacaatgaggacaatggaccatggagtgaaacctctcaaatcgaccctctccctttggtgttttgttatggcaccaagaagctgaggatggctggggtggcactggaagacataaaggatgctgctcaaggagtctcctggcagtgcacctttttttcctttgcaaactagtttgcacctgcagcaacgatgactttgcctggttgcttgtgagttgagttgagaattctttggaactcttaacctcctagggaaagtttagattccatttttcttcctctgattaatgattttaaaacgtttttcaaatctagaagaatcagtaaaagcctgctgcacaaaaacgcatctagggactgaatctatatttattgtcaataactgtcccattttctttattcattgctgtatctgctgcaaccttactcttctcataagactcatatcaaatatggctccttccctgaggctcttccaaatcactcaaatgtctcctcctgacctctgaccaaacctcccagtgccctgcaagagaggcataatcacttcctaggcaataatccccagaaaggtaaggatggacgattcttcattcaactcatatgcatagtgtagctcagcatgctgcctgcagtgagggctgtgccaacatctgtcgtatgaccatgttgttcctatgactgactcccatcccccatcatggttcacgcacgtgtccatggagaccttagagcagcatccatctcttgctcccgtgttcccagctctagccttcacagctcctcccactctctcttctcctcttcttgtgttgaaggttaattattttcattgacaaaatctgtcacgatacacctcaattgtctgttcttctctgttaatgctcgggactattttaagaatgtgataaaaggtggcagctactatttataacccaagacggagtcctgaattcccctgtgggtcacgtgcacatccatcttcatttctgctcaaaagctgtggtgtttcctctgagcctgcgaggtttacatttctcctcatgtgtcacctttccttgccactttacctgtcacagaggagtctcatgccattttttgcccaggctttcattgtacatttgactctgatgcctcttttccatacaaaagcagaagtgaggggaaaccctggtgaactatgtaaacacactgctactagacatgagagcttcattatttaagaaaaagccagccttgcccctatgacttaagattgacgtgtatactttataagacctcaacattaaaagagtgatgatatctctatctctatctctatctctatctctatctctatctctatctctatctctatctctatctctatctctatctatctatctatctatctatctatctatctatctctatttcctataatgtcatagtcatttggtattgaaaaccaaggtatgggcttggaacattgatcagtgggtaaaccacttatggacaagcacagggacctgagttcaaatccccagaactcctgtaaagctgggtgctggtgacacacacatgagattccagtgtttctatggtaagatgggaatcagacaggagactccctaggacttgaggaccagatgcttaggaggacagagtggtgaacaaggagaccctgtcttaaacaaagtaaaaagtgtggactcacagctgaggttgtcctctgacttccacaaacttaccatggtccacacacatgcctgtcctaacacgaacaaatttaacaaatatacacatgcacacgaagactaagatatgaatagctacaatcagtccctagcataacagagatgtatctttggtgctgaggagggcgcttgatctcgcacctgctcatatgcactcagcatcacatccaggctctgggtcagagaattaggatggcgttcagccctagcactgcattaatggtgtgtaatcacactgacaacagattcatcactttggcatccagggaaggattaagactcattacctcagggcttcacagaacttcacagaaactgcacagttccccccccccccgcacccccgcccctcttctccagcctcacccagtcagagctgtgatttagaagataattctctaggttttataacacatacaagctctctcctcttaaatactcctaaaagtaaggtgaaattgttattttccagcagtttccaaagtaattgttttccccaaggctctatcaatacctctgaggtaggggtaggagtggacattgggacaggaggctgatatagaggcaatatccagggtagcagagttcctgactcgggtggacattgccttaatatagttgtggtaacgaagtaccacagactgcatggcttaaccactggcagccaatttctttccactctggaggttggagatgcaactctggaggttgatgatgcatcatcagggtggcttctgctaggctcctacgtgtggttgtccacctctgtctctatattgacccatttggtactgttacaatgaaatccttgagaccaggtggattattaacactggggttttatttccttttggttctggaggctgagaacctaaacagaaacacccacgtctgtggagagtcttcttgctgtgtctgtgctcatggaagacggaagggcaaggcagcccacgcctgcacatacatgtgccctctgtgatgaggaaaccctctcagcccagtgagctgtgatcagcctcatctctgccactctggctacatctggcctttgcataggacacttagggccctagcacctaatgttctcttatgtgtgtctgtgtcctgacaccttatgagaaactgctctgggatgtagcacagctagtgctatgtttacccagcatacacaaaaccaaggttgtggccaaggtcctcatcattgcaggagcacatggtggtacactcctgttgggcttgaggtcgtcctaacagtctcgttttaactgaatttaccccctaaagaacctgtctctaaattcagtaccattttgaggtactgggacttacaaaatcaacaaagaaacttggagggtaatagattggtcaccgagacatcaatgtctacacacagggacttctggagagccagggttttccataggcttggttctggattgtttgtttggtttttttgttttgttttgttttgttttgttttcaaaatctcacttgtgggcagcagtaatttgaatgaaggatgggctcagaactgtaaaatatacgattatgtccttctgcttggaagctgaaatgagtactgaaaatggatcagagggagggagattgaggcttccactgtgagcctttcctgtgagttgaccacgttcatgcttttggatatggttatttggctaatgcacttaactgtgggcaggagcaatagcccagtggttaagaatagtcttctgaaagaccagtttgagctttagctcacaacaacttgccagctccaggaaatatgaacccctattctgagctctgtaggcacctctataaatacacacacacacacacacacacacacacacacacacacacgtgcacaagcacacacacattaataaattgacttaatcattcagtgtatctttctttgcagatattcattaccaggcatagtcaggaaatccttgtttagttcttacttatctaatttataagacactacacagaattgcagttatttctgcagcactgaccttatccatcttctccctgaccttgtatatttaggagaggttgatctgctggtctcaaaaattcacgctggcacctagaattgtcatcaccaaagcgtgcttgaaaggaactttccacacaccgacattaatccttgttgatggtctggagtaatccatgggcacagaatcactcctctgcaccagactgttggagctcatgtgtggagggcaagaaagcagtgttgtatgcatctctctgagtcggtggcagtcataacaggatgtgatgcgggctcctgttccaggacagttctagggtttgcactaatggaagatatgaggaactgctcagaaccccttggtagatggctgtggtctccgcctaaccatctgttatatcttggcattatactacatgtaattcatatatttatatatatattcattctagaagataaatcctataaactaaggacaatggccttcttatttaaaactcaattgccaacattcagagcattcctgataatgagcaaatcagagtgaggcaagacagagagattatagggacctgggacacagagcaggagggaagaaaaccttacctatcctgcagacagtcgaaagactgcagataccaccgaggaagcccaaatcatttacagagacaatatatgttttccaaaagctgtcttgtcaaggacagtgagtgggtcatacctccttagggctgagatgatgtatgaccttgggttcgtagcactccactttcagtctgtccctgtcaaaaattctacctcttgaaggaaattcttcaacttttagcattgctggaagccagactctctgagtgatgtgaggagtgcttagcaaccttttgagctgtaactttagagccactgaactcctatataggcccactgtaaagaaacccaattgcaactcttcctggtgaaacccacatccacattaatgtatgtctcattatttatctgagagcctctgtttattaactcttgtgtttgtggtctatgtaaaaaaaggccttttaataaattcttcaattgtgctccatcctgcaatccttttttgtggtgaagttacaaatcccaggtttgtgtgaatggaggtccctaagggaaaatgtgacttctcaagttgctgccttggttcctatcactggtgacaagagagtctgaggtgagaatgctcccgtgtcaaatagttatccccatgtatgttctgtcttgcctcaaggaattgagataatttatagaaagaaaaagcaatttgtgaagcacaatgttgcttgtaaagatgtgccaatcagtgatgaatgtagagaatagatgtggtttgactcacagggagtactatatggggtcagaatacactaggagccctctgacctcagtctggacatcaaaaagacttttagaagtagtgagtttgctctttgctggccggacattttaacattgtaaaacattgtttcaattgtctttgagcaaatgtcacctttgtttttagagttgtttcaaatgaaacacttgtatctggaagcacacactgctgcattatagatggtacatgaatccctcttccttttcagtaaaatctttcaaagttctgatgtccctcaagagacttgctttctgtgagaaatgactttggccaaactttcaaggtcattgggaattccttgcagcctcatgtgtaaataatcacagggaaagacactgccttaagcacctctgtcggcaaacaaagccatgaggcaggacaaattctgcacctctgggagcccatgacttgactttcagtggcattaaatcaggtacagtcccacagcaaggtcacagctcagcttctgtgaagcagttgtcctttctcacgggttgtacaggaagcacattcttgctcggggcaaaatgttttattaagatgattctttttgttattttctataaatgggcttttgtgacaatagctgtggcagtgtgtctctttaggacatccattgtataatgatactaacagagaatcattgagtgccacattaagctaatttctttccactgttttctctaagcatgcctttatttttacccagggatgaccttcttctctctcctttatctctcttcttccttttctcccctctcttccccctctctccctccttttctctcctctcccatccttcctctttctgtccccgttcctctttctcctcctcttctttttcttagtaaattgtggagttttaaaaaaatgcagtaggaaatatgaatctcagattatatccaaggcatttctccatcatctggggacacatagggttcactgctagttacagatcttacagagataaaactcgtaaaagcactctgtgccctggaaagagacaagtgccacaaatgcattcaaagtaagggacttaacttaaccccctgccaatggctgtttctcttcacacagtgaccaggaccatctctatcctttccagtatcaatcagcatctctctgtgttcaataatctattagggtttttttttttttttttttttttttttttttttggccattggtgacttggctgtgatacatatattagcatcaaccttaaaacactcctttgtgccatgctaagaaagcctggctaatgtgcagatgccagagggagaacccagcaggcacaaggttcacattcactggagggttgtgtattaacagtacagtcttacacagagttaggtaatactgtcatctttaatgcattaatgctgcttttggtattagctgcatccctagagaggtttatgtaaagttcagtctctttcataatgagtgaaaaagaatctcctgccattaatctgcactttcttatgtctatcttacattccctgggattttctgtcataaaggaattgtgtggacatgagattcagaaggcctgtgctgtttcagaaggcagttgcttgacagttaaaaccataaatagaaaatagtgcgtgtctagaacttttggtggcaaatactgtgtgttggttacacacctgggttctaaagtcacaattcttaggtttcaacttggaatgtacatttgcattctgggtaagatggttcaatgcaataactgtcaagaaatgttgcgtcttaaacacacacttttgatgaggcaagctatctcaggttcggatttgagacccaagcgacaaactgagttccttcaagtagagacattgagtggaacatagatgaaccaacccaattgtgcccagcctaaaatgctgaccaacacaattgggaacaaagttttaagcaattatgtttctgagtgattttgtacccagtaatagctgactagtacactggatggctggttacttaacatagacctgttttgttggatctaagtgatgctattgaatgctaaaaggtagaaaggttgaagaagcatcctagacagatgctggctaaccaaaccacagatcagtagaagaaatatactttactattctacatcacaatatctcacaataacctaatattttattttcaacattatataaatgagaagagctttaatataagctcaaaggcctcaatcacaggaaacaaggagatggataccacaccttgatttgattggcacactgtacacatggtaatgggtcgaactgtatcttgcgaatgtacacaattgtttcatgctaatcagagccataaaataattggagctaattttaggaatttaaagttgtgaagattaaatgggataacccacttagaaacactcaaatgaataaataaataatcagcaaacattaaattgtgtgattatattttttaccgaaattattatgctatactgtttaaaaggctatttagtttggagtgacatgatacaatatttttatgttttagttgagatactgttgttggaattgagcctatggccacagtttcatactaagcaaatgctctgtcaataagctgtacctccagccatttacatggatattaacacgttctattagaggtattattatccatgcttgtaaaaagtagaaattaaaagctgttcttcacaaacaagtggtgttcttttattgcttattattgttgttgtcgttgttgttttgtgtgtgtgtgtgtatgtgtggtgcatgctgtgtagatggatgcatgtggaactcagaagacagctttgtggaatgcattctcttttctacatttatgcttggtttggagagtgaacttagattgctaagacatgtatggcaaatgctttcttgaaccatctctctggcttcacaaacaagcatttcctaagcttagactctgagcatcatagaacaagtttggtttgtactgtttaaataaaagtttaagtggggatcggggttggagtaagaaggggaaaaaggggtaaggaagggctagccaaaacttaggatgcccgaagaatttgttacagaaacccactagtttagtttgtaagcccattgaaaatgtaaaatatagtgtacataaaagggggcttggacagaagtaccttgcatgggtagacattgatgttcaggagatataggttatcaaatgaaaatctcactgccaggtgtaggttgtgtcttggtatgatattttgattttgtttttgtcaacatgacacaagctagagtcatctggggagaggaaccttaattgagaaaatcccaccatcagattgcctgtaggcaactctagagggcattttctttattaataattattgatgttggcaggctcgtccatggtgagtggtactgcggttttataaggaagcagacagagcaagtcaacaaacaccactcctccatggcttctgcttcagtttttgcttcacctctctcagtgataaagggtgacctgggaagttataagatgaataaaccctatctgctccaagttgcttttgaacatggtattttatcagaggaatagaaatgtaactaagatgggatatctctctaagtgttattagtcaagaagaccctagaggaaccttcaaaccctttgctatatggctcttggttgcccaccataaccaaatgggaaaaccctattgtttaagacactactcattctgaatgcaggtcacagggaaacaaacctggacttaccaggaaactccaagcctactagctaactacatagtgccagaaagtgctgggcaggctgctgagagaggaaagatagcaatgtgttcaaccctgtacattataacactgattttccaagcaagatgtgccccatcagctcagtagtagcactgaaggttatggaggcaagcaaccatattcttttggttcaaaggcttgtttgacaagagggatgtcatgccatatactacaaagttgtccagaaactccagactggagaagatcatagaccctgggaggactctacccttattatgttgaatagtcaccccgtcaaactgcctacctttagacccacagacggatgctgttctcaacttatgtcagaaaagcttcctttcacagtggaaactggttaatatagagactcataactggtcaaggtgccaagtatgagtaactgtgagtgctcgcctgtggatgaatcatctagattaacctcccccatgtaaggctcaggggacatcgctgatgagtgggtataaaaaacagtatcagagccagtagatgaaggagagatcggtgaaaggctgacttcagaacacaacatggctgtggctcacaccaattcacagcaactgtggctaccggtacagtatcaagccagtcaaaattccaagatgaagtgaggagggcctctcccttgtactacacacttggcaaaggaacattgacagttaatggctgctaaaggagtgagagttactttcctttggggacatggttgctggtatggtgttgatatcccagtggttgaccctacacctattcacataaggacaatgctaattggacttagggggttatttacaataacaaaaagaaatgctgactggaagatggggtgatggtattaaagggacttggagggtggtagtattagataggtatgataaaaatactaacataggtatataaaattttccaaaataaataaaatagtaatacataaataagatcctatagagaaaacccaggacttcatggcctatattttgcatgggaacataactcctggccacattcataactcaatttcttacatcttttcctcattttgtctcatatttcatgtgtatatgtaagttatctcaaatcattaaatgcctcagtacaggggaacaccagggccaagaagtgggagtgggtgggtaggggagtggggaaggggaagggtatgggggacttttgggatagcatttgaaatgtaaatgaagaaaatacctaattaaaaaaatacacttcaatcatgacttgtatcttgaacagtttctgatgtcagataaagttgaatcaacagtagtctagaaggtttagtcttgtgttacctgtgacagtgaaagtctgtttctgtggctatgtgatgatttaattagcacggaaagaccttcattcataatcaggtcgataatatttcttcagacccagagtcggtgcctttgaaatacctgtgtggccctttgcgcagaccattttgctgatttgtttcctggttcaacctcaacggtgtctactatgttactgtctctttcagacacagagtatttgcatccctgtgtacaaaatgggaaagtctttttgctcagtgttgacaactgtagccttgttgcctgtattacactgtagttcggtacctggattctgagagacactctgctacttggagatacacagagcagagccttgaaggtcaatgtgcatagcaactttccaggtcctttccataaattgtgggtgctacaactgccaatgattcatgagctgcattcccagccacagtagaacagaagtaggcaaaccatgcccagaggtcaagtccagccacatgcttgctttttataaaactcgtattacaagaacacaagcatgctcctttgtttataagttgtctccattatggtggtggagtggatgcagtggagaaaccacagccccaaaggtctacgatggcaagagtctggttctgggcaaaaaataaaaacagtacatgcagagcatggtaggcttataactcaagcaacatcaggctgctaactggataaaacaggacccgctgtaagaatcaagtgacttcaatagctcctacatggactaatacgtaggatacagaagacactggcagtgagtgagactcatcagtatgagagatctggtatgaagcagcagttcccatgacaagtgtgtagcttcctttacttgctctgcacccccttcattcctcttgcctcagtctgttcatgtgcaaagtgagattcatgaaactagttattgcatccctctggagaactaatgattaggtctaaagaatagttaactcataacccactatatcaggttaatgaaataactgctaccattatgtaggcctggagaagaaggtcttgtcatctgtgaatgacatggccaccaaagtttctgtcactgtggatgctcagagtcaaatgtgtagatgttgcttgatttatatggattcctagaaaaggaccaaaataagtcaattggatttggttttgtcacagagctccagcatggatggtaacacagtttatcacgtggatggggaccattcacaatgacaaactttctcggttcactgtttacagtcaacaggtgctatactaggtgcattcactagttaatgtatccattaacttatgaagtttttctacaaactctgaaatgtacttactattactcactgcacttaagagatgacaaacataatgtccaacaaaattaagtaagcaaaggctaggagggaggctcagagggtaggaatgcctcctctgaaagcccaaagacttcagtgtgaatcaccaggacccataaaaataccagtcttagctgcattatgtctgcacaaccagacctcaaaatctcattagcttgctagcctggcccaaagtgcaagcttcagtggcagtcccttcaccaggcgatatggcaggagaatgatagaatacaccaatgtccttttctggccttcacatgtacatgattatgaacctgcacccacacactcacatgcatgcaccacacagacacagacacatatgtgtccacacccacatacacacaaacacacatatgcacatgcacataatacatacacacagaagcacttgcacacatgcacatatggatacacagtaactcagtttactcaaggtccaccaggtaattgctggcatccctattgggaagtcaggcacttgtcagaatcccggcattgtctcctgtgctggatacttttatgtcagcttggtagatgctaaagtcatctgagaggagggaacctcaattttaaaaatgtctctataataagtgtaggtaaaggctgtaagtacgcctgtggggcattttaattagtgaatgatgggggatggccagcccattgtgggtggtgccatcctgggctggtgttcctgtttcaataaggcaggctaagcaagccatgggaagcaagccagtaagcagtacctctccacaagctctgcatcagcccctgcctccaggttcctgccctgtttgcactcctgttctgacttccttcaatgatgaactacaaggtggaagtgtgagccagaaaaacccattcctcccctatttgcttttgatcatggtgtttcatcacaccactagaaaccataactaggacacttcctcttgctgatgataagtgtttccctagaaaataatcaatatctcttgatatgagagtctgttgtggggattatgttgcaggaaaatgtccccagcaaaatctgctacccattacactctgcaaatcactttagcgtgacaaccttactgtgaaataaggacttatcatatttattttaagagtagttgagtgttttgctcccaaagaccatgcggtttccattctggatcaagacatgcggacaaaacgggtccaggccacagcatggtgcacttctggcagtgagatcactgaaagtttctcattgtgtgtggtgagaagggcagggagaaggctaatcagataaatgtgctctccatacaagcctggcaacctgaggtcaattcccagaaatcatgtaaaggtgaaaattgtcttctgaattgcacactcacaccgtatgtgctcctcctcctcctcctcctcctcctcctccccctccccctccccctcctcctcctcctcctcctcctcctcctcctcctcctcctcctcctcctcctcctcctttctgatgcaaaagcaagaggtttattttctggcgcatcagggtcaaccctcaatcagtccctctaggcaaatgactagacggcgacccctgaatggctattacaagcagtttttatactttttaggggcacaggttacatcagcaaggttatagtccaaacttattggcgaagcatattgacctttaagtttattggctagcaagcatgacttgcatttggactctacctgggactttccagagggtcaggtgactatcagtcagtacattctgagaattttttttactcaagaatcttcctgtggatggagaatggatcttggcttagctttgaccccaggtgggagagaaaagctgtaaggagggtgtgggactggaaaggtgccacatccactccagtagtgacccgagtaacaggcccaaaagcctggacgcagtcccaaggtgaaaagttcacggaaacgtagtctcctggaaccgtggcgtcctgtgtaacaaatgctccaatgtccttgctttagttggtaaacggatctgtgtgctttccctcaatattgatttattataagtgcctctaaggattgattttgacatatagctaagttagattcttcagtcctaggcagtccttgagccaaccctgggcatggatagctgcgtcactgccctacacaggaatttacagttatctaggaagaaggaaggttgtggtctagggaggaactagagtagatacttagaactatagatagctgagttgcatcaatacacaggaatttacaatggcctagggggaaggtggactatataatagactagaattggaactatggcaagggcatgaagctcttacacctggcttttaagattaagctgatcttaggtggggctgtttttgatcccagttgttaacattgattttaccccagttggttcctgttagcttttaagtatgcattcctctgtttttttttgtaaaagtaattttgcatcagataatttcaatgtaccttgaatggccttaatgtatcacttaatttctttgttttctgtaatataaatgactgatgctcactttgacaaaaatactttcagataccacactcccttgtgtttgtatttgtttgtcatccgcaccaactccttgctcacctgtaaccaccagaacctgagtttcactcatggatcgaggacccaagtgaggtccatctgcggcagaaaggcccttagggtgcctcatcccacccacccaccccccttttcttgtacaagctttaatcctggatctacacttagggatcttgagtaactaactcatagtcttcaggtcctgtcctcagggtctcatattgttggtgcaggaccatcagctgcactgttcctattctctcttttatgaaggctctaagcttgttcaatatgcagggtccaaaggtcaaccatagcaagaaaacaattaggggtcctaacaaggtggatatgagagtggttaacccaggggaggagttaaaccaagacttgaacccaccctgactctgttgtctttctctcttccacttcgatagcccttctctcaccttggctattgaatccttaactaaactcaggtagcacaaaaaataaatagctggcctcccaacactggtaggccagctgttggcttctcccatcttgggggcacacatatatggggttttctcactggacactcctcaactttgggtgtctgcaccctaagccctaccctccaaggccacttctgggacacagtttagattcataagtcccttgtctcccacattgtgcttctagtcctgagcattaacacacacatgcacacagagcaggcatggaaataaacaaggaaatgtttcatagatatctcaacaccaacattgtaagattctgaccaattgaaatgcagttgactaacactgttgttttggtgaatttgtttcgcaatgtgctgaggacattgacttccaaagctcatgaaaacatgtgaaggggagggaccgctctggctacaatgtgggtctgtgcctcatggatgcttggtctcactggcatctcgagtgcatagaacatgctttggaatcaaattgtatcatctatgcttctgtgattttcacctgactgttgtcacattggatctggtttctgttctgcagacgttcagtggattccagagcaactgcttcacggatgagctggacatctgatctgaactgccaagagcattcttagtcaactgctttgagactatgccttcaatgtgggaaaggccacagggagaaagctccttcacttaggattttgacttatttgaggctcagtcagacatctgtccaaagaaatgatctgatagattggggactgtctcccacatgtaccattcaccctcagtctaagcatattgcaagcctttgacatttatctgagtgatcatttaaatatgtttaaatatgcatctcagggaacaatatcctcagcacatacactatgcatggtgtagcaccatgctgtgctatggacggactacaagaaggcttaggataaattcaggaggatatactgtatggcccctatattttctacctatgtattccatcaagaccagtggttctcaaccatcctaatactgtaaccttttaatacagttccctatgttgtggggaccccttaaccataaaattatttttgttgctaccttacaactataactttgctgctgtagtgaatcataatgtaaatatttggtatgtaggatatctggcatgtgatccctgtgagagtgttgctcaactcttaaaggggttgagacccacaagttgaaacatactgatctaggtccatatagcaactagtcaccaaaaaaaaaaaaaaaaatcagggtgagaggagagtacagtgaggttgtgaggagagtgcagtgaggttgtgaggagagtgcagtgaggttgtgaggagagtgcagtgagggtgtgaggagagtacagtgtgggtatgaggagagtacagtgaggatgtgaggagagtgcagtgagggtgtgaggagagtgcagtgaggttgtgaggagagtgcagtgaggttgtgaggagagtgcagtgagagtgtgaggagagtgcagtgtgggtatgaggagagtacagtgaggatgtgaggagagtgcagtgagggtgtgaggagagtgcagtgaggttgtgaggagagtgcagtgaggttgtgaggagagtgcagtgagggtgtgaggagagtgcagtgagaatgtgaggagaatgttcagttaaggtgtgaggaaagtcttcttcaagccaacaggaagaagagtcacactaactgtggagatgagctttccagggagcttaaaatctggttttctgagacaggaaggaacttattaggaaaggatactttatcatgagtctatgataggaatgaacactggttttgatgtcaattctctagggatgaaaagaacagcagcattagcgagccaagccttctcaggagaaaatatgatggcttttgattttttttgagacagtcttaagtgttccaggctgacattgaactcactttgtagccaaggatgactttcaactttctgatcctcctgcttctagctcttcagtgctgggatgccaggagtgcattactggtctgtgtggtactaggcagcgaatccagggcttcctgcatactaggcataggcatacttcctgtggactctaccaactgagccacacctcaagtctgagaagcctccccctacatttaatttaatagtccgtttctaacaagatgtgaagatttggaagcaatagtggctgctcccttttctccccccctccccctctctccatcttctgtttctcacttctctctcctccataggcttcatacatttgagcaggatgatatgctaacatgctgcttccaagttgaaagcaatggtagatggatccaggtgaactttgccagacactcagaggatacagaataaaacataaattatggagtaaaagcataacctattccaggatgcagccatgagggcctctcatttgctgacagccaaccgtgggccacataacctcatttgacaatagactcctatgacatcagtataacgaccccaatttcacaggtaaagccaaatagctaaagcagtgcttctcagcattgctaatgctgcgcccctttaattcagtttcctgtgttgtggtgacctccagccacaaagttatttttgttgctacttcataactgtgactttgctactgttatgaattgtaatgtaaatatttgtgttgtaaagtggtcttaggtgacccccaagaaaggggccaggacacatagtgtgagaacttagagagatgatatagctttatcatcatatatacaggaatggtgtttctcaagcccatctgagaacaagagacttcagattcagggtggaataaaccctgaaccagtaactgaagacaaacataagcatccaacaaagaatgcagagccactgggagagatgacagggagagcagactcacacacacaggggacactgctgtgtccccacagctttcaggacagcacagcagaaggatgtacagttgaatggaagcttgccatcgtctcggccatttgctggctctgtcaccttggaccagctgcttccaaaccatgcgcctcattctccttatcctatagagatgcagcaacggccaaggtcctgagagatggcgagcagagacatagcactcagcacccactcaagtgaaggatgctctgaaagacaaactcctacttctttcctttgggtcaagggatgactcattgaaatcattgtgatacatcctatttaactttacacatgagccttaggctgacacaggtgcagcgttcttgctgctggctgggagaacaccgcccccttctctattagagcaattacggcattcctgacacatgctgtcatgccattactcaagccgaagtctcaggtgataatttccactttgtcgggatgtcatttcaattcagcattcattaacattaatgctgttaatctatgaaaggaaagagcgtgcttgtttgcacagaatcatgtttgggaggcttcccgctccatcctcctagactccagttgccagcatagagatgcatttaggagataaggaagacatcttaataggaattaacacgatgtacatatgctaaaggagtggattggaaactgctcagcattctctagatcccttcccacatgagactgttctaatgtgtccattcagtgtttgcccatctgagcagatggatcttgtcactttcaaagtggagaaactctattttcatggcttccttcatgctgatgatgcccagatctatcgggagccagatcttctggctcctggtaggatatgatatcttttttttcagggacagtcagccttgacaaagcttgtgaaacccaggaagtctaagaagcctcagttttattttttcagcaccatgtgtgaggaaaccctaagatgacttcattttctgcttagaagcaggtgtttgaagatggaaggtgggaggtgggactggacgcgtagcccgtgctgcctggcgtctccttgcttgctactcactatctctggaagccttgctcttcaggcgggcaaaggactcccttcccaagtctgcaggccatctctctgcccacactttcattttattgttttgaggcaaggtcccatgtaatccaggctggctttgaacctgtggtcatgttgtctcagcctcctgagtgctgacattgcagttgtgcattgtctgatccagactcttccttttgtgcatttttgtttgtttgcttgtttgttttaagattgggcaagctcacaggggagcaaccattaggtcctttactctcctgcgcggacttcagttctttgtagttactgaaaaaggccttctctttcagtttctccacgctccatctgggccacagctgtgctgttttgcttccatctcctcttcccccaactcgtggatggaatctagacacctttctgcatcagttctttgccgttgagtttctcccctgtggtttgaagctgcctggttccactttaagtctgaacctgagaatggtctctcatttggaggagtgaaatatatactctaccatgtcttattagtttgtctgagattattttcaagggatggaaatctatttgaatgcaatgcattctcctatggcctcaaccgagagagctgatattgctaaacatttctctaggcacgctgcatattttattgcctttcattattttagagatctgagaagacatagagagaaagtggtatgaccccaggttgcacccattcaggctaactggagatggataaccccataaggtaaatgtattggcatctccctgaaaaggcagcaatgaaggaagagtcaccttactttctgcttgttgacataggaactcattttcctatgattttccctaacccaaatcttgaacattaaaaaagcaattattctcattcttttcctttctcttatcagcactgggaaaacagctcgaagtccaacatggaagaacacacacaccaagaactttgagaagcagtgtgcttgccttgactatgttttgtgcttctctactttagtagtatttgttgctaattcatttactttgctgcctgtgtttctttgggatttctctactgttcctttgagcagaatcactcaatgcaaattgttagattttttttttattatgcttagactgtattctaaactatgaattttctctaaataccttttatctgtgccttaggttaatatgagatgttgttgttacctatccttcagaataaaaatattttaccaattttattaagtaaaataagaatcttctttgagctgagtatgatagtgcatattgctaacaccggcctttgagaggcaaaggcaggcagagctttgtgaatccaaaacttgcctagtttacatggcaaatgttaggacagccagggctatatggtaagaatttggttcagaaaatacaaacaacaccctaaccaaaacccaccatataacaacaaaaataaccaaataaacaaagcaaataaagatctttgaaaacacaaaccaaggaaatcaacttgtggtaagagggttttttttttaatgtttttttttgttgttgttttttgtttttgatgaaaatacatgcaatatagaaaggaagggggccacttatactataaaaggagaagcatagaaattgttgcagcttatggatttgaatgaaatgaaaagtatttccagacttgtaagtactactgtaaggtcatagaagaggcattctcgaagaaactaaggctgccacatccaacccccacccccacccccagagacgaactgagctaaactcaaaaaaatagatgattcatgattccccgtgtatagaaagtttctcaaaaacaaaacaaaacaaaacaaaaaaaaaacgatgagattgtctaatttcatgaagctagcataattctgagagccaaggtgaacagtacatacatgcacacccttacacacacacacacacacacacacacacacacacacgctctgttgaaggccaatttcatcattgatggctactgaatacaagaggaacaacagccagctgaatccagtctgtaaagcatagtttaatacttgaaacataagagttgatattaaaatacatcagtgtgcatgacaggaaactatagtcagctcagttgttgcttttgttgaagcacaatgaaagtactgaggctgttagtagagatgcttcagagatgggcacggacaaggacggccctcgtctttacagggcatagcatcctaactatgcactgagaaggaagataaaaggaaagaggctgaaagaaaagagatggggctgttattatttgtaaatgatatgaacatttacatcaaacaggaaaaagaatccacaaataaactatggaaagcaatacatgttcagcaagctgcctgggcatgaaaagaccctattcagcttgtaataatatcaaaaatctgatagatgatatatcatcaaaaactatcaatgtaaagcaactgaaataattcataggtcctctgtgtgtagaacacaaagaaacttgtgtggatgagcattaatgctgtgttaacatgtagataacagtattgttttaaaggtgttaattcttcctaacaatatataaaataatttatcactataaatataattaaaatatcaaaagcatttagaagggaaacttacaaagacagtatatcccttacctagtatattgttaaattaattaaatttagaaattttaaagcaaattatcaaagatgcagtcctatgttatcagtagcaacacaaaccaccatcttctacagatcagagaactggctcatagggtggaacaaaatggagccctagcttatacatggtacatctctaattacagtaagttatacagaagaacatagcagccagtgctgtctgtattaaagctactcagacagcagggacaggaggaccaattgagcccagtagtccaagagcagcctaggcaatatgacagaaccctgtttaagatgggagtgtgtagtaggggcagacagacagacagacagacagaaaagatttgttggtattgctttgtttttgaagcagggcctcaggaggcataggctggtctttatagctgaggtagatttgtacttccgttcctctttcctctgcctatgaagttctgggagtgaagacctttgacacaacatctggcttcaggaaaagttgagtttaacagactagcaaaaggataacgaacatagaaggtgatgtgtggtgaaaatatctctaatttctagtggagaaaaaaattcctgaaccagaccaaaaccctttaaaagggcaaatgtgattgactgacatggaaacatagactatattaaaccagagaggcaacgtgacagaaaacggcaaactcggagggtttcttttgaagaacgtcaaatagtaccaacatgtaattcactgtgggggattagaatcagtaagacatgactggagagcgaactcagcagttaggagcactggctgctcttccataggacccaggttcaatttctagcacccacatggcacttcacaattgtctgtgactccagttccaggggatctgacaccctcacacagatacatgcagacaaaacatcaatgcacattaaaaaaacaaacaagcaaaacaaaaacaaaaacaaaaaaaacaagaaaaaaggaaagaaaaggaaatggtaggagatccagggaaagtagacaatgttccctttagatgctttggtggtggtggtggtggtggtgtggtgtgtgtgtgtgtgtgtgtgtgtgtgtgtgtgtgtgtgtgtgtgtgttagaaagcatgagtgtgattaacttgaaagtgcctaaagagaggacagatcatgagttcaggacaatcagacttccaaaaacaatgaaataccactatcttccaccaaatgagtagtattggcacatcaaataatgtcactgacaggactagaaaatggtacagtgagctatcacaactatcaagcctgaaatttctgatagtggtatatgtaagcaaagcaaatactccagcagatccacaaggacaggtgtgtaatgattcttggctgtccattgctaggtcagagaagccaaggcaggtcactcagcaaaggtatgcacctttcctgttgaagcctctgcagtaacacaatgcttcactagtgagcagtacaaatgaacaaagagaggcagcttatctgtaccatagtcctttgatatatacaatgtgcctcactggtcaactttctgttcttgtaacagactacctgagagaatacctataaaaggagatggggtttttattgataatttttccccatgtttttgtttgtttgtttgttgtttgttttgcttttacttggggcaaagcagtattagactagggcaggttgtggttagtagaaaaagtgcattcatgttagaacataacccaaaacccggaagactagaatcccacaataccctgagcatcatgccccgtgctgagaccccatgtcttttctttcccccattagtatcatggcctggagataaagccttgcaattttgggtttgggtggggtactctatgccaagagttagcacatttcttttttttttttttttttttggttttttgagacagggtttctctgtatagctctggctatcctggaactcactttgtagaccaggctggcctcgaactcagaaatccgcctgcctctgcctcccgagtgctgggattaaaggcgtgcgccaccacgcccggctaagttagcacatttcaagagtgaaggctgcacgtggagtcaatgcatgtgccagggctctagaggacctgcagcgaaatgagagtcagagttaatgggcaaaggctaaatcagaactcgactgtactgtggatgagatgggagctgaacacaatgtgaacatacataaatgaaatacattattttacctgttgtcattagaatactgtatatactcttatgattgatttagttactgtttttaaacacttactcactgtgaatccattatagaaaatactttcttagtgattattttccttactgtacatttttgctgttctgtgtatttgcatacatgttcacgtgtgcaattatgggtggatacctgaggctgatatcagctgttttcttcaatggctctccatgttatttttgagacagggtctttcacagatcagccaggctgcccgggcagtaagcccctgaatcctcctgtctctgccttctctgtgctgggattgcaggcacatacacaacgcatgggagctgaggacttaactcaaatccttgtgctcctgtggaaagcagtgaatgactgagtcatctcctcagatccccgctgcatttaatgggacctggaccatctccaccgtatttatttttatatacccaacacttaaaatgttattgttggcttatgatagatgtttaataaagatttattgagtgactatataaaatgaacaccattatctaaaagaagagaaaatggaggctacttaactgttaactacttagaatagtgtaggtgaagcacatatatattcccatgtggtcggtccccaagcactgtgatgcttcagtcaacgttttaggtgacacatgagctctgagacttgacttttctaagcattggaaccaggattttatttcttaatgttttgactctagactctttgtaagacaaggcatttctagaatatgatggaaagcaatcatactctggatgggagctggctcagtgagtagaggttttttttgcacaggcatgaggactccagttccatccataagacttgcataccaggaaggtattgtggcacatacttataatcccagcacccagaggcagaggcaagaagatccctggagcccactggcatgttagcctggtctaattggtgagcctcggcctagtgacagaccttgtctcaagaaaacagaacagaacagagcagaacagaacagaacagaacaaaacagaacaaagcttccatatgcactggcatacatgtagaattgcattcatacacatacacataccacacgcctcaacatacattatacgcacacacatatcagacaaacatcaacacacacacacacacacacacacactccacacaagagttatattctgtgaagtcttactatgtagcccaagttggtcttaaacttacccttctacctctgaacgtttacaaaatatataggtttgagcccctggccgcagcctgaagctgcatttccttttattttggtctctaacttctataacagatgtatttctagactctgagaagtggggaatagaaaagcacacaaactatgaacttgtaacccaaggggatctgttctctctctctctctctctctttttttttttttttttggttttttgagacagggtttctctgtgtagccctggctgtcctggaactcactttgtagaccaggctggcctcgaactcagatattcacctgccactgtctcccgagtgctgggattaaaggcgtgcgccaccacgcctggctgttttctttatcttatcctctagcatgagtctacacacaagacagagaagcagagcggacgttaagccaggtttcccctgcctaaagcaggatggattataggctgtcaaaacacaaacaagctttcacacacgtgttcgattatactgaagaccctacttgttttccttagaacttttcagaatctgtccaataaaagtagggttgacttgggatattaattatatgaatatataacaaagctgcctgctgggaagtgccattttaatatagataatttatctgtgaacccaatgtcatttttattgaagtcatttttctcctttttgagttgaggatgaatgttctctactgaattctgtcatcatggccagaccaagttcattaacagtccaacacaccattaactaaccacacaagagttatgggagattgatgccacagcccttcggccacctgcttctctgccaccctaaaggatgcattctcagagctgccatcctgaaggagtgactttggcagggactatgaaagcagacaacagtgttgactctcactttgagacctaaccattgccccgtaactgctctcttatgctcctttaattcagagaagcaggtatccttcatctctgcagagtcagtctacactttgctgaccactgtacccaaatcattgcaaatccaggataaaatgaagatgtaagttaaagcaagctgtacaaagtagaggaaacagattaacatgcctgattattcattacaacttgtgcctcagatgtggagcccctgccagacacttgctgtttccagaggctgaatagagtcggttgcctggcgcaggtggtaaagtgcctcaggctctgccctacagctgtttgattttcctgtgatttttgaaactgtctctgtagaactatcagctaagcagggacagggatgccccaaggacatcagtgttccaggttcacttccctgcacactgtcacctttgtgatctgtatctaattgacttgtgttcagatcatgtgtatctttggaaagtgagaactttagatgcaggctcctgtgtacaggttgccaaagataaatgaggaatagtcttacttctaactagaaaaatatgtcttcatataggaacttaaaagatcccttaaaataagcaccacacacacacacacaccacacatcacacacacacaccacacaccacacacacacaccccacatcatacacacacacacacacacacacacacacacacacacacacacacaccaaagagacatgttctccatcgtctctcaacacatgccaatattctagtagatcttattaactgcctggagctttttcttaaattaaagcttaaatatacacactaagatattgaattgttatttgagacagggttttgaaagacccacaatgtgaggactcccccacgttctgactcaggagaggcgacaccccaaaatcacccacaagaaacggtcttgctgcaaactgcaagaagatttttattcaagagcgctcttgggcccacagtcatacaccacgcagggatagaggaccatggtgccgagtagctggataagggggtatttaaaggaagaaaccacaactcaaggaagtgcggagggcgttgttggaaaataccaaagataccagttaagagtcacaaggaagtacaaagtcacaagtgtcacaagggatacctggtaattgttcaggttatttctcaagacggtttctaagagcccctaacaatagcacattctttgaatgaacactctttgaacccaggaagcgggtgggtggaggaatgtcgctatctgttttatgattagcataccttggagcattgagtcacaaaggtcacattccccaagcctgggcctaaaggcctagaattttgtttttacgttttactttttcagtttcactatgtagtccttactggcccggtacttgatatattagaccaagatagctttagatagagatctatttgcttctgcctcttgagtcttgggattaagcatgtgagctacaatacttggtggatgctgactttttggtacagatgtgtttttctgattctctcacacaacctctggcccattcttcctttctactacattcctcagcatgtgcctgtctaaagtgcatatccacaggcttgattggcccagtcctttcttagatccctcaggtctattatgccacctgtggatctggcagaaagcactgttaatgcctcagcaggaacacagttactcagtagctagataaatatctctagttctgctgtgtcattctatgatgcttccagggccccctggctggttctatattgtccttttctggtggccttttcctctggtcttcacctgattctttcttcctactctttcctataaaaggaagttccatggccctccttttatatagccccgaattaatcccgagaggtaggtgggcaggatctgggagcagtggtgagaggttatttccattgtgctccagaataagactgcagagctaggaaggattcttcagtttgctcaagattgaacagctaggaacgaacttgactgcaactctggtcttcattctgcactcaacctagcagattgttatctttcacatgtaagtaagcttacggctgtgattctctgaacaatattgctgagagtggcctttgaggcttcaccccctgaaggacattaccctgaggggtaatgaatgcatgttggggcatgagttgtctttttcatcagtggtgtagccaatgaagtgctcttgctccagcaaatgaccctccactcatttcctacaaaaaactttttaaaaactctgtgggtcacaccccaaaaagaagataaggggttctggctcctgttgaggagaaagaaaaccacatcccttgtttactttggttttggtttcttagtgtccttgctttacagggtcttgttggatgcacactatgaagatatattcttcctagatagaagcaagataaatccccatctatctctagcgaccatgtgagtgttcaggagactgcatccaaagaaacacgtgatctgaacacaagtcaatccaattcagatcacaaaggggacagtgtgcagagaagtgagcctggaacaccgatgtcctcgaggcatccatgtccctgcctagctcataatcataataggagaggtatttatagagaagaagagttttagagaggaatggagggagatgagagatgggaagggggtatgtgtatgcctgaagtgtgtgtgtactgtatgcctgaggtgtgtgtgtgtaaaatgacttaaattcattaactaattgtatgaaactgtcaacagtaaaatgttagaaagaaattgttgttgttcctcttgcagaccgtttgcatcatatgactttcacaaactcagtatcaacatgtctcggtttacacatctatagcattcactggctaagactgatgtttgtaaacaggcagtcttctttgattgtctcgacccttcccccaaggttttcaaagatacttagaacaaaccactgttcacgcttatgcaggattgctataatttattttacctgagggccaaatcttagctatttaggaagtcttataaaaaaatctccagatggcttcattatactattttaggaaccaaggacataaaaataaaacggatagataagcacaactcagaatcatagaggaacgaaaagtagacggcaaaagaaaatatatgagtctttaaagatgcgagcttttaagtcaggatgagagacacaagcaacaggaagaagatgaaattcctccacctgataaagaacttgcaactcacagttaacatcagaacaggggaagaaacctaacactttgttcctcagatggggaataaggtaagaacgtctctctcacccctcccatgcaaaatgttacctcaaatcctagttactgcagtaaatatgaaagagcagggctcaagagatgccttagtggttaagaatccttgctgctcttgcagaggaccaaagttcatttcccaggacctacatcaagtagtttaccagctctaagggattgattgatgtcttctgctttccacagggaaccatacttatgtgtacatacaaacacacacacacacacacacacacacacacacacacacacacacacacacatgtacacataagtgaaaataaaaatacaaaatatggaagagaaagaaaacataggtagtgtgttcaataaaaaatacaattttctttactcctggctgttaaggttattaatatagaaaatcccaaggaattgatgaaaacttcccctgtaactaataattggcaatgggtgatatgaggttagtatgcaaaagtcaattgttttcccatgctccaacaacagaacaagggaaacttgaaatgaaatctctcagttttaggctggtgagctgggtagatatagcctggtagactgagttctgtacctagaacccatggaaaggcagaaggagagaaatgactgtccaccattgttgtctgaccaccacacatgggccatggtatatgtgtccctccaacatcatgtatggataccctcatgcttccatccattaaaaacattcacttgccacctgctacccgactatgaaagctgttaattccaagcttaacatttgcctcaaacagtctgtagtttactatatagaatttgttaataccacatgactgttctctctctctctctctgtctttctctctctctctctctctctccctctctctctctctctctctctctctctctctcccacacacacacacacacacacacacacacacacagagagagagagagagagagagagagagagagagagagagagagagactggttgaccggctctgttgatctgaaatagaaataaagactatcatggaagtgggggcctgtgttagaatgaagcatcttagctcagggtgatcaggagggagaaaaggagcctggaaacagcacaggtccccagggaccttatttcttgaactagatcccaacttccacagctctgccacctcctaatatctatccaaattatagcttcatctagaggttaggtcagagcctgtctcctaatgtctacctggctggcaactaagcctcctacatatgaagctcccagggatgtcaggcttatatcacacctatccagtttaaatgtgttccagaaggtcagtcataactgtaacaactctgaatggagagcacatgcaaaccagaaaagtctttggtgaaagaagtacaagcaaacctaaataaatggaagatgtttcacgttcacagaagatttgatactgtgctgatgccaaattctcttccgattaactatagagttaaagtcctgattaaaataaaaaaagctatttgtggatactaacataataatgctaatgttcacacaaatacacaaaagtcctagaatccctaacatggtactgaggacaacagatttgaaggactcacactgtctgatttcggtgttctgtgaggacagtgtggtatggtgaaataatacacacatacaccagtagaacatgttttgagaacttggagttaagtcaacggatctttgggcaaggaccaaagacatttcaatagagaaaaagccgtgttctaaacaaagggtgccagaaaagtggaatgcacaaatgcataaaaagattgcatcgaacaagaaacttttcataagattaaacttaaaatgcatcatatacttaggtataaaactgaaaaagctcacagaattaaacactagaaaaatctatgtgaccttgggtcagggccatgagtttttggtacaatctttcaagtacaatccatgaaagaagtgttgagttaatctttagtttacaaacatggacttagtctctgtgggctggaagctaatttttgcctataaattatattaactttcagtatggatgaatttttttaacaggaccaggaaaatgagtactctagatattgagacttatgatggtcagcatttgtgtctgtcacattgggttgtaggaacacaaagtccacagagaaccttgctggcatttctgatcttgacattaaatggcagttttcctttggagtttggggaagaaactaacggcctaatatgtattgaaagcctgttctatgtcaggctttacattgatttgtatgtaactgcaggaggaactctcttcctcggtcaccttgaatcctaactcattatccacactcaatcgatagataagtaacagaaggctatcctgcaggctgagaacccaaccagtgatgagaaaaggctttactctaaaaggaccaggtgttttacagaagtgggtctaggtgtgtgtgtgctgcatcaggtttcattttattcttttaaatattctaagcagccttataagtcagtgttccttcacagagagtgtgaagatgccagggggcaaggggtggggggaggcatgcaagaggtgattgcaccatttaggagaatgtatggaatggcttctgctcagggcagaagctattttgaggataagaagccaggggctgggttttataaacacggctttatttattttcatttatgaactctcccagactggaaatatctcatagagaataaagtgagcaccagagaaatcacagaagtttctcaaagtctcacaaccaatagcaagtgtcagaggaaggactgaatctgtgtgtaaaaccgcaacttttgttgtcctgtttctgtataggaactcatgtcaaataatgagcaaatgggcagaaccaaatgcagagctatttggggctcttcttccagggtctccagtcattttctgtgtgatccatataaatatttaatatagctgtacctgaaatttacttagaaaaaatcagatgtcctcttacagtgaaatgaacattaatggtacaaataagggcaaacttctgctgtgtcccatggcataggtacaagataagcagaggctaggtaggattattttaatacaactttcttcataaagaacaaatactattgaaaatgtttcttagattctcaaataccacaaaacatctaagcagaacttgattctttgaagacatagaaagaagtgtctcatcaatgctactttaaaaggcttggttggaaatgattctatattgggtcagcccatctgacccactggttcctgtctgctttccactattagaagaaagaatttcaggctgaattgtaaggtagttgcttttcttacattcttctgattcaagaacttcagatgtgaattttagatatgtgtgtttcatttggaatatccctagaggtcagaaaataagggtccatggagaaaggggatggttctcaaggaagagagactgaatgcagtagtagtaagggatattggtaatctccatcaaatccctctcctcagggatcagagaggaagatctggaaagagtataagatctagaggcgatggaggactctaaggaatcaaagccttctggatacaacagggtagacacttgtataaactcaccaagtccgaggcagcatgcatagggccggcatgggtctgtaccagatccctaacccagaagttacctccaactaataaccgcttgcaaatgaaaaatcagttttctcccagccaggcgtggtggcgcatgcctttaatcctagcactccgggggcagaggcaggcggatttctgagttcgaggccagcctggtctacaaagtgagttccaggtcagccagggctatacagagaaaccctgtctcgaaaaaaaaaaaaaaatcagttttctccaagggtctctcactagggaaacaaattacttgtaaggttaaggcccatgtccagcagtcaatggccgacacaaaatgaactcattggcatctttgaagtttctttttcttataatgttaattcagtttttttaaccttacaggttctttatctatatattatggcttgctgttttttgtttttatttttgagtagattcctgtgtgcgcaaatgtgtgtgcctctgtgtccatatgcatgtcttgtgctttttctttgactctcgtttctcatttggttatattgtccttttccaatttgtttccgttttatattattgtattttatttcattgtcttactactctttgagtttttgtttgttttctaatgggagtcagaaagtcagaaagggggttaatctgaataggaagggagatagagaggagctgggaggaatgggggaggggaaactgtaatcaaaatatattgtatgaaaaagaatctattttcaatttaaggggggggtagtaatggaccaaaaaagtataaatggggtgggaggtgggacgatagggttgaaaagggaggaaatactataaagactaattaatagtacatgtcttttgagaaaggaattaaggaaacatactactgtatacatttatgaaaatatatactatagatatctaaaaagagtttactccatacattatagagttactctataatgggctgataatgctctgttagacacttcaggctagcaagtaaaaagcccaggttcagaaatgggctatgttaatagctatggccagagaggttccatagaaccacaaatagtcttttgccagtgctctaggttaccctccagaacttgatgatatgaccttattgataaacacacctcaggcccgagacaaagaatatggagaaatcaagttggcttcatccctcctggttagcatccttggtgctgcggtactctgcagcctaccaaggagaaaggtaatcattggcttacccagtttcgaagcttgtgagtcataataatggcccacttactaagacatggccactggtactttagtggcacgaatgttatgggagcaaacagccactctctgattgaatttaagtcccattcaacaagtcaaaacgtatatctggcattattatctgggccatgaacctgataatagaaaaaaacatactactagcattatggacatagtaacttactcctaaatgacttgtttttatacccatagattagtacacctcttgaatctcaacagagaatctttttgcaagagatagcaattaacatagagactcacaattagtcaaggtggagagaaagagaaaatgtggattgttcattcctaaagggccatcatcatacctgaccccttatctaagggctcagggatcatggtaaaagacgaggcagaaaaaaacataagagccagatgtggtagattactgttaggaaacagtattttccaaacacagcagggaggttgcagataagaactttcaacagttttgatgtatgcccaagtcctacccaaaccagacaaaaatctcagcatgggtgtaagaggtggttacaaagccctacccctagctgagctctattagcaattggtagcttctggaagagtcagatttctttgaggattggcccctgatagtttgacggactccagtgaagggctccaaaccctttgtgtttaggtagcacaaactggacttgatagatttagaagtaataaaaaaagctccaaatacccaggatacaattcacagatcacatgaagctcaataagaaggaagaccaaagtgtgggtgcttcggtctttcttagaaggagaacaaaatactcacatggagataaagatcagaaattaaagaaaaggccatccagagactgtcccacctggggattcatcccatatacagtgaccaaacccagacactattgtggatgccaggaagtgcttgctgacaggagcctgatatggctgtctcctgagaggccctgtcagagccttataaatacagatgcagatgcttgcaaccaaccattggactgagctcggggtccccaatagaggagttagagaaaggactgaaggagtagaaggggtttgaaacccgtaagaagaacaacaatataaacctaccagatcctgcccctcctccagagctcccagggtctaagccatcaacaaaggagtacacatggctccagctgcatatgtagcagatgatggccttatcaggcaacaacggaaggagaggtccttagtcctatgaaggctcaatagatgccccagtgtaggggaattgagggcggggaggtgggagtgggtgagtgggtgaaggaacaccctcatagaagcaggaggagggagaagggataggaggtttctggcaggtgtgtgtgtgtggagggaccgggaaaggggataacatttgaaatataaataaaatatccaataaaaaagaaaaaaacaaaacaaaacaaagaaacaaaaaaagaaaacgacatgactttgtaggctaaaaatatacactttaaagagaataaggtaaatcaaaaataaattctcagtaaatgttcattctttgcaaacaaaaacaaaacacccaaaaaagatataataaaacaacaacaacaaaaacacaaacaaatacaaagttgggagagtagtaaaggggatggatctgggaggagttgggggagtggagaacatggtattcttaaaggaaaggaaaaagtttataggagttgggggtcatcctatgtacaaggtgctatctttgttactcaagggctttcactgcatatccagtggctttgtttttgacgtgggtcttgctagttcattctgcttggtctgaaatcgcatcagacttggggtaatcctcctgcttccgctttccaggctctggggttacagacaggtgccacaaagagtgtttttttgaagtaaatattttgacacaatatgtgagaagtgccacagtgaggtgcagattaaacactgtgggagtgtggaggcggtgaaggttgtttccagtaggaagactcggaaacattcagagaagaggtggcatttgattggtgcctcgacccatgaacacatttagacatgtggagataatgagagaagcaatctagaaagaagcaaaaccagggaaaatataaaagaaatgtagtggtgttcagtaagctagaggcctgtgtggaagagatttgaatgaatacaaaggaaggagttggctcgaatcagggcctgggagtcttgtaaagctggcttgaaagcttgtgtggatttatgcacaggtccagaggaacagttgaatatgtttgagaataatggtctctgacctgccctttgagaaatgactctggccctttccaaaatgggctgggctgggggtgggggtgggtcaagcagagggaacatgaggtgctgacttaggtagacactgtggtatccacatgaggtctgggctaaggtgctgaaggtgaaaaggacgtgacagcagcgaaccactggagaagaatcagcagacttccacccgtgttcagatgtgtttccacaaatagagaggagcccatggttagaagggagctggcaccttcagcagaagcagaaacagaaacagagggtgtggagcttcaggaatcatgtgaaatagttaagtttgaagttcattttgcagagacccaagcaggtatgtccagccaaagggtaggaagagggaatggtccagcagaagtgggggcgggggaggggacaccatgcacagtatctgatggaagccatgagcttcatctaccattgctgattggctagaggccccagctttaccctgagagtttattggtgagttcttcattcattcttcctttgtagaactgtttcacttacattcagtgacatatatctttgtgtggtgattcagatgtttgtctccctctacaagatcactaatagatagggaacctaagaatgctctcattcaagtaactcttgagggctattggatactactgatgagtctattaatcatataaccttccacttttacccatgttctactctatgacaagttaggtatccccaaagatcctgccataagatatttgagcccgagcattctgtaagacttctctagcctcagggaaagaagcagcagtgttcaaaagagaccccattccgagaggggtggcagtcctaggaaggttctgtgatggctcattcaggctgcttctagtattttatatttgctccacagagatgaggggaagagtggaattgtcaacatattaagaaggtgggggaatgtaattttctaaacacacacacccgtgtgtgtgtgtgtgtgtgtgtgtatgtatgtatgtatgtatgtatgtatgtatgtatgtatgtatatgttttgtgtgcatgcatgttcataggtatgcatggcatacttgtgtttgaatgtgtgtatatgtatgtgtgaaggccagaagtcagtcttgggtattgtaactgtggagacagggacatggtctttcactgggacctggacacatcagttagacaaggctgactggtcagcaagcctagcatatctgcttgcttccacctcctcagcactgggatcataaacacatgccaccagacctgcctctttagatgagtgccgaggactgagaaaagacccttagagtcagcatgacaagcacttcactgagccctctcccagctctgggatcacacagctttcaagtctccaatacactgtggcattacagggcaatgaggtaggaacgtgctccctctgtttgatttcagaaagacatcattcatctaaatgaaaggaatgtctgcacaagaagcaatccaggacaactggaaaagttgaatggaattatctatggatctgttgctgcttctgaggatccagatgcatttctgttttatgaagtccacaaacaattagctttatttattgtatctaatttaaagtacagaatgagtcatatgagagtgaagaaaccacacgcagtgtgagctgtgaaggtggaatactcccccagttccctaaaatctgtaatgtctacacagttatgaaatcatagtttttcattaacgagttgtgttattacacaatggatacactgattatcatcaattagtaggtaatgagcaacaatcgaagcattggaaatttgtaattatagtcatttatcattggcgatagagtgatatttatgattctaataagttaaaagatcattttacactggaaggcagagaaacctttgatgaatggttggtgcatgtaggagacacatggtgaatatctgatcacaggatattttagttctctgacttgatcatgaacccttagaggagaatgaatgtgactcagtaaacagggcaagagccagctgtgtgtgatgggatgctggtgtggagagttttcggtaccacgtatgcctaataatttatagaaacgtgtgctgtggactttctcaagagcagctgcatgtaaacaagctgtctcctgttcttccctgtgcctggtgtgaagagtgaacttaccgtgggagccatgcttctgggggggggggagtgggcatgtacactcacacatatgtgagataaactgtgcttgctgcaaagccacaatcccccagctgtcagcatctcctctgagtagcttcagagaacaactcagcaacactttacatcagaattgtgctgatgcttcgctctcacaggtgaacagactggttaagcttcctccctaggcaagggtgttgggtcatctacagggctgttgagctgggctcagttatcctttcctcctgatcgtggctgacttccctcctgtcactccaccacagtggagtactacgtggtctagacattaaatcctgctgtatcccaaactgacaaatcatacaccaaaagagagattaattttagtttgaggcacagcaatctaggagcttcagtacactttggatggggcaggaataaaaagcatcgatattttcattgtgcaatggctactgctgtaccctccatggccagtctccatatttcctatttagctcaggcccaagagaccaagatttttccactttgaagccttcatctttaaatatttcaaggctcgagtctcagaggcacacacactgattcacggttactcttctgccttaagcactaccctctgcgatttcacatcagaatctgccagctgtctaccttgtggtttgagggaggccagcattgggattttcactgctgggaaactatcttggtttcatctgggtgtttaaagtatgtgttgtctatttgttctagctggacgatctttgggcctcctttcccttgcttgttatggagtcaaaggcagaagggcacaccccacagtcaggcagaacctcgtgttttgagcctttgcattaaggcatgtacttttcctgaggcagcatgctcctcctgcttataaaaaagtctaaaccaccacaaccaagcttcgcctcctgatgatgcagaataattcattgtctcaattaaactgcttccagacctgttgcactggtgataggctgttgtgaatgccagataagtagctcatatttttattttagctaaaaacatcttctaggaaggctggaagctgttcatgccaggaacctgggctagattttctattttttccatatttgcagcttcattatgttgagtatacctggatggctttagcattaagtcatcccagttaattcctaataaaacccaaatgagttagtcaaagggggcaaattatgttttggtggctttgacttgaccttttaatttgacttgcaacagctggactttgagtttctctttcatattctgtcttcactggtttcagtcaagtctatccacacattatcatctaccacccatatatcattcatcaatcatccatctttcatccatcatctattcatccatgcagcatgcacacatgtatccaactatctatccatccatccagcatccgtgcatccaactattcatcatttgttagccatccatcatccgccatctattcattcgtctagcacgtgtgcatccatccattcagcatccatgtatctgtctacccatctttcattatctatctatcagctatctaccatccattgatccaggatacatacatccacccatccatccagcactcatgcatctgtctatccatcatctatctattcaccatccatccagcacctatccatcatccatcatctgtccatccacctatcatgtatgcatctatccagccagccagccagcatccatgcattatctatctatccaccacgatccaccacccatccatccttccattatccaccatgcctaaacatgaacagtaagaatatcaaagaatccctgctgtgtggacgagaagctgtaagtctttctctgcttattggctataagggtaaacggcatctatgctcttttagctatgagactgaatcctctatctcttgttctcagtgtggctgtgactgacaaaactaataatctagcagtccccttttagcttatgttaggcaggaagtaccactatgagtgacacctttccagaaatcactgcagatactgagaggcctattagccacagagagaaatgattgtgccagaggaagacagccaagggggctgggctgagagtgagaggtaattctcaactccagggatcatgtttggaagaatgaaaagggtctctgcctttctttacgtttggttgttaaaatcctttgaaagtttggcttccagcaggtgtcaggggtaaaccacttatctgcacaaggcctgctgctttactgagtttcagtatttatatagtacaagtttgggtttgtttggtttttgcttgtaaataatatctcacatatggaacattatgaaaaaaatgtattttacagaaatcattttttttctacattacttaatttgcttcttgtggtggtttgaatatgcttggcccagggagtggcactattaggaggtgtggccttgttggagaaagtatgtcattgtgggtgtaggccttgagtccctcctccttgctggctatgagactgtcttgcttgcctttggaacaagatgtagaagtctcagctcctccagcgccattcctgcctgtacactgccatgcttcccaccaagatgacaatgaactgaatctcagaacctgtaagccagccccaatcaaatgttgtcctttataagagttgccttggtcaaggtgtctctttataccttgtcatttcaaattttactaaaaccatgacaaggatggaagtgacagaggacccctgtaaagagctttaatccattctggccccacaattctcatcaatactcacctagaacccaccacaaattaagcatataacttaaggtaaaattcagttggaatgcaaaatcagcatccctgcctaacaagattaccaccctgagctctcctattaaattcgaagatcatggactcttggattttgtgaatgccaatcactggaaaccctaactaagaaacttctttaaaaacaaaacaaaacaacaacaaaaaccctaaagctattagatgttgacattttgctaaaaacaacttcagcatttctgatcataaaaagccaattagtactttaatagaccatactgcttagatttgaggctcagaacatcagtctctatatcagttcatttactggaatgcacaatacctatgttttgtatttagaagtaacaaaagacaaggacaggacaatcatggggataatggcatgtgtctcaccttctcacattcttggacttatagcacagtcttcagcagaacaagaaccaccagctgttccatatccaacccaaagtcagtagcaatgacactataaagagtttgaaagaagccactggctcaatgactggcatccacaaagtccaagagtccaggatcttagaattctttcataggagagctcagggtggtgaccttgttaggtggggatgctgattttgtgttctaacatggattttaacttatgtcatatgtttctttggtggtgggttctaggtgagtattgatgagaattgtgggaacagtgtgggttaaagctcattccagggattctatggcacttccatcctttgtcatggctttaatacgatcacagaagttgacttgggctcccacacatggaagtgagacaagaagggagccaggtgcttgtgagatctccagagactgatgttagatgggacactgcatgcaagtctgttggtcatgaagaatgtaatggtcagtgttggttgtcacctttgacaggattgaaaattcaccttagaggtcaagtcttaggcatgcctgtacaggtgacctagattagactagtttctaaccatgcctgtgaggaattatcttaggttaattaattacattaggttaattgaaatatcctggttaggttaattgacataggaatatctaaaagtgggtggcactattccctaggcttgggcttacaattgcacaaaagtatcagctgagtattgacactcatctttctctgcttcctgactgcaggtgcaacttggctagatatcttaggttcctgcttgcaggacatttctcaccatgatgatctttcaattgtgcacccaaataagcaccattatccttaagttgctttttttcaggtcttttattacagtatcaggaaaagcggttgaaacacagggcaacactggcagtacattaaacattatgttgtctttcttggttggagcaatcattgcccacattctctggctatgagatgtgtggtaatgcagaactagctctgtgggtggaagcataagatttatagccatggaggatagaggtgaaggcgttttaacctcactctgtcttgacccaaaagccttttagtttgaaaattacagatcagttgtttccatgagcccaaactcactcttccactgtagtcttccatttgtctcttgatgtaagtgatcactaggcaattcttcaatgtcttaatgattttttcattatgtgtcagaatatttcacatagaagatgctaagtgtttcataacaaagcacaaagatgcctgggatctagagttctgacagtctcattcccaagagcaggatcatgttgttttagatctcgctcatagattcaacatgacctcagtgtccactctgcttcccaacccatccactctcaatatcaacttctgtactgaggatagattgggtaatttcactgctattgaacttgacccactgccttagagtacttattgtttgtgctgtgtatgtgtgtgtttgattgtgtgtgtgtgtgtgtgtaggttgtatggatgtgtggtggatgtgtatgcccatatgcatgcatgtgtggaggtaagagataggtagcaagtgtcttcttcagttgttcttcatcttcttgtttgacacagtatagcctattgaacctggacctcactgattaaaatggactccttaaccagtgggctcctggactcctcctataactgcttcctcagtgtgggggtgtcacacacatgctacagtacctatacttttgtgggttctgggtatccaaactcaggtcttcatgcttgcttgacatctctccaggctccccattgacaaaggatctatctatcacctccttacttttgaagagaattcagcccttttttagagtttccttcagagcttcctgtttcctctgcattcagaagccactatttatgatcaacaagccatgaggagtaaatggtgtgaacaaatgcacatgaaaaaattagcctcttagagaacagtgaagagtttgcattgatggaactaaagaatatagagaacaagttaaagaatagaactttgcaatgctaatcatggcctgaagtaagcctggggttattacactgataattaagtaatttacattactagagaatagttctttgagtgaaaatagatactacattgattaaagttgtttcacttccataggtacatactatgccatgagaatatatctaaggagacagaacttacagtgacaggagccaaacttctgggctttcaggaattcaaactaggtatgtattttcttagcaaggcaatggtttctacagagcttccaaactacaattctttaaataattcctacatagaccatcctcttccctctaagatgatttttcccttctccaaatctgagcaaaagccacagtgtttgctaatatgaatgtcagaaaatatcccttgactgataaggctgttatttatgcccagagtccttaacaattgcaccttcagttcatttcaattgtatcctgaactgggcactgaaaacctcattttcccccacaattttaaaactgtaattccttgagagtatttctcggtcacaatcatcgaagctcattatcatagcacacaaatgttggttcgtctactctctatggcatttatatcatggttcttctctggttttgttctgtgcaataggaagtaaaatgttaagataaatgcactttaattggtggaagccagaatggtcatttatttatttattttttcaaaaatattacctttgaaaatgaaatcaagtctggtgtttagagaggacgtcaggtgctcctcgctgcttatgttggctctgcttctaagcattaaacagtacagaggcacccagaggatgagattgtggggagaagggtttagaggaaacatttgggggcatgaccaggggaaagatggtgtagtgtacacacaataatcttctctgaaatccctcactgtatgtctctgggtgccccttgagctgtttagaacaagagaactcatgcagctaattcatgggcaagctttgagcctgtactcattagcattcacagggattcctgcgcgcctctgctacagccagccacagctggccactctttcccatttcaggatgttcctgcttccctttgccctttgcagcaacatctgtgtgcttagttctatggaaaactagcggctgcgacaccaaagcagcatgtctgactgcactggtgggggctccatagtgtctgagagtttgagaaacatggacatattcaaatatcctactagtggaccagtatgctcaaggctggcatggttcgacctgcacagtgagaggctctaggtctgttccatctacctgcgatggtgaatcaaaaggattcttggggatagcagcaagaaagatccaccaaacacccaagctataaatccaaaggaagctttcaaggaggcaaggctaggtgcttacgctccaaaatgcctctgttaatcttggattttgtcctttacagtgtaaagtgaaagtgaccatttgcttaatatgaatctacccctgtgtccgggggtagattcacagggcattggcttacactgctttatttaagtctttccactatactttggggagagggacttacagcttccacagtagagacgacggaccagggctcagatacactaaagacttgtttgaggcttccaattaatatgcagcagagcgcttgttgggaagactctttggctccaggtggtctttgtaagatcagagtgtacatcaacacacatgaagcttaatgaagcattctaggctgccttccaatgtcctcagctgcatttttaggatgcattcaagtaccagaggcattctgaaatggcgattcaactgggtaccccttgtcagtttctttctaatgcaccatccattttctgtagagtgttccaccagctagtgggtgagatggagggatgctgaggtggcactgatcaaagagccaaatacaaaacaaagtcaaagtggtgaaatcaagtcttaccatatgcccagtgctcttagcttgatacacgaacatgaacaggtgacatgagaccaaacaggaacaatataacttgcaagttaatgggagaccaagacaggaaaactgcaccttgcaggttaagggttctgtttgcagttaagacagttaagagtaagttcctgtttgtcctgtacaggctaaggtttctgtctgtagttaaagaataagctcctgtttgtcctgtactaactggaaaacatgtttttcaacctacactaaacttgtgacctcattcacatgatgtctatccttaccccgttccttccctttccgttatatctttctaacaatgtgtaatacccagttctcttgccctgtgaataccttaccttccctataaacaagacctcaagagaccagcagaggctgatctctcaaatccagaattaggatgagacagccagctggccaattatgggtgcaccctaaaaatacagcttggcaaatcatagatttagtcttttctcatggtgattctcaggtctcacggtgacccctggctcatgtgggaaaggatggaaaagtgaacaattacatcctgagcatgttcaatgtgaacaccatcaggacaggctcatttgcagaggagaagcctgttgcttaacagacaattctactaggctcctcctagggatcttgaattgtcaggtgtgagccaaatgcagcagctaataaagaggactgctagttagctgcccagcaccttcttccattctctctctgttccatgtgtttctgccagcctctctttctctctgttgagatttggtcttttgctatgtattgtaatgcttaataccggcccccaaagcctggctgcccccaaggatgagagaaactgcacataaacccaactgacactatgacccggccccccatgttatccctgattggtgaataaagatgtctacagcctacagttgggcagaattgagatacggaggggtcttggggtttcctgggtttggggtctgagacgaaccacaaggagagggagaaggagaaaaggaggaagatgccatgggttaggtgagtcatgaaagtatggccatgagggctggccaactgaagttaaaagcagcccagacagaacatggcaagttataacctagggttatggatcaggaaatagattctaatagcatagatggtggatatctgttcagttctagtgctgattaaggcttcttataataataaaagttgtgtgtcttttatctgggaactgaatgatctaaggcagagtagaagcccccagttgagattaaataaattgtacaacaaatgggtgaaccaacaagtggcaagaactgacttttaacaaaatttatttcagatttcctgatttataaaaacacaacaaaacaaaatatgtgctgtcctgttaagactagaaaggcaggggtgggggtgggggatggttccttagcaagtgggattccagcaaacattgaaatgcatgctggtttagcacacatgatttcagagaatgatttcaggggttaaaccatgagctaaaacacagctaagccccaaactgattgatcaccaaatggcaaagcccatgaacaacaaagtggcagactccaatgccagcctatgctcttcccaggtgctgctctgggctgtctaatgcagcctaatcacgtggatgctgaaaacccctgctgtgcaatgaagcaggcaaaatcctgctgctcggagtggagagtaaggctgcatgcctcccgcaatcaagaaattataaagaataacatgaattaaggagtcacggctatctttagcaaccagtctctataaacgtgggcttccacaggaaaactgggactgcttgtcctagcacatgacacatacatgatggccgagaatgtgcttatacagtgagtagaagggaacttaatgaagctgaatatagagaaggatattaaattaattcatatagaaagaaaggggacataggcatatttatctgcacagatattaatctccaaagaagggagaaagaaatgagaattgatataagtgtcttcaaggatatagttaagtaaataaatccaggccttgatctcaatacttaggagacaaaggccaggaaaaataggttccttgtgagtttgaggccagcctaatctatagaacaaattcaagtcagtccaggattcacagagaaaccttgcctcaataagaaataataatagttgtttttaattgttttaaatgtcaaaatgaaggtggttataagtttttcctaaatagaaaatgtgctgttaaactgaatcaatctattcttttgatgacgtcaggttgctgaaccaaggacatgttatttttggagagaggctctgtatttgtgttaccagaaaagaataaaggctttggactccttccaaagtaataaggatcagatttgatagaggaagaccccctgaagatcttggctgcagacaggaagaaataaataaaaagaccaaacaggagaggtaacatgattttgctgatccctttacctgggaacagtcttaaactggctgagacataaaaatgtctctagccagaactggagttatatatatagccaatggactatgttggctacagaatccctaagattcatctttccatatgggatatattacagtttggttatatgttcaaactaactcataaagaaagactgttgtcttttgcctgctcaaacaaggagcaaaaattcatctgaaatgatctatgcacactgcacattccatacgtcatgacaatatagaaatatatattacccctaaaaggtttatgttcatagataaaacaaccaagataaaacctgacaggattcaccctcgaggatgctgagatgctgagatgctgagatgctgagatgctgagatctgctgttccagctccctgactgatcctgcctcaactgatgatgctgtttctagagacttgattctagaacagcttcagaaaggactgctaatcctagatgaccttggttcatgcagcctctcagactgttccagtcagagcttcagttaagccctgaactttctcaatacataaagactggacaataaatgttaaagctaacattcttttgattaaaccactcttccaattttcgtttgagcttaaaactagaattctttgccctaactcagcagtcaggagttacagggagactgttgtcccttaagttggggtggaaggttttggtcattttataagtgatacatgtattgtcattttaaaggagaatttataaataattattgtcttagacaggaaagaaactaaataggggggggttagacacagtgatttctatctttccttcactctatcttttctttcttagaatagggagttgaaaagaaaaaggggggtacagaaatattataagaattagacaaatatgggtagattgttgaatctactcttaaagattctactactaaaagacattttaaaaccataatcttacattggtagagatctttatattttaacataatttggtaaagatctttatgttttgatataatcataaacttacattgatagagatctttatattttgttacattggtacagaattttatatatcattacagtttaaggttttcatttgtataaatctttgcatactgatacacaatttaagattaattttgttacaatatagttatgtgtgtgtcaactcttaggtaggcattatacctgtgcaactcatttattaattcaaggtttggtcctaattcttttaatatctgctattataaactgtttaagataattaaataatataagttaatagacagtcaaacttacggtcatgtcagatattaatctagattattactaaaacgtatatcttgggttgaataggtaatagattactagagacaggcaatgtttgcttgtttagatatgctataaaagtgacagatggtcttcaaaagcatcagagatccaaataatatgacatttaaaatcattattaaaaaaccgtttgactatgagacaggtctgtccctgacagtacctctagtccacttcaaaaacgatggtaagcatcaaaaacttccacgtggagttgctttaattttgccaagtttggcactggacaagaaatgttcaaacttcatctacatgttgtccaaaagggacaaatggatgcaggatagttgattactaagctctgccaagacagatcctatttgaggcaaatttgccctagaaccaggtcccaccagaaagcttgggacagtttcactgctccctgctcaagtctcctgtcaggggcctggagttatttgatacctctgggacaggtaagaaacagtgggtgctaatccgccagaactctaagcactgcagggcagctgagtctgaggtaaattctcacctctgtggtgccctttgttttgaaggcttccggtttcttaggaactcctgaagacagcctcagggcagggatcctctagggaacgccccctttgtattttgtgtagtaaaagccaagcctggctgacattatgggtggcttctgaacatgattttaaattgaagctttgctatagtccactaaatcaatttagaggtttctatggcaaatttgcctcaaacaggatctggcaaactttaaataaaacaaaaacattattatttttattctctactgaactgggaaatgaaacagagtttctgttttcctttcttctcctgccttctttctcctcccctccccactctccctctccccctttctcattccttttcttttctctatgtgtttatactcatatagacacactcatataaacataattttttaaaaaataatttttaaaagacgagttcctgtctctgtgacacagggagaaatagcaacacctacttcatgggacaattggaaggataagatggaatcagattgtaaaagactttgcaaagtaactgatataaaaatgcaaattagctgttagctaatgattgtggtaaacaaggtgaagaaaaagggtggaggaatgagagggaatacatcacaaagcctggtctacactggcttagaaaggaagggaaaactccggaagatatttaaagtgagacatgaaagataaaatattgagtaagtgtgaattgagtaatgtccagagcagagtgtgtaatagcacacgctgtaacttctaggaggagaaaaaggccagtgtccctgaaatggcaaagtgtagaagcagacatagggtaggctggagaagaggagtgggaacgcctgtctacctgttcctcccttccatccctgttgacaagtcgctaagccaggctctggcatcttggacctaaccatgccaatgacttacccctcgtgcctctgtcatactttgtagataatctcagaagattaggtcttacatcatctctttgatcatgacactgtcatatcaggaaacctgaaagctgactattgtacatcaacaaaacaacgccccctcccccacccccccaccccccccccccgcccccaaatctaaagtccttctgtgagcatgcagtgatatttcccacatggcttcaatcagctttggttcgctttctcaggtctctgccatgctctgtcctttctctgtaatgaatccttcttgcttccttgtcagctagcctttgcctgtacaagtcctgcccatctctgaaaggttggtatcacatgctatcttctcattagaagttatttatctttaaattctgtatattggttattttttgctctggttggaatactagtgtctctccaaaagttatatattaaagttttaacttccaaggtgataatgagaatgtggggctttgggtagccttaggtcatgagggcacagtctttataattggaattactgcccctaccaaagagacccttaagaagtagtagacccctccccattctgtggggcaaacgggcaaggagcaccatccatttagggaagaagcttcctctagccgccccccccctgccccccaccccccactgaacctgctgccttgatcttagattaaggatcagatcttaggtcttagatcatggagcagacctcatgtgtgggagatcaaagtttctgtggttttataacaccatccagttcatggcacttcattacactagtctacatagacaaaaacagcattcgcaactatgacatgtcctctgaaagtaaaataaaactgcatttcttaaattaagaaactttaaaaatcatcatccatcattctattgctggaaattaactcttgtatacttttcatgattatgctatccacaaaaagtcattgaaaacattatttgaaggggtatataatattcaagtctagggacatatcataaaattagttctgtaggggaacttcagtttctttatccataaaaggactcagtgagaacactgtgaggattaatgaggtgagtattaaagtgatttgcattaataatgaggacattagatgcttaatgaatgatggttgtgactccttttcttgtccccaaaattctctcttggctcatctgctctcaatgagagctgcagtgagtagtgaggagggtgggaaactggtccctaaggggttttcccagctcctaaaacattcataattttgcctacatgagacagtctttctgttcctcacaggacacagatctctgacctagtaaattaacacacctaagacatacaaatttgtaatttaagcaacttgttaagtcaaaacagagactggatgcgcattaaatgtggcttgaagttgatggagattttaaattcatccatttgtttattttttcctgaccctttgctgtacacgtaattgtggcctgttttgttgattcagctaaaagcatcttaggcttagtttctttacatggcaataaaccttcatgttatatggcttagagttagtcttatttcatctgactccctccacgcccaagagcgcatccttctgctctgtttaaagcctgtaaatctttgataatctcatacaacaaccatcctcttctctactaagcactgtgtgcctcacagctgggctgtttcttcagggatttttttctcctccttgatcatactgggtagccagctttttaatccctttaatccctatattttaatatccatgtggttcccttgctttccatacttaaagaagagctggctccccatgtaaactagatctgcagcccctgcccatgtggaagccttagtccttcacccagcaagttccccaatgttggccgtcccccgcagcatatcctccacactaaactatgtctgatacggggcagcagatatgtctggtacgctggttattttctgcagcatggtgacataacatctaccttagacaacttaaaggaaggagactgatgatttctgttcaaagtccatcctgttgattctagaagtagatgaggaagattaccacggtggcagggccatgctggaatgaggctgttcatctcacagtggacaggaagtcaaaagaaagatggagagctgggaccagatgtacaacctttaagggaaagcatgcctcaagactcatcttcctccagttagatccaaatttctaaagcttctagagtttccccatgttagttacttttctcattgctatgaccaaatacctgataaaaagcaactttggaacatttattttggctcacaatttaagggatacagaccactgtggcaggaaaggcacggcagcaggaaggaggccattggtcatacctcgcatcagctgacagaaatgccgagggcaagctggaagtagtagggctaggctatagaacctcaaggcccaccccagcgactcacttccttcagcaaggcaacacctcttaaaggttttcacaacctttctaaggacagctccatctgggtaccaggtgttcaaacacttgagtctacgggaaacaatatgttcaaatcaccaccctctctaaatagcacctccagccggaaactagtgttcatgaatgtggcggacatttcccattcaaactgcaacagtaagtattagctgaaatcatgacaaatctactttcttcgtgatattagagacatgcatttaagacatggaatttggcattccactaactggctttgtgttcctggacaccactacctgcctctctagtttgtgacttcttatcatttcactaggaaagaaattcttaccttgttataggtatacaaggaaataacacgtgataggatttgacacataaaacatacactacaaaagaagtcttttctctttgagacatcccagttgaatctttaaaggtgatatttgcttctcttctgagattagctcagctcagaagagaacacagtatgtatggggacggccgtggaaaccagtaggaaggttggaaaaggacagtagcattaattggtgctttccaaaagttctgattttctttcagtaccttttgtaatacaataaaatgaagcaggtggttctgtttgtcaaactgaaaagttattgtatattacctctgttttctagcctctgtgcaaaactatgaaatgcatatgcatctttgcttacttactttcttttcttctctttcccctccccaagtggtttttattgtgttgtccccctcaacattatattattattaattatttgggaatttcatacaatgcgccctgatcataattgcttcctctcacccttgtgccacctccacctcccgccaaacaaacaaaaaaccaaaccaaagcaaccaaccaaaaacaaacaaaaaaccccatcaagtccaatttgtgttgcctatacagtcactgaaacatggtcaagctcccagtggccagcatccaagccagttttaaaggactttcttcagtggcttcctgtctgcactgtcttcttggggaagtggggaaggtcatcccagaagccttcagtgtctcttattctcagttatgagtctgccgtcatcgacaccactgtaaaagcagctttcctgtccatagcagatggcagtagcatgggtcatggacttgcgcatagtttcttaagttaaaaatcccatcaaagtccagggactttgcacagctgtgattgacacctgcacagctgtgattgacacctgcacagctgtgattgacacctgctgcttttctttagaagcttgcctttgctctactcatctcactccatcagcccctctgtcctgtgtgctttcccactcgatatgcattttcctatttgcttagaataattcattctatgaccatattttaattacctactccctctgtgctctccaagattcccaagtaccaagaatttatttaaaggagaatgctagctataactaccatagagatgacattcctgtacccaaataggaatataggacccacacaagttgattaattccaaaaacttttacagagaatctatttctcaagaattttattgatgaaatgccaggacacagatgttttgaaatgactcctattgatattcgtcagcttgatctgaggcatcaaggatacttctttaaaaataaaattaagttttaaattttatttctgtacacgtatgtgtgtctttatggtagtgtgcatacgtgtgtgtgcttacaaaagccagaagaccacccaacatggatcctctgcaagagtaacaagtgctgtaacctttacctgggatgtttcttgctgctttattgtcagtaatgacggtatatctaaaactcatgaacttgggagtgtctgtgagtggggaatgtacacacacacacacacacacacacacacactataatggacaattggcaattgtgataatcatatttacttttcttgccactctggcaaccttatgtttaatgtctcagataagataactcattactgagtttgagaagcaaacagccctcactgtgtctcaaatgtgggcgcttcagaagcagcagctgatggacacataaatagaagcttagaagacttgtgaagatgcttgtgttagtttttgatgtgcatccttccacaagccttttaattcagtttttaaaatatgtgcattgcaggcgtgtgtgtactagcatgtgttggggtatgtgtgttcatgtatgtataggggcatgtggtggtcaggggttatcattggactttgttccatgagagctgtcaacctattgcttagagactattacctggagctcatcactaggctagccctcagcaagtcccagggatccttttgcccctgtttcaccagtactggaatttcaagtgtgcaccactatgtccaatggtttacattggttctgggatttgaactcaggtcctcatacatggaaggcaagtactttagtgactaagctatctacttcccatcccatccccatccccccacacatacacaagccttcttatcttttcatttcttataatacacttagcaatacatgtgtttcaattccttagagcttagtcaaaacatctgggaaatttccatcacatccttcccttatctctgccccctccaccactgccccttactttggagtgtcctcaaatacctgcctgaggcctaagttccatgaaggataagtgctggtcctgagtttcactctgggtctgatctctaatagttcacctgctgtatgtaagtgaatgacagacagcagagatgcatcatttacagttctggagtgtcatccctggtcatcatgtaggaggatagatcagtggctcctttggagtctgtttaataagaatacagattcccatgatctcatcatcaaacccctcactcctaacttcactgtattccaacaggggatttgggaacaaggaaattcgattgattgccagttctcaaaacactacttgaccttaagcaaggtattcaatcctttccatactctgtttatagatcaattaaaacaaatgtgttagatttgatctatctagactttttgtcaccttttctatcctgcagctcataagttattatatttcagttatgtgtataatttgttatgtttatacaattctttgtctagccaggagcttacagctcattcaatcaaattgtataattttacttactagaaaataatgatggaataaaatgccaattttgtataaaataagttaataagcaataggaattatcctgggctttctcattcaaggcaaataattataaaataagtataattaatcatggacagatcctataaattgctttggtaagggacaagctagcaggtgtcgattaaagtgagattccccccccccaattcctatgattttaagaattaaatgtgtcatctcattctataggttactttatgttttcttagctaattttgaaaattccacaaaacctttgatattgtccttgaatgtcaggcccaatgtcaaaattaaatttcagttttgaggagaaaaatagtggccttttaagacaattgttaagtcttgtaatgtatttgtggtgtttggttacacattacattaaatatttttatttaaaaatatttaaaaacctttttcataatataatcttgatcagatttttcctatccccaactcctcccagatccatcccatctccttatccacttaactttatgttatttctcttcttcaaaataacaacccataaaaatacaacacaaaacagcaaaggaaaatcaaaacagatgaacaaaagagaaaaagaaaagaaaaccaataaaacagaaaaaaaataccaaacctagacagaaatcacacacacacacacacacacacacacacactaagacatggagttggttttgtgttggccaactactcttgggcatggggtatgccctggagtatggctggtatactcagtgatacttcattggagaaaactggttgttttgtttgtttgtttgtttgttttccttttcccaggaggaatcatttgcaaacagctccttggttaggggtgtgactttgtgtctcttccccctctcagcgtctgtgagttcatatgtgtatcagaggaaataattagtcatcagtaccatccacctacaaatcctgtgacctacaacagagtcctgcctggaagacgtaccggtgcagttgtgacacgaacaatactgtactcaccagctacatttttactggatttcaggcccagtccatgagctggaatccatacctgacattgctaacttggaaaagaacctgagactagatagatcatgagcctaggaaaaatctttctatcattattctgctaaagaaactcagtaataaaatgactcctaatctcatattgctatacttgtagatgagagaagtgctcaactctcaccaaagaagcttcttgcagaaagtggtaacacagatacacaactgaacaatgttcagagagcgagagacctcagagtattctgcagtaaatgggatatatttatcatacctcttccttgaagactcagggttctctgtggaagaggagatagaatgattataagatccagaggtggtcagtgactctaaggaagtagcgccttccagatataacaggactgatggatgctgcattttataaacctggttcaattgcttttccagtacattttctggattgtgtgctactcagttaacctgcttgggcaggctcttctgcattttggggtgaattttatagtttatttcaacaacatctgatttttgtccatcgtggccctaggctacttgcatactgcactcgaggtacaggtcagctctatagtctatcctctgtccccaacagtgcttacagttaccagggaatagtctccctctctgctcagtcccagatgcgagcccactgagtaaggtggacagtgagaaacatggaagcagtgagcagaaccaaccaggtgacacagtctctgctgtcactactgccctggtctggttctcctctcctccatgtgagaactctcagctcaggccattgactgcgttgccaccattcttctctttagaccaaagtaagtgcaatgtctttctcacttaccagttttcctggttgctttcccatagaatgacatttttttcaaatgtgtcccctgaacataaaattaaggcactggagccagagaatcagcagtgaaatgtccaatcctgatagaatttcctctgcatagaatatgtcaccactatgctggtgctgtccctgtcagctctcctaccatttttccacaatgctttgttctccgaggtcccagccctccagctttctaaattctgtgggtctctgagcctctctggaaagtgtgggaaggactctctctctgggacactttgggatttccttttctgctttctttttgtccattcatcaaattattccccccaccccccaccccaagacattgttccatagaggattaatctccacttttgtggactcactcccacatcttcaagttctctctctatgatgttatggcatgtcaccagggccttaacctgtatctctatcctttatcaccaactttaagggacagttgatagatacagttgaagtgacatatcactgattattattttgtacccaggaaattgataatcattgtcgtcagactcagtgtcatttctggcccaaatgtgctcatccctttctgtctttctttagttggtagcacagtccttctgcctctacattcctaacaatgtgtagtccccttaaatgaggacggtcagaaatatggccttacgtatatattccctataacccttttcagcgtctgggccttctgtgtcaatgctcctcagcatcaagtcccagaatggctgtggcagcctcatacaagaccttgtcacacatgttctccggctacctgcacttggattctgtagctggctttggtgctcactgaagggtgagtcccttgccaccctcagagactcagctcatgtttctcctactcagctaagcctctttccagcgcattgtcctttgccaaaacatggctttcttgtgtgctgccatcctgttcacgtaccgaccttgaccttagatcctgttccacacactgcttagatgcacctcccttggggagtctcttccagatctctgtgacatctgtttcacaaccttctttgttgtgattctaataccttggctgtcataataatctttggcaattctcagtgttaggtagatagttagataatggtgacttgaaggtcactgaggacaagatgattgcaaaatcaggaactggaattttgggactcagattactcatcaaaaaaatgggatctgagtttattatctatggcccctgggtgtagatttgacattctgagctgcccagaaattatgaggttcctatctagcagaggctttctagttacaacaaatcaaaaccacaataaaacaaccaaaacaaataaaacaaacaaaacaagccaagaccttacttcagagttaatctaaatgggccccattgattcctgggatacctggaagaagtttctagagagtgtagaagtagtattcagcctagacattaagatcggcatgatggtccctttgtccaccgtccatctcaccctggatagcagacaggcatggtggccccttcatccacagttcattctcaccctggatatcactccacttcattctatgataagctctgctcatcctcatggtacactttgttcttctcactcacagaagcctgggatccagagaagtccagagtggaatcccagggacttgaagatttgttcagcccaccctttttctcttcagtaatgatttgtttgagcaaaactgatcgttatgtcaggtttgtcttaggcaaacagtaggtttcctcacctcagatgttttgggtaaataattgtacctttagcttgtgttgctctggccacatgctactttccatccacaggttgcacctgctctagatggccagactcttccacttctgctaaacctgtacttcgcctctcacccctttccgttgtcttattgctaagctgatgggtgtctggttaaattggtaaccagctaggctggagatgagggagagagcatcagcttttctttcttattcctgcatccttttctatatcaaaatcgccagtaagtttgatgaaaaaattatcctacatgcttttgtaacaccaagaggtcgagtccagtctgactataaggctctcagccaacaacttactctatgctctgctgaggctcttcaaagtgggtgggcaattattggctgtgtatttgcataatggctttcctgttgtttcctttgtccttttgtgactcctacttattgctagatagtgccagtgttagctcctagacactgatagggactctctctgctgagatgtaaaacttaggtaagttgccttctcaatgcatgatgtagaatttattggtgctattgtaacttttggatatcaaaggagatgaacctattctctagacttttcaccccaggactgtaaaggagatccctagatgtaacttttaatctttctatcccatttatagattcagctacaaacaagaatactcactgattcaaagattatgctatccagaagtcatgtgctattttcatagaatctgggacttcccacagttccaaaagcatggtggtagcagcagggtatatatcctcaagactctgctcactgttcgctctaatctattccttcctgttgggcagtggggactgggggaataaagggaatagtagaaaacctgtgtgccgccagagttccagtgctctgggcagatgccagaggactgtccctgggtgggtgtctggctgtgggaagccactggaccccagcttggcggcggtggacaaggggcagtcctaggtctctgggcctcatggaggtcagagataacaggctctcagtcttgggcatcccacgctggacaccgcggaagagctgagaacaaatgggggcccagcggtggcttgttctttccaggggccgaagagggaaaagggcagggggaggggggcaggggtggttcccatgtgggcgagagttcttgatccagtccatggctggagcgcaggaaggctttccagcagggaggttagaccgggctcattaggggaacacctattccattgtgcgtccccgatgagcagagacagtctatggctttagagctttattgtagaaaggcagggagaaagagagaatgtagaaagagggagaaaggctggccatggccacatggagagaggggggaagggaaagagaggagggttagagaagagagcaaaaatagtgagagcttaaagagagtgaggaggggccaaacagcccatcttatagagggctgggctatcttgctgttgccaggtaactatggggaggagcatacctggctatagtcaggtaactgtgggggtggagtctagccagaatgccaggagcttgggacattttctgcgtgactgatagtcacatacctctcctgcaggggctgtggagggtaattttgacaggagccaggggtccaggcgacatgatctaataccttccattccatgtaggtggaaatcaccaccaatcgggtccccagggttctagatctttgctcgactggagcccaggctgtctgtgcacagctcactgatctctctgttctccctgtcctgcagtctccacagcttcccactctctccaagaaagaagaagattcatccctatcttccaggaagaaagttcttcataggacgttgtttaataaaataaagctatatttttaattaaggatacatttcctaaagggccatctttacttttttttttttttttttttttttttggtttttcgagacagggtttctctgtgtagccctggctgtcctggagctcactttgtagaccaggctggcctcgaactcagaaatccacctgcctctgcctcccgagtgctgggattaaaggcgtgtgccaccacgcccagcttccatctttactttatatagttagtgaatttccaaacaaagttgccacatgattccatagttctacttctcacaccatcacatgtccacaagaattagaggccgattttgaagaacaatttgcatactcattcatgttcacaataccaaagggaagaagcaataagagttaacatcctgggacagattattaaagtaaggatgtgatagatatgatgtgtgtatatatgtgtgtatgtgtatgtgtgtgtgtgtgtatgtatgtgtgtgtgtgtttgaaacccccaagttggtaaatcagtttggaaactatagcccctctggatgggtcaaaccaccaggtttctgctttcctctactaggtctcacatgtgctagaccagtctctgtgaagtacacagctgaccttaacatttgatcccatctctgcattgtgggctcagtcctataggtccctgcttagcactgaaaagttcctttaaccaagcagacagatttattgagatgggctcagaggatttttctgaagtctgctcccttccaggtataacaggacatgctgacaggactgggagcagctgagtggcttagagcagagggaataggctgctaacctgacagacagatctgatccctctgcagttatgctgaacttcagcacggccccacactcccgaacaggagtgtgaccatgcactcagtactttcctgcttcgcaggctgctgccactggctctgccgcctcctgttctaaccctgacagaccaaactcacagctcagaagtcactgttcctgttcgcattgctctcttctcctccctctgtccggatcaatcaagcatgataatcacaagtttctcttttgtctccctcactggtgtctgtctgcttcatcattgatgtgtagccttgaggtagatgtcctgcccagatgaatgcatgaatgaaagctactgaacaaaatacctacaagagttctagaaaatctggaggccctatctccacagagtaattcatattttcacatttcctgaggctacagacctctctctctctccctctctctctctctccctctctctctcacttcttccctccctccctccctccctctctccctccctccctccctccttccctccctccctccctctctccatcctttctccctcttttcctttttttttttggagatagattttcctgtggtccagccttgcccttgaactcaccatgtagctgaggatgaccttgaacttttggtccttaagcctctacttcccaagggctggcttatactaactgcaggcagaagccagggctttttgcatgctgtgcaagcacttcacttaactgagccacgtccccagcccccaccgtttgtttttgttgctattcctttccctctaagatgttcacgaaaaagcagtgcagaatttataaacagacccagttttactaagtgtagctctgtcagagagggaaagttgaaagccagcatctgaaaaccttgcctgggaccacgtcaatcacagagcacggaagggaaaggagccctgagcatcccatttaaggtgtttatgagaaattagtgatgtgccatactccagtacccctggtgtttctgaatgcagcatacggtgactggcctgtcctatcagagagtcagtgagcggaaatgacaatgtgactctgtcctcacactcatgctttgcatgccaatcctatcgtgatagaaattttccttcaggtgactcagtggagttgcctgcacaaactctgttgcctagacagtgtggaagagaaagttaggagaaggcctgacactgagaaacaagcttcccttgtctagtagctgtggcctgtggatcatttccctgtaaactaaactggctggtaatggtaccttttccatattaacatagtatttcgagaggccccacaacacaagtgactgggcaaagcaatgacttccaagtggctgaaaagcaacttaggaagtgatggggcccgctttgggcatgagaagtgacagctcacatggagactttaaagtgctcctaggagacctgttcagggcaggcagcttaagactgagagagggactctttctgggagtctccctaatatgtggcacccactggagagtggcaggcagcaacacctatggcaagtaattctcaagatggagcccaccccctatagccctcctccccagccatgtgctgcccatgtgaaatcctggttggagacaagggaggggtgtgttaactagacaaggctctctatgaagtcctgtcttttgatttgagcacaaatttatgggatctacttgtatcagacgtagtctctgaaacaaaatcaaacgttttgtctgctaaatatacagatgctcttttgggtctagtcactaatatgcctggctcctcctggccttcactaactgtaggaatgatttgatagtttccacagtggttatggtatggctgtgggaaagaggtagaagaccctggaaagtttgaatcttttaggacagaaaggaaagagttaaacccctacagggaagaggactgggaaacaggccagagtttggctcctttttgctaccacgatgtgtagagcagggtggggctaaggaggggagatgctttcacagggcctgtgtggtcacccactatactcctctcttctgcagtgtttctttggcatctcagatccagtgaccatgcttaattctgatttacacacagagttgctgaccttgcctatggtattctatgagtaccatttattttcagtagtattcattttgaaattgaacaaagaccctaaagtttattgccctaaaaatttaggtggggctgaccttgggctcctcagggaggtggcaaacagaagtagagagaccatttgggctacctgggttcaacccacagccaaccatttacctctttaaatgcagcttctgaaaacttctatcaggcacctgaatactgaagtgcatgaccgatggataggtgaggcacaaagtcaagggatgtagcgggcaatcaagcacattagaaattggaagtcattgtacaaagatgtaaaggatttttcatgtgcataagacatgttgtgtgggctatgatagaaactagacaaccccatcagattagcatattgatttttgttccctttttgcaaatacattagtacaaagacacagaagaggcgggcatgagtgattgaatattagaagagacaattgtatttgctattctacattaacctaataaataactctattatctagcagtgtgtccttggaaatgagaactgccaacacatttccatacgcgaagacagcgaacaataaaatccctggaatgttactgagatcagatctttgtgttattcacagttcacatttgagtctccatcaggatcatgccttcattcatttcactttagtggtttataatgtggtaacatttcttttctctatctatattaataaacaatacctggatgttgacagctttcaaattgaattctctagttgtaagcttcttctccagctcctgactcaaagaaatatctgcctaccaacattcttagatggaatctcaaatctaacacccagggaaggagtcagatttgaatttgctagtgtcccatgaagcatccttctcctccaaccagaacagtggtactcaattttccagttcttttaccccagactctgccatcatccttggcatcatatcagcacatgagcagaccctgtcacctctggcataagagtattcacaggatctagcaagttcctaccagttttgcttccctctcaccatctctgctccctgccatctctgcttcccaccccggcctcagcctcttcccaccgctacccccacttccttggcaactccttgctccagttattgtcacttacttttgattgctctgctttggatgttcccatgcctcccagtcacacaaacattctgactgtgtagtcagaggtggccctaaaatctaaggcagaccatgccagtcctccattttcatccctctatggtctttccaattcaacaaggacataggaccttgactggctccctgtagtgtgttgccttctgcattattttatgattattctttactcttgcctcagtgacctcctgcctacaggccagccatgccgggcattctgggaaagtaaggagaaagtatggcatccttgaagttgtgagtctcgatgataaatttcagtacctgtgagtaagtggggaatatggtggataaacttttaaagaaggaagacttagtcttatccaagtaaaagtaaatattcaagcatgtgcgaaattgatggactatatccaacaggtaaagatggtccatagtgtgttaaagcaaagcgggatcctaattaggtttcattttaagaatttaaggtggaaggtgtactgaggaagagagggaagttgttctagaattacactatgacacagccagagagacagtgcctggggccaatggtggtagacaggccagttaagagcaattcaggaagtacggcatgccatactacagggtacacatagtcaagatgagacgcgagagagagttctcattgatcaaaactgatagaggaaaatgattcatttccagctggttttttttcagttagatggctgaaagagagttcaatcagtggtttgaagtaagtcctttgagtcaagtgtatgtaacttaggcagggaaaagaaggcccataaaaggctgagtctcccattttgaagcagcccctcctgtgtagacactgtgccacatagctgtagataagaaatgttttcttctcttgtccctgtaggaggaggcgagctgggtgctgcgaggcttctcagtggcttgctcattttattaggtactttttccattgtttggtacttgttcccaggtgtatcattttccatttcacactccataaatatgtacataaatattttaagagtttctgtctctgcagtttggatatgtacaatataatggataatggctcaaactgaaaaggacccaggtaataaattgcactgttcttcaggtttaaattaatctcaaactcaagagtattgtggtactgttagcagactttagtcacaataaccaccccaatagcagagtctctatttcccttcctccttgtagtcctctacaccttctccctcatccttgttgctatcccctccctccttcgcatccattttgagacaagtttctattctgaatcctaggctggcctggatctcactaggtagccacaggaatccaactgtctcttaagtgctggcattacaaatttgaattaccacatgcagcccatttcatcttatttatttattgttttattttcgtgatgccgattgaacccaggtctttgtgcatacagacaagagctctagccctgagctacggtcccagccttccatttcattttaaaaatgaaattgcatggtgaatggactcatcgagccccattccttggacggcaaaaacatttagaatccataaatggtcttttttgaggctatgttacagcaaagttgtcacacacaaaaagaaaagatggttggcaggcttcacaagccccagggagcaaactgagaagcacagctgcttcctagccttttgtacagagatgggaattcagtgcaaacctgcactacacaaaaccatctctctgccctgctgctcatgtaaacggcccagcttctatactccaagaataatttaaatggagcaaaacatcttgacaaagacaacaaatttattaaaacataaagtcttatcatttggtggagtctgtctcactaaatggaagcagcttgtagcccatcagagagccttgcatagctagggctgacctcacatgataactacaagcccagctgtgtcttcccttcgacttgattcaaagttagaactttgatgcatttcacatatgaatagctctcaagagaattgaaaatgagcatacatattaaacggtgtctttgtcttgggtgagcctctgcttcatgaagcagatgtagccaatcttcctgggaagcagaggctctgtagtgtgacatttgtgtccatgtaggatttggctttctcacagtctgaaacaatgtgttcactctgggtcttctgaagccttttgtacaagggggtctagcctgggagattacatatcttgtagcaggaacttcatacatagctgctgatgtaactttaagacagctcaggtgctctataaatgtggccactaaaatcaaagcagagtcagtggaaaataatgtctgcttctgacaacagagtgtatgaggacagacattcttgtagccttgtctggaaagagacaatattgtacttttaaaaaaaattgtatagagctatctcttgtgagactatgccggggcctagcaaacacagaagtggatgctcacagtcagctaatggatggatcacagggctcccaatggaggagctagagaaagtagccaaggagctaaagggatctgcaaccctataggtggaacaacattatgaactaaccagtacccctgagctcttgactctagctgcatatgtatcaaaagatggcctagtcggccatcactggaaagagaggcccattggacacgtaaactttgtatgccccagtacaggggaacgccagggccaaaaagggggagtgggtgtgtaggggagtgggggtgggtgggtatgggggacttttggtatagcattggaaatgtaaatgagctaaatacctaataaaaaatggaaaaaaaattgtataggagtgaagcagaattcaggaatctgtaaatctattaatttttagcagaaaaaaaaatggtggcaaaatctctttcccccagtttcatgtagaacctccaactacaaagaggtaaagacagagttgccgcaggaagccagcagggcagaggaaagctggattctgtcttttcagactgcagactgactttcagacttcaaagagaaggtgccagagggcagagcttcactggacagccagccccgtggaggcttagccctccatttaaggagcagcaaccacgtataggaagtaggggactcactgccagtccagaagggcttgccagaggctggggacaggttgcccagctgcctctcacccctggatctggccaagagatttcatcagtcctgttaccagacatggagcctggcagcaggcagagcagtgcaggtactggttctactggacgggttccagatcgtccttcgagccaggatgcactgagtaggaagggacatactgactggaaaactcaccagaatgggactttgatatatgaattaatccatgttagcatatgccattaaaacaaacaaaataaaatatacccctcccccccaaaataaacccaacaaaatcttaggtaaaattcagaagcagcttgctgccggccacttgtattgtatgctttgtggtttagtggctcaagactcatgcaacatcacagagtactttgaaataaaattagtagactcaccttctttctttcaaacagggtctagagatgatatctccctgtttgggagttaaaagaggctccaggcctgttcaatgtttccactgcagtgtggtcctgattctatttataaatatttaatagcactgactggtgaggagcccactatgtagacctggcagccccagctggtgtagaacccactgtgtagatctgatggactgaaaaagcacacaccaccatgtttgatataactctacattcaaaatcgatcaaagtatttattgtcaggagtgttgggactagactttctgggtgagcatgtttactaagtaaaagctgtgtggctctaggtgcatttgtcacctactctgtgcatacagcttctgaaatgagtggcacgcagaaaggtctcagtgaatattactacttgccaataatggatgatacattcccttaactgttccgagaaaatttaatgctatgttaaccgttatgttatagaaggtatagatacatagaagaaaatactatctggtttaaagcttaagttacaatttttgaatcagtacaggggaattccagggccaagaagtgggagtgggtgggtgggggagtgggtgggggagcgtgtaggggacttttgggatagcattggaaatgtaaatgaaataaataaccaattaaaaattttttgacaagttcatctccttcctaacatcagtgtcaacctgagcctgtggaggcatcttcacatttcactacattcatgctttcagtggagatcttattttgataaatttacgtccttcttgcttagagtctttctaaggatctagaagatggctttcaggaaaaagcccgatggctgttgtggtgatgactcagtaagtgaagccttgtaagcatgaggacctggtttgcgtccctaggacctgtggttctggtttttcttagttagtttttggttttgtgttttaaagaattccaggccaatgaaagagcatgtttcaaaacaaacaaacaaaaaaacaaaaaaacaacacaggttgaacctcggaaatggcagattgttctctggcctctacatgttcatgcacacacacacacacacacacacacacacacacacacacacacacacacacacactggaggaggaagggagggagagagggagagagggagagagggagagagagagagagagagagagagagagagagagagagagagagagagagagagattgatttagttctgacatgtgcctgagggaatttgctaaattcctctaggagccataaggccacttaacagttgtgtgagctgagtatctatcagccgatgagcatgttcaggtcccttgctacaggcctcacgtccactatctcgtaaattacaagaagcctccaagtggatcttcatgttttactaatgatgctcctaggactcagggacctgctcttattacctgaggttctgtaaagtcgtgtggaatggggagcttagttagcctcagtgtgctgggtatggaacaaaagcactaacagttgtttctagtgtgggtgtaaaaaacaaatgtgtgcatacgtatatgtctgtgtgtacaatataaggtgtgtacatatatatgacagatctattatctatctgtctatctatctatctatctatctatctatctatctatctatctatctatctatcatctatctatctatcttttaaccactttctttcattctctctctctctttctttctttctctctctctctctctctctctctctctctctctctttctttctttctttctttctttctttctttctttctctttcttccttccttccttccttccttccttccttccttcctttctttctttctttctttctttctttctttctttcatctatccattcatcttctatttatcaatttatcccttatatatgcttgtgtttgagcatgctagacaggattcattttgtcaatggcgttatcctcatggggattactctctgtagagaacatcttgcttctttaaaggaacacgcgtatctaagaaagccaagtggtaaatgaggatgtgtctgctgaggctgtctgtatactcccagggcacagttctagctactcctcatcaatttctgtccaaggttcctgcacattgcccagcttgtgttaagtgctaagactcttctatgttgtgcttaataataatggcaagcctttaagccttatccttatcatcattaatagctggaacgagaggtttttccccattgggatctttccttgccagccaaactgttcaaggcagagatcaaccaggtcaagtttatatccactgacctggagtgtgataatgtacacagcaaatggctatcacccgagtcagttaaaggccaagcagaacactctggactcctcccagacagatcccttgagaaagagaactaaccctccaaatgctgttcttccatgagaaagatccttaaatttcaagagtctttggaggttgattatgggatggatccccgggtatggcagtctctagatggtccatcctattgcacacactagcaagattttgctgaaaggaccctgatatagctgtctcttgagaggctttgccggggcctagcaaacacagaagtggatgctcacagtcagctattggatggatcacagggccccaatggaggagctagagaaagtacccaaggagctaaagagatctgcaaccctataggtggaacaacattatgaactaaccagtaccctggagctcttgactctagctgcatatgtatcaaaagatggcctagtccatcagtggaaagagaggcccattggtcttgcaaactttatatgcctcagtacaggggaacgccagggccaagaagtgggagtgggtgggtaggggagtgggggtggtatgggggacttttgggatagcattggaaaggtaaatgaagaaaatacataattaaaataaaattaaattaaaaaaattttcaagagtcttagttctgcccttctctctccaatacttctctaataatctgcttaaaaactgactaatgtaggtatataggaaagagttttcctggaacatattgcctactaattaaacttaccataccaatggtataacagagagataaacacagaccaagggagcagacaggatagggcactaccctctgctatgctaccctgctgcatgggatgggataatgtcctttactacactgctctcttgcacaactgatacgacatttcggatcagccaaagacgaagggagcattgttagatatatgtttggagaaaataaagactgccttctcccaaaggacccaaaataaaaccaaggtgaagtagaatttaaggcatagaaatatgtgttactgaaaaagatataggagaatcattcaaagtttgtcaacaaatcataggagaagagattggcatattttactgcaaacataggaaggatgatatactatgcacttaactatagagaaaattattcaattgtgtgttagcaatagtacatctagtaggcataactcagagaacacatgttacttggactattaagaaaaacgatgaaaacggtacatgtctggaggaaccctggagaattcctcattcccattgtctcttctccctattcttacccttttaagtctctgaaaacagtgtagcttctccgtggtcttcttttattgcaagagattgtttcatctctgttaccttgcttctagaaagacttcttccccaaacccttccttccttctgactgatgatgagagattgcctctaaaaaccaacttttaaacacccatggccatcaggaggagaactgcaagcccattagcttctctggcatgtgtgatccatgaccataattactgttttgtgcttttatatttttcttgccttgataatggcatatcacaaaaatcttttctaatttgatcttagctggtatttacagctggaattattttcatctagagtaagagaaagtcagagcaaggacctgcatggaccctttaaccctcttccttaactctcctaccctgaacttgaactgcctccacaaaatccccttctccattaagatgattactccagtcatcccatcttgtgtgaatgaagcaaaaagcagggacagggcagataaacaacaagaaggctaagggtggcaagctcctcactctgaaatctcactgtgttcctacaccactctgccatataggaaaaaaaatgaaaagtcaattacaaattgttttataggaggctttgctgtctgggtagaactcatactctgccacatatgctaataaacttatgtggcaatgttagaacatttatgtgaatgaattatgcctaaattatcagctcatattatcatataaataattgctcttgccttctgtcccagtggtgctataatctctaataaagcagtttatactggctttaagggaaacgatggtgccctagaaaactcacattatattgctttaataataaagaagcaaagttactcaggcagctcttattgactccccaactctctggatcagatccaggccagaccatctacatctatgagggaaaaacaactgagtgatcctggatgaagtgtatgaattaacgcagcctccacacattcagagaccctggtgagaggctagaggctgttttcagcctcctactctgttttttcctaaccctgcactctcctcctacaagaaatccagtctctacaagagaaaaagacaacaacataaaacaatggtcctaccttttgtgcaggttggccatgagatggacaattagaagttgtctagtctatgaaaaggggtggctaagacaagacttgagcttaaataaggcagattggctgtgcagaaacaaagaagaaatgacctgaggggtggaaacagagcttcacaaatgtcatgttgggtcacgtggaacagaagagccactgaaatttgagtttgttcaagtacattacgatgatgccgtgtgcaataagttctgctggagtctcaaaccacaagcactttcagagttgataattgcccagagagatgatctcctttctgttccctgagatctaagagagggaaagatgatcctgtccagagagttttaatttgcttgagagccttaatcagatggtaatgttttccccttgaggacccctctctcagtctgtcaagaggagcccagctgctaaagctgaaaacactggcggacagacactccctgttaggaacgaaagcactgtagacaagaggcccaactatgtatgtataccttgctgtgcctcagatagtttctgtttcatttgcaggaagtagaagggggctattgagatctgtgccaatgagaaagagcaagtgtaacaattaactttccttcttgtcacgagagtaagtttggatgggaggtggtgtgtgtgtgtgtgtgtgtgtgtgtgtgtgtgtgtgtgtgtgtgtatgtgcgcgcgtgaggtttttggggtgggaaggagggtgagggtgcaagtactgggaagagtatctttcagctgcagaataaacactgcccagggcttctctgcattgttactaagcgagcctcacccatctgcataagtttgcaaataggaaactcttctgattctcctgcctctaaccagaaatttcatgctgagcagtggatgccttgggagtcacaagatgctgccagtcactgagatataatggctgtgttcacctccaatgagttatctccctcatcaccttcttgaggcagattaatgtagcaccacggaaggtagtcccctggccagcgatttgtgttatctgtaggtcctcctagtcctcttagagaacttggacaagacattccacttataaaacagcgtcatttctggctggataactccttccaacctagcttttctaggcagggcaaatagttcagaactcagtttcacccaactattgtgtcaccagaacaccataacctctgttgagtatctgacgtgcagtgaaggagccatgcactctggccatctgctccccagtttctgacttctgagtgctgttaaaaacgtggctcatttatccttcaaaagaactatcctgtgagaagtacagcagacaacgctccacactgggagggtctgcacttcggagagcttcagcagctatcagaattgcagagacagaaaggaagttgaggctgtggggagaagacattctgtctccaaattccatcctctaatgtccgaccaaaagaaacccatccttggttaaacacgtagtaattcagttatattggaaacaaagagattaaatttttaactgaatcttctaaccagagaatataatctcctattgctgaattagataatgttcttggtaaatttccagccaagaagagattggaagtcagtgttattaagttcccttttcatatctgtataattaaattctggtttagacaagaaaataaaatttggccgtgattagtgtagcctaatgcaattgcttgcatttctttatgaaatgcaggtagcaagcagatcacatttcaaacagccagttattccataagcttaatggcaatttaatagtcttctaaactttccaaaagacatccaatatggggcattaactcggagttacccacttactgttcaaggaaatgtgtcctttgacttagtcacttagtatcctaacacactcatttttcataattcaaaacagagttttccctattggctataatcagctggacacatgaagaaagctgtttttttttttttttaaagaagacatatgtcactgaattctcttttgtatgtagaaactaacatatatcacctatttccttcttcagttgtactactgggaaatctcaggaaaggtagttactttctttatgatcacactcttttttatttatatttttgcaataaagataatgtgtaaccaggaccatttctgtataatcttactttataaatacaatttctgtctagttcttataagtgtgcatgtaaacagaatcatatccaagtcttcctggcttggcagaaacatgcaaagtgtgtacaggaaaatgaaagatgattctccaaggccaggttcattacccacaagcctggatcaacaatttccgtatgtatttgtagaacagatgaaagacataagggaacatttcttgtgttctcttctctgattttgcaggagcctggggtggtttgggaaaggtgacaggaaacatacaagtcacggaaagacttctgattttaaagattttttgtttttttggtttttttcttcaaaagagtcaggtcttaggattgtgacatccttaggctaaatgttggaatggatgctttgatttagattttaaacagtgtttcaaacagtgatgacagatatctacagataaaacgccccctcccccacccctagagcagttcaggctgcataggattctttctgtcaatcacatgaacagccatcctaggtactaactaagactgctccagttccagaatgggaggctggtgggcactgcatcgtctgggaaccagtgtgcttcccaaggctctagtttgtcctgaacatttatataaaaatctctcgtagctgattctctaccccctcccctaacctggttagcttttagccactaaataatagttcagactaggagtcgtggcaaagttacttctccgagacgatttctttgatgccccagatttgtgactcctcccacgtgttcagaaactgcctatccacagcttgtgacagcaggtacggatgatgcttagcatgcagttggttgacttaggatttcctaactacacaatggtgtgagagttaaacatacttaataaagcctttgtttcagacattcaatttcaatttttccagagtagctatgtgctattgccctgcctgccagacacacagacacaagactgagagcaaaccacaggcaggacagtgtgctgtatcactgtgatgcttggtagaccagttgtaatacatgcatttttaacttcaccatattctcaccttacatactgagctcatcaggacacagctgcactgcacagtgaggagcatctgtaaggtttaaactttaatgctaattttcaccctggttcatggggaggactggctgagaacagagaagactcagtatgctttacttataatgtagccacacaacccactcagctatgccttcaaccctgcatcgtgatcccttctcttcatctaatgactttcaaaatgtatttagtatttgccacccctgcatttgtcttgtttgtttttaaacttttattattgcttctcccacctagaatgaaagcatgttgatgtcacagacttttgaaaagcatgttattcatgtgccgttgcatccatttttgcatgcaaacagggggcttgaggagtcaaatggccactcttctataatcaaagctgattgaagtatggctggccacctgacgtcagggtggtgagagccccaggtcgatatctttcttgggaaaaggaataaagagtatacagacagtttgcatcacatgataactacagaagtgaaaacaactgtaaaggtgatccccaaggcagacatggaggctggtagggtgatggcaaattaaatacaaggaaggcacattcaagaagcagagagaaaataaatgcatggggcaaaaggtcaacatggttctgcattgggaggaagaaagcctatgaggagcaaaggggagtagaaccaaaggatgctagtttcctgcatggtaccctccatgtccaaacaagcttttgcctcaggctgtttctacagggtcttgcgtcttctttgatagcaatgtctgtttccttgattctgtgttcttagtggacatctgttctgaactctgacattacctaattcaactacttttattgacatatagcttagagtgcaatgtattttattttgtgcatttggaaagaatcaaacattagaacagcatttcatggtttgtagcatcttaatgtaaatcctgctctttgcttatcaaagctgcaccattgtccatcaagtggtccctgatttcctctaggtgagatttctcacttttgtccttgaccatcaatctagcctctcctttataaactttatcgtatctgaatcctaatctttatcttactttataaactttatctcctttaggaactttatcttagccattaattctagttagaattttgtctactatatgggtccctatttcatttaaaaaaattttttttagttaggtattttctttatttacacctcaaatgctatcccaaaagtcccccagaatctccacccccccactcccctaaccacccactcccacttcttgaccctggcattcccccttactgaggcatataaagtttgcaagatcaaggggcctctcttccaaatgatggccgactaggccatcttctgatacatatgcagctagagacatgagctctggggggtactgggtagttcatattgttgttccacctatagggttgcagacccctttagctccttgggtactttctctagctcctccattgggggccctgtgttccatccaatagctgactgtgagcatccacttctgtgtttgctaggccccggcaaagcctctcaagagacagctatatcagggtcctttcagcaaaatcttgctggtgtatgcaatggtgtcagcatttggaggctgactatgggatggatccccaggtatggtagtctctagatggtccatcctttcatctcagctccaaactttgtgtctgtaactccttccatgggtgttttgttcccaattctaagaaggggcaaagtgtccacactttggtcttcgttcttccggagtttcatatgttttgcaacttgtatcttgggtattctaagtttctgggctaatatccacttatcagtgagtacatatcatgtgagttcttttgtgactgggttacctcactcaggatgataacctccaggtccattcatttgcctaggaatttcataaattcattctttttaatagctgagtagtactccattgtgtaaacgtaccacattctctgtatccattcctctgttgaagggcatctgggtttttttttttccagcttctggctattataaataaggctgctatgaacatagtggagcatgtgtccttattaccagttggaacatcttctggatatatgcccaggagaggtattgcaggatcctccggtagtactatgtccaattttctgaggaacaaccagattgatttccagagtggttgtacaagcttgcaatcccaccaacaatggaggagtgttcctctttctccacatcctcgccagcatctgctgtcaccaggatttttgatcttagacattctgattggtgtgaggtggaatctcagggttgttttgatttgcatttccctgatgattaaggatgctgaacattttttcaggtgcttctcagccattccgtattcctcaggtgagaattctttgtttagctctgagccccatttttaatggggttatttgattttctggagtccacctttttgagttctttatatatattggatattagtcccctatctgatttaggattggtaaaaatcctttcccaatctgttggtggcctttttgtcttattgacagtgttttctgccttatagaagctttgcaattttatgaggtcccatttgtcgattctcaatcttacagcacaagccattgctgttctattcaggaatttttcccttgtccacatatctttgaggtttttccccactttctcctctataagtttcagtgtctctggttttatgtggagttccttgatccacttagatttgaccttagtacaaggagagaagaatggatcaattcaaattcttctgcatgctaaccgacagttctgccagcatcatttgtcgaaaatgctgtcttttttccactgggtggtttttgctcccttgtcaaagatcaaagaccataggtgtgtgggttcatttctgggtcctcaattctattccattgctctacttgtctgtggctataccagtaaccatgcagtttttatcacaattgctctgtagtacagctttaggtcaggcaaggtgattccaccagaggttcttttatcattgagaagagtttttgctatcctaggctttttgttattccagatgaatttgcaaattgccctttctaattcgttgaagaattgagttggaattttgatggggattgcactgaatctgtagattgctattggcaaaatagccatttttactatattgattctggcaatccatgagcatgggagatctttccatcttctgagatcttctttaatttctttcttcagagcttgaagttcttatcatacagatctttcacttccttagttagagtcacaccaagatattttatattatttgtgactattgagaagggtgtagtttccctaatttctttctcagcctgtttatcctttgtgtacagaaaggccagtgacttgtttgagttaattttatatccagctacttcactgaaggtgtttatcaggattaggagttttctggtggaatttttagggtcacttatatatactatcatatcatctacaaaaagtgatatttttaacttcttcctttccaatttgtatccccttgatttccttttgttgtaaaattactctggctaggactttaagtactatattgaataggtagggagaaagtgggcagccttgtctagtccctgattttagtgggattgcttccagcttctctccatttactttgatgttggctactggtttgctgtatattgcttttatcatgtttaggtatgggcctcgaattcctgatctttccaagacttttatcatgaatgggtgttgtattttgtcaaatgctttttcagcatctaacaggatgatcatgtgctttttgtctttgagtttgtttatataatggattacattgatggatttccgtgtattaaaccatccctgcatccctggaataaaatcttcttggtcaggatggatgattcttttgaggtgttcttgggtttggttagcaagaattttattgaatatctttacatccatattcacaagggaaattggtctgaagttctctatctttgttggatctttctttggtttacgtatcagagtaattgtggcttcatagaatgagttgggtagagtaccttctacttctattttgtggaatagtttgtgcggaactgcaattatatcttctttaaaggtctgatagaactctgcactaaacccatctggtcctgggctttttttggctgggagactattaatgactgcttctatttctttaggggatatgggactgtttagatcattaacttgatcctgatttaactttggtacctggtatctgtctagaaatttgtccatttcgtactggttttccagttttgttgagtatagccttttgtagaaggatctgatagtgttttggatttcttcaggatctgttattatgtctcccttttcatttctgattttgttaattaggatgctttccctgtgccctctagtgagtctggctaagggtttatctatcttgttgatattctcaaagaaccagctcctggtttggttgattctttgaatagttcttcttgtttctacttggttgatttcccccctgagtttgattatttcctgccttctactcctcttgggtgaatttgcttcctttttttctagagcttttaggtgtgttgtcaagctgctagcgtgtgctctctctagtttctttttggaggctgtactggttagttttgtgtcaacttgacacagctggagttatcacagagaaaggagcttcagttgaggaaatgcgtccatgagatccaactgtaaggcattttctcaattagtgatcaagggggaaaggcccttgtgggtgggaccatctcagggctggtagtcttggttctataagaaagcaggctgagcaagccaggtgaagcaagccagtaaagaacatccctctgtggcctctgcatcggctcctgcttcctgacctgtttgagttccagtcctgacttcctttggtgataaacagcagcatggaagtgtaagccgaataaaccctttcctccccaacttgcatcttggtcatgatgtttgtgcaggaatagaaaccctgactaagacagaggcactcagagctataagtttccctcttagaaatgctttcattgtgtcccataagtttgggtatgttgtgtcttcattttcattaaactctaaaaagtctttaatttctttctttagtccttccttgaccaaggtatcattgagaagagtgttgttcagttttcacatgaatgttggctttccattttttatgttgttattgaagatcagccttagtccatggtagtctgataggatgcatgggacaatttcaatatttttgtatctgttgaggcctgttttgtgaccaattatatggtcaattttggagaaggtacaataaagtgctgagaagaaggtatatccttttgtttcaggataaaatgttctgtacatacctgttaagtccatttctttcataacttctgttagtttcactgtgtacctgtttagtttctgtttccacaatctgtccattgatgaaagtggtgtgttgaagtctcccactattattatgtgaggtgcaatgtgtgctttgagctttactaaagtttctttaatgaatgtggctgcccttgcatttggagcatagatattcagagttgagagttcctcttggaggattttacctttgatgagtatgaagtgtccctccttgtcttttttgacaactttgggttggaagtcgattttatccgatattagaatggctactccagatcgtttcttcagaccatttgcttggaaaattgttttccagccttttactctgaagtagtgtctgtctttttccctgagatgggtttcctgtaagcagcaaaatgttgggtcctgtttgtgtagccagcctgttagtctattctttttattggggaattgagtccattgatattaagagatattaaggaaaagtaattgttgcttcctattatttttgttgttagagttggcattctgttcttgtgactgtcttctttttggtttgttgaaggattactttcttgctttttctagggggtggtttctgtccttgtattggtttttttctgttattatccattgaagggctggattcgtggaaagataatgtgtgaatttggttttgtcatggaatactttggtttctccatctatggtaattgagagtttggctgagtataggagcctgggctggcatttgtgttcttttagggtctgtataacatctgtccaggctcttctggctttcatagtctctgctgaaaagtctggtgtaattctgataggcctgcctttatatgttacttgacctatttcctttaatgtttttaatattctctctttatttagtgcatttgttgttctgattagtatgtgtcgggagtaatttcttttctggtccagtctattttgagttctgtaggcttcttgtatgttcatgggcatctctttctttaggtttgggaagttttcttccaaaattttgttgaagatatttgctggccctttaaattgaaaatcttcattctcatgtactcctattatccgtaggtttggtcttctcattgtgtcctggatttcctggatgttttgaattaggatctttttgcattttgtattttctttgattgttgtgcagatgttctctttggaatcttctgcacctgagagtctctcttctatttcttgtattctgttgcttatgcttgcatctatgattccagatttcttttctagggtttctatcttcagcattgccttactttgggttttcttcattttgtctacttccctttttaggtctttcatagttttgttcaatttcatcacctgtttggttgtgttttcctgtttttctttaaggactcgtacctgtttagcagtgttctcctgtaattctttaagtgagttattaaagtctttcttgatatcctctaccatcatcatgagatatgtttttaaatctgggtctaactttttgggtctgttgggttatccaggactggctaaggtggcagtgctgggttctgatgatggtgagtgatcttggtttctgttagtaagattcttaagtttgcctgtagccatctggtaatctctggagttagatgttacagttgtctctggttagaacttgttcctcccatggttctgttagcttctataagcagacctgggagactagctctcccctgagtttcagtggtcagagtactctctgcaggcaagttctccttttgcagggaagatacacagatatctggtgttcggacctgcctcctggcagaagatgaaggcctgaaacagggcctgtcactgaagctgtttcgcttccacctttcacagaatctgtgtagcttctgtagtccacactctcacctgtgcagactagtctctgagggaactgggatccaagttggctcccccaggtgctccggcaacgccctaccaggtggggcagacacctctcctctggcaggaaaggtgcccggatgtctgcagcccgaaatggggcctgccccagaagctgtgtggcttctgcctaacccagaagctgttaggttctgtagtccacactctcacctgcgcagactagtctctgagggatccgggaaccaagatggctccctcagatgctccggctgggcccctatttctaccaccattttccactctcatcctttccaccccattcccaacactaggtagaacagaaagaaggctagaggggaagggagtgtcaatattggtagactacttcttgctgaatagggcatcaagttccttgggacaggtccaatatttgtctttcggatatctccaaatagcatccagcatccagcatccagcatccagcatccagcatccagcatccagcagcagaagcagcagctgttgcttcactgctctcagggctcttgcatttaaataccatctcaagggtctccagaattccaaaatctatgcaaaattaactatttgcagctgacaaaatcaacccccaacccctgccaactcatgaggtaaatcatagtttgccactatgggcaatccgaagcaacaccatatcctacaccttggattaaaccaaaaccatattcccataatattccaatgtttttaaagaaaccaaagttcttactataagttcccagaatgcagtttgccccagcaccatgcctcatctatctgtttctgagtaaagcctttaaaggatcctaatgcactcaagactggatttttagtgattgtagtaattgtaggtacctctatgccattcatggctggacctgaattacaaacgtcaggagttgaaatgtagaacttttccttcttcagatatgcttatgtttgtgtttgtattttgtcaaaagcaatctgtggagaaccttataaaagttatgagaatttttaagcaacaaagacagcaaaacacaacactctgaacatatcccactttcacatggttccagatgtgctgctttgagtttgtaagccattgcttgggtctttattctttcaaataatgatgcttcacacaatgtctcagcagggctctgtagatggtgattggttttcttcctgtgtaagtggcatcctgaggactgagtagggtgagtgaggttcttcctacaggatccatatttgtctataaatagtagattttccatgtatctcattgtgctgtttttagttttaaagtaattaaattaggagatgatatgagagcctatgaaaacaaaatcttatgaacagaagttgattggttgtttttgcctcccccccccccctaaaacaggctttctccgtgtagtcctggacctcacactgtagagcaggctggcctcaaactcagaaatcttcttgcctctgctttctgaatgctgggattaaaggcatgtgccaccaccatccagcaagcacagagaatcttaatgtgtacactccttaaaaatcaaaggatccttaaagaatgccaacagcgagaatccataaaatacagaatcactggagagtcactctccagagtgctctaactacacacatgcctgctggagatcatcttgccatccccaggctttctcccacctcatctgtttctactctaagttattatgtgaatgaaaagactttatagtttgtatttaatttttaccaccctgggtgttatacaaagatcatttctccaagaaaacaatcaattctcaggtataactgtttataacttgtatactatggagtaaagggaggctgctcagtgtaaagaatgtgtatggggtgctcacatatacatgtttgcatgagtatatttcttaatttactatggagaaaggatcatttcttgtgcaaataatatcatttattaactggatcaactagtcacaaaattatttctgtgaaacaaaaagtaaactttcagagtttatataactcacaaatatgttttcaactttcattaaatacttgaaagttgtctgcgaggatgcttcatcagagttagatgtgaacctcgattgctgggttcttgggagacacaataggatatcctcattgtggggaacatgctgtcaggaaaagaggctcacaaagatttttgtttaggttttttttgtttgtttgcttgtttttgttttgttttttgtttgtttgttttgtttttgtttttgtcttagaatcccagtatgtgaaactggactaagattccacagacctctagccagtaggcggctctctatttttcaaaaaaagcaatggcgctgtccagcgtcctgaattgaaatttgtgtggttgaagcgataaccttggaaggtatttatggggtgagacccgaagccgtcttccttctggtcaaatgaactggaatgggggaggtgtgctgatgcagaggttggagcttcattgaccatatgaatgagttgcaagctgattgaagtcttccatggtgactcaccaaggaagcccattacttagttcttacccattttggaaagatgtgcaaactgttggatcagcttctctggctctagctaggcatttccctgaagggcatacatacagtttctataaccaccattaaacaacaaactcaaaatatgactttggtcactttatctcacaaactaaaatttgggtactcagtaataaagtgctggatgccaccacattctagatgatgctgagctatagcccaattggctgaggagggaaattacaagtggagtgtgtagaaatgggacaacggaagaacaaaaagtctgtaaaataaattagagattccatctaaagggcatgttacattccagaattttgaaataacatggttagtttgtggaggaaatgaagcagctgtgcaagtggaacacaatgtttgaatcagaagagaggtaaacaggctctcctgggaaaatccaattggcaaagtgatgagaatataacaattggtgtcattgcttagttaggtggttgcattctatgcagcaatgcaggtagatgttattatagcttatgagtgagacttggaggaagagtttctgcctcatgtacacacagacctgtgtgtgagtcccatatagcacacttgaaggtgaaacacaaacacacattcttggtcaaagctctttttcttcttaccagacctcactgaatctgcctcttcatcttcttctttgtccttttcccttctgtcctcctcccgtcctccttcctctccttctccatccttccctcctcttcccctttctgaagtagagccccttgtgtttcccatcatcattttcgtgcattgtgctgttgaagctgccacctgtccttagttcccctcttcctcttcactctagatgcaagcatccagctttcctttccccctctgtgagagcaggagacaactgtgtggtaacactggaagagaagtctttgtcacgctgagttattaacaaaggaaacttactgtaacaagtgtgaaatggcagtgttgctgccacggtcactgcagggagagccttgaaatgaactgctattgttgtactgctatttctcataatacatcctttacacttatcttgcctgaaatatattcatgttttgttcactcacaatgctccttttcagacaaagtaaaacacattctaagggtttttttttcccctgcaggactccacaagtgataagaagtatgtatttaaacactgtcttcctttggattttattttttcattatttttttctctctctagtgtaattgcaaagccacactaacaagaaaatcttgaaaggtagcttagagatggaatttcagacaaatgggtgaaaggctgaattgacgtgccaggaacactgaacgttttggagtcggtgacacagagtgcttattctcggtggaaaggaatgtcatctacagggcaaattgtcacagcacagaacgtgagatgctaactaaccgcatggacccttcacatctattgctccgtgcagcacaggaggatgagggttccttgttggggacactagctcttttttaaggcaatatcaggaatttaaaatgttttctcttcagccctttgtagtgtggaagaagagtgtaatgcaaagacatggactgaggggcactggctgaaactattactggaatcagcccttcttaggatagctgaacttcagggcagtgttgtcatcttcaaactcgaaggctaaagacaactcagtctatcttatgaatatacatgaaacatttacatgatctctcccaacaatttacaaaggtatctttctgtaagttcttgttttaaatgagtgagtatgtattgtgttcaatgcactacactgtgagaaagtgctctcttgttcatcaggtgcttaaacctccaagtcctaggatttctgagcaaacaagacaacatgacctaagcatagcgagggactaagagagtatttaacagaaactccagtaggggactggaggtgacatctttgctttgtcccttctatgtgtctttaaaaattgcccctttctcacccatcttgagtccatcacaggacacttctgagatgtcacacatcacacatacagtcacacgaattgatcacatgaatagaataaaggtagaaaatcagaatgtgctattctgatgacatgattgatcaccatgatcacttgggaccaatcagattttattatggtcacttgaaactgctgtcagtgtaaacattccaatgtttgaagaggtcaatttctctgcctatttggtgacaaagtcactacaaaactgaagcttatgatggctacccagcaagtatcctgccataggaagacaatcttgggaaaatgtaggtatttccagagcaaaaaggcacaaagtgaaaaaaaaaaaaaaaaccaaaaccaaaccaaaccaaaccaaaacaaaacccaaaccatttggactagctggacttagctctgctgagactaggtaacttgatgtcagccagtctatttcccatttgctgggatatacttgaattacatttctgtcatttatctttagaaaggttctgaataatacagaaactgaatgacctccgatcactgtccttctcttcctcctcctctccatccctcttctcctttctacttctctcccttcttcctcacctctcctgcttaatattaaaaattctctgaaccttacacgatggtacatgccaacaataccaatactcagggattatagatgggaggactggaagcccaagacctaaatgggatatagggtgaaaacctagctcagaaaaacaagaagaggaggatgtagctcagtcatagaacacttgcctagcatgtccaatgctttggttcaagcccaatatatcttaaaacaaaggcaaaagcaaaccagaaacacctttatatatttagttctgtcaagtgtgcactaatagctccaaagctatccctagagacattggatattacaatcctctctcctgtgcacttcaccatcccctttctccattattaaatgctatggttataaaatggattgaagttctgtggacaatagccttgatgtccttagaagggcttataatctatcagagacactccttttctggcagggtgggtggtcacagcaccactgtgattggttagtgctcactgtcaacttgacaagatctagaatcacctagaagacaaacctccaggtacacttgtaaaggattatttagtgtgagggactatgctcattaggttagtctaggtgggaagatacaccctgaatgtggatggcattatgctgtgggcttggatcctggactgcataaggagaggaagtacctgagattcagtatccagtactctctacttccagattgtgggaacagtgtgagagctctgcatcctagatttccctgccacattaggctgtactctgaactgtgagttagaacaaatcctctctcccttgagatacttttgtcaagtcatttaatcacatctacaggaaagaagctaagacaaccgatgtttatgaatgtatactttggaggcagataatttgtatgtaaggtcaagtacttaatcaggaaagcataataaaaaacgagcggcttaaacacatttctgtggggaccagagaaagccctcagagaaccaagtcctgaataaatgtacattttgaccagaacacagtcatatcaggaacctctaggcctgtaacccatgggacaaattggcaaagctgtaacccatatggttcaggctgaaggggcatccaagtatgagtgtttatggatgatctatcaatatgtgcaaagattagcaaccatggctttctcttccaggatgtttactgcctgaggttgatccctgcagagacctcctatagagaccagccctgtgtgccttgtctaacaaacacagggaggcttccagctgctgctgtagtgtttgagaaccctgcctgatctgagcttcactttatgtgcacctatatgtctgtcctttcttcatttgctcactgcctgtacccaggttccagaacccaatctttgtgttatagggcccctttctatggtactcctctaacagtggcatagtgactggccatgtttcaactattgttccacagcttgtgaagtctcaggcatgatcctaatggaacaaagacaagatgctatttattctttctgcttctgattgcccatcttctcatccatgtgtgctagaacatatgcaatattttagaccaagccttcctactcacagaagcatcttgtggaagtgatgttgattttttttgaaaatagaaaacctctttgactttatgttgcttaaaagagattgtttaatatatgtatttccacagtttcttaagcatagtatggtaataataataatgataccaataaagcagctacatggtagatcccataaggtagaccttgctttagtcattgacactgaacagttccattcagacctactcatggaagaagacatacagtccccatttaggagaatgacaaactgagcctctgcagtgctgggtgagtcacatagccagaatcacaaacacactgagctagcgctggtatttgggtctatcaaccactacatagtcatgactctttcaacagtgtcctcatcaagactatgaactgtgtactttgcaaagaccaaccccagcccccttccacccttgtccccactctcctcccccactcccttccacccctgcccccacttcccttccccactcccttctaccactgtcctcattcccctcccccagctcccctccctctggctgccaccaatcttttatgtttctcctcagatctacccctgtcatttatattttgcttgttcctcttattattagaatgctaacagtagctctgcccttctaagttgattttaccacgaaaaaatatagcccgtgttcctgtgttaaaactgagtaagtgtccctggtgagtgacactgacttccatggagacagtgcaggtggcaaagaaactgccacagtgatctctgatggagagcctttgaagaggcactacactgctctgggaagactttcctattggctacccagaacatcttttttgttttcttcagggccccaagtacatttcaaatattagtgataagcaatactgtgtgttgtggtttaaatatgaaacacccccacagacacatgctttgagtacttggtctcagttgatggttccagtctggaggatatagacattttaagaggtgggacctgtctggcagaagaagtagatactagaggcagaactgaaagattgtccctcaccctggcctggcctgcttcctctacttcctggtttgttgtaatgtgaacaactcttgtttcatgttttctatccatgaacctcactcagccttacctgccatgatggactattatttataaaaccaaactaagctaaaacttataattatagaaccaaactaagctaaaacaaatcctctctcaaggttgtcattgttgttgtgtttttaatgtatatgagtgttttacctacatgcatgtctgtgcagaacccatggaggacagaagagggtgtcagattccccttaaatgggaggtacagatagtatggcctgtcatgtgggtgctgggaatcaaaccctggtcctatggaagagcaaagcaactagtgctcttaaccactgagccttgctccagtccctgttatcatttttgttttaattaaatgggtacataaatgaatgttttgagtcagtctcctgtaccccaggctggcctcaaacttactatgtagctatgatggctgctcttggttgtcaatatgactgcatctggaattaacttaaaaacccaagcatctgagctcatttgtaagggaatttttttttttagatctacttgaagccagaagacccaccataaattcagattgtttgaggttggagactccccctagatctggaccacacattcttatgcccccacagaaaggacatagaagatggaatctcttgctctttgcctgttcactcttactctccctggcaagtccatcccttcactagtattagagcatgatgctttgggatttcagtgtataatgaggaatagctgagacattcagtctcatgggctgaacaactattggattcttgaactttctataggagacagcccttcttggacttgttgaaccacagcctgtaaaccactctaataggacacacacacacacacacacacacacacactaataaataaccacatataagatagatatatattaatattacttacataacatatgtatataataaatcatatatatgaatgcatctatatgtatataataaataatagtatatgttatatacattcctatacacacacatatatgcatatgcatgtatacacacctatatacataatatatatatatacacacacattacacatacatgtatgatcctatcagttctgcttctcttgtctgtacctcccaagtcttccaattacaggactgtaccacatgtctgctttatgcagggctggagactgaatccaggacttcatgctagacaaacactcaaccatctgagcacacccacaattagtatttttggtcacacactgcaagagctgtcagtacaccatcttgagggggctgcttaggcacgtatatctctataccaatgtacattcacccaggggcaaggtcagaaactgcttatgttgaccttctgctcctgttcaaatattgagagaaaaaaatgagaatgaaaaagcccggattctctgtttcccaaggatgcctgtgatggagtcccagcgtgcaggttggtaactaatcgaaccacttccataagggtcagaagggccgacgccatcttattaatccctgtgattacatgttattatgcacccgcagcacctgaagctataacagggagtttatctctgagcaagagcttctcattcttgccacacacaccaatgcattctgctgtaatggctcccctggagccattagcgggctaatctgagaaatgtgactacacatgtgtaaagtttgcattgtgaacatattcttagtgctgtttttgttaaaatatcttcataagagtaaaattcacatgaagcttttgacatttacctaaatggaaaatattaggacatacctctatgtttgggaaaaaacccaaaacaaaacaacaacaacaacaataataaaaactgtgactgcattgtaattcagtggcaagtggagttctgggaagcccgggcacacatgtaaatgcaacaaatacctctggctttgtgttcaaaacagaaaaaataagtcagaggcattttttggaaggagacagaatgtatctggtttatttagggaaagactgatgtgttttggattgaatttggagaatatttctcagtgacttgcctgcaacagtccatacaaggtttctttgaggtaatacggctcagtgaataaaagtactggctgtttctccagaggacctgggatcagtcttcaacactcacatggtgactcataaccatctttaattgttccagaggaaacaacaacctattctggcctccacaggcatgaggcaaacatgtaatgcagagaggcatgcagccaagacattcatacacataaaataaaagtcacttaaaataaaatggtcaagtagtaatgcacttatgtgcatgtgaacttgtgtgtgtatgtgtgtgcatgtgcgtgcatgcacatgtgggcccttgtatggtgaggccagatgttgcctgcttagattcaaagagcactaagatctgcagatgtggattagtttcatgtttagacctatagctctatctaacaaagagttaattctcttaattgtgtgtttgaagaattatttcatcttgccttttaggagacagacaaaccaaacattgttttataaccttgagaaggttacagacaattattaagggtcttggtaaatttgccttgagtgcagttatttgagagacttcagacattattatttggatactctcaggaaatatatgtaaaagaatggaagatgttgtaagattttaactgtctttggatggtttaatttattcttccctcccctcaaccagcacgaatcttctctgcttcaaagagataattctttatcacttagtttaattttttttcattttctgtattctcagggctttggctgtatttttgcattttgttataattatgttctattctgccctgattacttggtttcaggattcaagacctcattaataattataatgaaatgctactaattatcgaagtatctccaaagccctatcctgccttcgagagactcacagtggggccatgatttatgagtgttctggttctcattgtaaagttcgacaagacactttggaaatatgggctcgatgttggaggatttggaagtgggagtgtcaatgacaactgtgtgaacatgactgtgtctgcctgggtcactaaacaggacacttgtccagagaacaccactgtctttgtgtctgcagacctatgtttatgctgcacttggctatgcgctgccccggtggcttccagccatgctgctgttgattttcctcagaaagcgttcttttcttctggggtgatttttctgtgcctaacttcccacccttgacagagttggctccttggatgggtggggggcactcccaaactgtaaactcagaagtaggttgcacagcagaaactggtatcacctggaataaccagtggtatttatgtgagccttcctgtttttgtgttttaatggagtagaatatgtttatttgaaatagtttaataaaaagggcagagtgggcagtggaacaaggtttcttctaccacagcctttacctcctacttttgacatgttaatgacattaagtacctgccacacagtgttctaggcttttccatagactttaatagtctataatataattatatgcattttgttcattaaaagctatactcatgactttgtatctcatttgttcatacttataaagtataacagggtaaacttgagattaaaatctcatgaaacccatccctttgtacacaaaacagacactaatagaaatttaagaaaaagaaaaaatattccccaggcactcagctaaatttaattcactcccttcaccgtttttatttccttcagagtattttagaatggggatacattcttagttattttgttttttaaaaaaatgcttaggttggctctcaaaccttaatattgctgtaatgctgcctcaaaagcacagagaacacagtcttcctgcatattagagaaagtgtttctgaggagtcgccaccagaacgtgaattgcgaaggcaatcagtctttgaaagttctgatagattcttccaggcgatttctcaacatagttatcaatgtataatctgtccacacagggcatctgagaaagtgcattaagcacaactctaattctcttgtgtaagaaaatggggatacttcatttccatgatgaggattagctgaggttacacttgtaaaggcatgtaaattatctaacagccctctgcactgaactgtttgcactgattaatctttattctcaccccttctccttcccaactgctctgctctacacagtgcaacaggacacagtggcgagcagctttcctcatctctgctccaccggctgggttctatctgttgtccccaggactctgacaccctgatccacttcagtgccacatttcctgtctgtttcggacactggtgccttacattggtcattgttctttggggacagatgcttctacccaaatctgaatcttcatgttttagaaccactttgtcttctgttataaatcttttgtttcttgaagtttcatacatagatatctagtttgaatgatttgaaattgaagtatctatctctgagtggtttaaggaaggatgataatgtaataatagaggtattgcaattttaatatatattattacctcattgtaaagagctagtcttttttttttaaatctaaatgtgtgtgtatttgtgtgtatgtttccctccctcactctgtctctgccccctttcccccgtgtgtgtccagatgtgtgaatgcagatgtcaaaggaggacaaggagttgattgggtccatcactctttgcctccatccctcataacaggaactctcactcactgagcctggggctaggctggtggtgtctcctgcccctacagcactggctacagtgctggggttgaaggtacatatgtgactatgtacagcttttcatatagcttttgggattgtacctctggtcttcattatttgtgtagcaaggggccttaacaccatgcaatgacaccaaccttcgagtcccaaatactgttgtttttcattattctgcctatgatatcacaggactctgacttccaaggacatcgtccttccctttagacttttgtatagcttcttcatactttattctcattacaacttaactcccaatattgtttgattgttctgctaaggctgggatgagtcttttgagaaaggagatgatattcgagaccaaccaggacaggaaaggtgactttacttttcagtatttgatgcacatggaactggacccaagctttgcagctaggtcagagaagcttctaggcctggacttgataaactccacggctggatgacttcttcatctttcataacactgttacctacctatgtcataaatgcctcctccccatcccaacactgtgacaactcctttaaactccagatatctctgaacaggaagcacatttagttctctctctctctctctctctctctctctctctctctctctctctctctctctccctccctctctctccctctctctctctctctctcatttctagcccttaaaagacaacaccttagtaacatttttcatgtaacagtcttcaaacacctttaatgcaaccaccacattctctgaatatactttgtacttccttcaagttgttagattcccagttgacagtcctcaggactgtgatgtactttgtgtcttatctactccccctgccaaatgtcctttgattctttaatgtctctttcaaggattctggccattgttttgcttggcatgtaccttttataatttgttgtctttctgagtataaaaaggtagaagttgaaagtcattctacagggcctgccctccccagggccctccttactactcagttacagcctttctgtttgatctttaaatatatctgagttagagatgtgtccagtgtcacatgtataattgaccttacatatattcacccctagtttcacatggccaaagcccagccaaggcctccttcaagctatgatactatccaatcaattttgcaagcttagactggttgatcatatcccttcttcttgccacacattttctagagaagtctctgagactagatttatcatagttatcttcagaataaaagtcctcttgcactcaagcaccataaacatcatatggtttacggagagtttagaatcagaagtaaacgaaaggactactggaacataacccattccccaagctcttttttcttaggtagggctcttagtatcttttctccattcataactttccactgttgggtcttagctttatgatctactgagccccttcccaggatgctctctctaggaattctaccatctctctcctttaaatacacgagacaatttaatactggcttagctgtacaaatagggtaaccacacttgtggacactcagctaacaacagattctcttctcagaagctatctgctgtagaaggcagcaagtggttgcaatcagcaaaacataattcttcctatcatgaagatcacttgttttagagataggcaactatttttttttatagacaaagggatctagattcagagagaacataccagttaagacagcagctgattactagagagacagatatggagcccagtgctggggctgacttgttaactgagatattagtggtactatatgcatacacaatttgtttctcattataattatagaaagtctgcacagtaaaatgttgcctttgatcttacctaaattaaagtgaaggattgaattccaagaaagtttcatcaacatgtgagtgtgataggaaaattctagaaagtggctaagtttctttgactcactctatggatactgccatgctcttaatcatgtcttggctggtttggtatgctgaaaagatagtggttttgctgaatgtgtgtgtgtgtgtgtgtgtgtgtgtgtgtgtgtgtgtgtgtatttctttgcatatgtgtgagtgtgtgtgtaggtgtgtgtgcctgtgcatataaatataggtgaatgtatgtatgtacaggtgcatatgcacatgcacacatgtatatgtagagggtagaggacaatagcaggtgtaaaagtaacttttattattccagtgtaattgttgtctcctgggtttacttccatgtctgttaacctaggctagtcctggaagcttctagcctccttacaaatgaatctaggcctgcaatattttcagcttctgagacttactactgaataaactcaccctttccagttctgagctctgactggctggtgaacttggctgttctggctcaaaactctactccacgctgtgtttcaatctggcttctctcaacttgtcctgattaacctgcttggcctcaaactaactttatcactctctctctttttttaaaaaatattttttattattatgtattttcctcaattacatttagaatgctatcccaaaagtcccccataccccccccccccactactcccctacccacccattcccattttttggccctggcattcccctgtactagggcatataaagtttgcatgtccaatgggcctctctttccagtgatggccaactaggccatcttttgatacatatgcagctagattcaagagctccggggtactggttagttcataatgttgttgcacctacagggttgcagatctctttagctccttggatactttctctaactcctccattgggggccctgtgctccatccaatagctgactgtgagcatccacttatgtgtttgctaggccccggcctagtctcacaagagacagctatatcagggtcctttcagccaatgcttgctagtggtgtcatcatttggaggctaattatgggatggatccctggatatggcagtctctagatggtccatccttttgtctcagcgccaaactttgtctctgtaactccttccatgggtgattgtttccaattctaagaaggggcaaagtgtccacactttggtcttcgttcttctttatcactcttctaatcttctggctcctccttctctagctcattctgtcctcacctgtgtctggcttgttctctcttcaacctgtctctgtaaatctctcccagtaaaactgcctccttctctatccactgtccttcaagtagcttcccttttctctttgttctcctgagagttgggcatatcctactctgtcaaatctttctctgatctgtcactttgtctgccactcaattagacattattttcaaacatgggtgcttctttccacaaactaactttaccttcattgtttgggatgaaaggtgcataatataagggtgtgtctgtattctaggcagaggtattaaaggtgtgtaataaggatggtgccacattacaactaggaacaggttatttttttttcttcttcagtaaataacacaatctgggttcacagtgtgatcaaatatcctgcaacaacagatattgttcctccatcaccacttgcagtttttggaaacagcctcccacttgtctcatgcctgttccacttaggcgggactggctggtcagtgaacctcagccaccctccgctcacttccccagcattgcgattataagcatggactttctatgtggtgctctctatgtagttaccgtgattcacactcaggctttgtgcctgcagtgcttgtggtttagccaatgagccatctcccctgtccacttatacttctgctaacgcccctggcacccttcctcttgccttgcacatactgtcatggatataacttgcagcagagctcaaaagctactggtttctccccctgatgggctttgtcatgaagaatacttagctctcaagaaaaggatccttttttgaggtgggggatgtgaagccagggattggagagaaagctcggagactaagaacactgatggttcttccagaggacctgagtttgacttccagaatccacatggcagctcacaactgtctgtcattccagtttctgggaatgtaacacccttttctggattctgtagatggctattgctttcacatggtacacaaacatacatgtaggcaaaacactcatatatgtaaaaataaagaaaataaagtgagaatttttagttccatgaacatagaaatctacttcagtactattacacactgggttttagaactgggccaattgaaaacatcatctgatcttatgccacccccttcatttccagatgtaaggacatttaaggtcaaagggatcagcattttgctaggaatcatagagatgtttagaatagagcctgtgcttcctaacaaacatagccaacagctccacacagctctcacacaacagcaaataaacacgaagacccattactctgcattgttttactttgattgatagagaagggatcatgcgccacttacaataatctctttagattctataataatccttgcattatcctgttaaacggttgctctagctctgtgcttaatagattgaaatctattattcataatgccatcttgctcctgttcaaataacattatctttatgactaaattttatggattcatacttaatttcatagcagagagagatgacaaattattagaacaaagggtctgcatttgtggatgcaatttgacaggtatattttcaaacattgctcagcaacacacatgaccttgcattttaggagatgcaaaggctatgaattatgggcttgtgagtatccaggaccatctggggccagaggcaaagctgtccctaatgaggggatagtatcatgggtacaagagctcattctaagattagacagtgctgggtttgagtcttggttgtgttttttgccagctgttctcttttgggcaggtgattgtggtcagttttcagtatccatatctgaagatagaatagcacttacttcaaattattttaaagactttttagaagataagacagaaatcatctcatacatttctgatccataactgatacaacactgttagctagtgttcacattaatttattatttaatgctagtgaagcctgcatctgcaaacacactggtttacagaggcaatacctaaatacacccccaggaagaaacatctgagctttgcatgagaagtgcatagtttttattaattgactggctactaactaatcaacaaagtttgatttggagcctgtttgcccacaaaaccatctttggcttggataagaaagtctatgagttaagttgtagatggtagtcacttcaccacgggtgctaacttcaagttaagtctgagctgtttgctttgtgagaggtgttctccagataacagcctcttgcctttggttgtcagtgtttcctggtcacccagggaggttccgagctccaggcttcctgattgcctgtcaattgctttgcttcccacctgccttgttgccaatacaatgctgtagctttaaggttagccatttagaggaaggatttcaaataaatagtacaaagttgaaaaatgtgaagtatttttggttgatctgaaattacagaatgaaataatctcactaatactttcccaagtttctcactcactgtctatttcttttctgtttttccttttacatctctctctctctctctctctctctctctctctctctctctctctccctcctgcccccccccagtggatgaaatagctgacataaatatgtctgcataatctggctaatttgaaataaaatggtccttaagcaggcaattaattatagttttttttaaacaattatagtttttataaactgagtgatgtatcccagggcagcctagagtattagaaacccatgagctgctgtcagtttcaatttgtatgtgtttccttatcacaaaagtacaaaggtttaattttgagaggaagaaaaaaactgtggaaaattaaagatattttcaaatgtttgtgaggccattcccatgtgtgtcaaattagaatgacaactagaacaacatttgaaaaattgatgggaaggacagtattgagtgtttttgaggccattactatgtgtgtgaaatcagagtagagaccagcatagctttgaataattaatacctgtgatgtcaaaacctctattgacaaaaactcccattaaaatgttttattcatagtttcaacatgatatttttattgattctttgggaatttcacattatacatgccaatcacactctttttttctctgtccctccgaccaacccttgtgaccctaccccccccgccgccccctgcccccaaacaaaacaacaacaacaacaaaatcataagtccaatttgtgttatatacaaactcactggatcatggtcaaatttttcagtgacctgtcctttaaatagaactgggtccttttcttcccacaccatttccagaagccatctgcagtagagagctacacttcagcattcttatcacactttttaagggttctcttcaatggcttcctgtttagaatgttacttttaagggatgggaggttaggggttgtcatagaagctttccatgtccctctttctcaactgtgagtctgcagccatcgatctcactgccaaagtagcttccttgcactttacagccagtggtagtggtagtctggagacagcccagaccacgaacatggccccagctgtcataggatcatgaacctcacaatggccttaagtgacaaagcaggccacccacagtaacatggtccctgatgggagcacagcccatggacattcatgtggctctgggcctcagcatagaccatggtctttggtagtaatatgagccatagacatcaaccaggttcctgaccacatcaggaccactgatctacacattgcccccagtggccacatggaccacagtgggccctcaaggaagtccaatccaggaagtgaacggaggctgagcagcatgttcagggtatgagtcagcctctatgcaagttccaggctgcagcataccaccccactgaccccactgggcaatggcatattctgctgttggcttctgcattgtctacatgcacacacacacacacacacacacacacacacacacacacacacaccactcctctgttccatttttccatcctcacacattcgttggcctgggcagttctgcctgttcctttgatctcatgagtgtgggttcctgtcaactcatgtaacctccagccccccttctcccttgaggataagacgttttctttcttgactcatctagatgtttctgtctctttttcaattctgagtacatgtctagacagaattacttttagaaaagttatcaaacagaagactacactaacagtaaaataattgagaatttcaaaggctgagaaaaatcccaagactcccgtgttttgatatggaataggagacctgtaaatgaatactacactatttttaaaataggaaaaaacccacatgaaaattatcaaaactgcctaaatctaactcagagaagaaaaaaattacttattttttctcctttatgagaaaagtattccctcacttctgaccttgcaggagatgtccagagacaaaacactgtgttcactatagtctccatcttttagaccatttccaaaatgcccagaccagtactgttctcttagcctttgtgtccatagcaacaagagccttataaactcaagggccaagtgcaaaatacaagggagattccagttgcccctcttactctgtgtactctcccctgctgtgagctttcttcctttatccttctctcccatagtagtccacgttattgtgcacacaaaagaaagacgcccaggcacattggtccaaaagtacagtgatattgcccttgccttgcctggagctataggccagggagcagggctttcaacctttggaattaaatagcaactggttggatgcagccaaaaaaagtagtgatggcccattgaaacaaagccagcacaacaatatttacgtactcccattccaagatgaaggatttgaaactgaaacttatttgtaattctttttataatgttctaagaccatggcctattgtgtcttttttttttttttttttttcagctttggtaaaatgagactaaattgatgatggcaaaactaactaaatgatggcaaaaattgagactaaaatcagaaatgaaaaaggccaaagagatggttggcccattcatctctcagagccagagtagctgctaggaggagctcacttactgcttcttaatttcctaaaatcatctttggatgttctagcaggctgtaccttgctgcttgtttaggcttgaaggattttcctttctctgtgtgtctggatttctaacaatgtaccaagtatatagcaactgaattattacactctatatctatatattccatgagcaatttaaaactgccttggtttaacatgggaaagtgcactagttataaggaactcttaagagatacaggaattcagtctgatccatgtaataatagcaatgaagaagaaattgaactttcccccatttctcttgcaaagcactaaaaaacaatttatggattttcttattaatcctcacagaacaaatacaggcatttggctaaccgagaagctcaaccaccgagtggggaggggagccccaggcgtggatgtgattcacatgtttcactatccagatttcctggtgcttgctgccttgatggtggccaagtctcaggccctctttgcatgtcagttcatctatcacatgtgtgggaggaggtgggggacagtctcagagattctggtcttcatggaccagttttgaatcatttacagacagcagaatctatagctcagatctctctctctcttgtgacagcctgctgtagcatccttcctggttattcataactgtttatttatttggaatttctctgattataaattttcttgctttctcctaagaggaataaagggatagtattgcttttttgtgtctctccaggaaatgccagccaaagctgttgagaggagaaatgcccctgctcgaatgcctttaaaaagtctgtgttggagactaaatctagggcatcccaggtactaggaaaaaatcccatccttcactcagatgctcagaggggctggagacagcttacatctcggtcatgacccaccttgctccctcttgcctcctatctaacctctgcctgtcttcttactctgagaacaccactgggagttcactcagccttcttccttcaaaatgcgtctgctcttattttgctctgttcttatttctctagacaatacttccttgctctcttctcagaggaaggcgccttcatgtccaacagctgacatctatcctgtcttggtctggtgcccacctgtactaaggaatggctataatagccattcacacattaaaaacaccaaaaaccaaaacaaaacaaacctagtagataaaacggtgggcccgtctgtgcagaaaactgtaatcagaattacagaatcagagggtcagagatcaatttatctgggtgtctgaagttgagtcttaagttaaaaggggaaagagttgaattccaatgtgctggggttctggctcattcattaacttttgctgattcttcagctttgtccacttcattgcctgttctgtccgaggatcctgtgaatgtaccagcccctctttatccaaatggttccttcctttatctctcaagctatgccatgtgcatcttttccatcctccttcttgcctccatgatgctgctcccgttaagtactgaaatggctttggttgttgttaccgtgtaggaaagacaaatctgaagatctttgtcccctgggaagactttttagggaccgacagtttgtttcccagtcacctccatgaagttctctctcctcttgacaaccaggcttctatgttcacttgaatttatggtttgagtctcaaatgtcctccaaagacttatgggttaaagccttaggtgacaactgatgggctttggggaagtgtctgggccccagggtttttaacctcatcagttagattaacccatggatagattcgtaatttgatgaaattacaaggaggtggtggggatcaggaggggtataatgggagaggtagccattggcagtgtgctttggatgtgtatacactgacttccctgactctgtttcctgcaagctgcaaggtgagcagctttcctcaaatacccttttataactgtgctggtccaacctcaagtgaccatggtttgaaattgtgaaccaagaattgcctcgtttccctccttaaattgtttatctcagatattttggcgaagccacaaaagcaactcacacacttggttttcttttctggtcaccaacactccatccctatggtgtgtgtgtttgtgtgtgtgtgtgtgtgtgtgtgtgtgtgtgtgtgagtgtgtgtgtgtgtgtgctatgtacatgcacagctttgtgaatggggatgcacctgagtgaagtatattgacatggctcacatatagagattagaagacaactttgaagtgtcaatcttcatatctcccaccttttgttttgagacagtctctaagtgatctaacatttcagcatataagccagagcagctggactcaagcttctagaaaaactcccatatctgtctcctgtctctcagtgttgggcttacaggtacccactgggttttgataatgggttctgggatgtgagttcaagtcttctcaattgggaagcaagcgcgagaatgactggtccatctctgaattccaagactccttctacaccaggctctcccatgactgactggttcatctctgcgctccatgactccttctaaagcaagatctcctgcagcttagctgctcctccttgtccagtcccagttgctctctcattctgggtttgttctgttccccaaagtcacaacctacaactgtgaaatctcatatcaggatgttggcccccatatttgcagctgttttttaagtcaggctcaccatggaggatccgcatttgaatgtccacctcgctattcctcttcccagcccagtgtcttagaaagatcttctcagtgatcctaggctgaactctggccaatgatttcctccctgtttgccaggctgccaatcctttgttatcttttgcctttctttctctcattcactcaccacacctgatagatccctgttttgattactttcccttttaaaagtttgcttttgtaacagtggctacttgtgatttgttgcccattgttcctgcacttatgtttcatgtgttacttgattaaaactttccaacaaagctgaaaggtccgtattgtgagaagccattcaaaagatgtaggaactactggtatgtgaaagtctgtgtgaccattttaaattcatcctgtgctacatgagaccttatttcagatagataatacacatatatgtatatacacacatatattcacacacatgtatatgtatatatatattatataacatatattatatattaatcacttcttgtaaaaccatctagaccaagaccagttcacagcttttattttactttccaccatgatgcccaatgccgtcataggtagggcagcaaagacaaagtgtttcttccttcacagtttatgtgcctatcataaatcttaagtgagtttaactggagaacaatttagaagttcaagtttcaggtgaagggtcaggttgaattccactgtaatgttttactgacactgatttatatggattagtgcagtatcatcttaggaacagcatgacaagtggagacaacacttatccaccaggataacactgaatgggggtcctcttcccgtttcttaccaaagctccaccagtgtgaagcccttgggtcctgttattcctttgaaacatgactgacatctgatacccacccagttggctgaggccacactctaaccagcatcctgaggacagaactgaggccacactctaaccagcatcctgaggacagaactgaggccacactctaaccagcatcctgaggacagaactgaggccacactctaaccagcatcctgaggacagaactgaggcaacactctaaccagcatcctgaggacagaactgaggccacactctaaccagcatcctgaggacagaactgaggccacactctaaccagcatcctgaggacagagctaaggcaacactctaaccaacatcctgaggacaaaagtggccaggatggtaactcacagaccctgtagactactgagctgcaaagtgtagagcttgttagcccttgcttttgaatatgaattataatcatttcacgataaaaagtgtttgattttctgcaaataaaagcaaaagggagatatggataattatgatatttgcttgaattaaacagctatgaaaatatcttttaggtataggaagaactgtgttctgaattctacttggtctggggagacttgacagaaacagtccttgcatttggagtcagaatgatttgggaaaacaagagaaaaagaatagactatgtctggtcacatattcaatgctatggtacatattgagcaaagaaagttaagacatgcttagtattttattcccaaatgggatttcagcctgaattatcttagaaattggtggcaggggattctgtctctctttctccatctttcacaggttagtctttcctatcttatgctttaccccaaaataccatatatatatatatgtatatatatcctgatatattaaggaaaaaatgaactccattaccaacatatcacgtattcgagtgtgtgtgtgtatgtgtgtgtgtggtgaggcatcaggggtttccttagcaggtgggggagggggtcgatgaaagatagattttaatgcacagattttagagcagattgtcaatgtcagctgcttcttgttgtgtcctggagctcccagcctggtcctttcgggatatcatctgggtgtggacttgctgagacacagcaagaaagtgctgaattactggcaagtatcccttgcagtgctttaaggtcttgaaccataacagtattataaataagctgtggatctgggacaaaataatcactttttctgagtctcagttttctcaagtgtaagaaatggggattttagggttcatctgaacttaagttagcagagcattcacaatccatagggatggcttgtatcatgcaaggtgccagttggcctacacagtatggtattgatgtgtgtaatatgatgtgtatttggaagcaattattagcaagtggttatataaaaatgaacttttctgcatggagtttgctccttggtttgccctggaaatggcctagctctatgactcaggttccaaaggcagaagtgatagcttcatagctaaaccaaacagtgtggaccctattttgagctagtgggggctggtgagagactccagctctagagatctcattatgctttgtgtctctcagttttctgtccacagctggggttgagaataatgaacttaccactaggagaaaggtgggcaataagtgagaggttagcaatgtgttatccatacagcaacataaggatgggagagagggtatcaatgtgctgtctacacagcacgataaggatgggaaagaaggtgtcaatgagccatccacagcagggaaatttaaaaaaaaatatttaattaacctttctctgtttctgtatgactgtctatctgtatctctgtctctgtgtcttccctccctcagtgtgtgtacatatgtgtgtttgagtttatatgcgtgcatgtgcttatatgtgcatgcacataggcttgcatgtgcaggcccagaaaagacatcagatctctcagagccagagttaaatgtatttgaaggaaacttgatttgttcactattgcacagggaatcctcttagctgctgggctatctcttcagcccacagccagcatctggaaagaaaatttgaacctgtcttgtgtccttattggcccttgttcatttgctcttactctttacgtggagagattgttttctttgaatgagctgtctgcctctacactaccacctgctccatgctttaatatcaccccagctgcatttggacttccagccatttgtgaaaaatcatccccaacctgccactgaaacaataaagtcaaattttgaattccaaagcccttctgctttgaactctataacctttaacactccagtcaacccccaccattataatgtcagacacaggtgacctgcactgtggcagcctctttgcacatgtgacttcctttaactcatacaaagttgtgtggtgcagatatggtcccattttacacggaagaaactgaggcacagagatgccagtggccatgagtgatgccttaaatgtgacgcaagcgagtgaaggagtctggatcctttccacactgagactgctccagagtgtcaccaatctctcagctcctgtttgtaacctttcttttgtatgaaatcgttcagtgcactgtgaacctactcatgacattcactcattcttaactctctgagtgctattgtacctgtgaataacctaaaaatccctgggcactttctttcgaaaaatgctttggtggagaacgtcatttttaacaaaggaagtttggacttttgccttgggctgataaaacctcaagtgttaaagtaagaccatgaaaatatcctgggatctctcctgtctcagtcacctctacatcagtacaatactgaccttcttaagtcaagagtttccttgaggttaattgtctgtgggtttttttttttttctttttcttcttttaatagtagcacaaggagaagaaaaatagcctgtaaagaccaaagggtatttatctttccttaaagttgcattgtagacatcttttgaactttgagtaatgacaaaggaagccagagcagaatgggggatggatggtgtgaaatccaagtgaggtgatgtgggggtggggtggggtgggggtagggaatcccagtctgagggggagggggagagacagagggtgctgatgattttctgctgacctttacataacagatgctttcattagaaaacagcatgttttcctgcaatcttaaacttgctcttagctttcctgctctcaagaaagagaacatgcaaggatggactgcaggctagcctaatgctgttccctgtcactctttcttagggccaataatggatatcttggttacacttgaatacatgctcactgtgcaagggtgtgactttgtcctagggtgagtgcacacagtttggatggagtattttgaatgaaagcacattaaaacagaggtctacttgacaaaattaaacgacaaagtttactgaagaaagtcatcaaatattggtcattttgtaagtgtcttttatcaaacattttaacttacattgtctgaaattctgtgataccgttctaatgaacagggaagataaattatttgtttaaagacaaacattagattgatttgggatcaaaaatcaactttttaccagcctatcattttataaaatgtagttttctatctttaatgtgtaagtagaaaacagaaacagacatttatacataagaaaatgatacattaggtacaaaaagatggatcctgcagacagagttcaaaactgtagagattcctgccaacctacagggcaaaggatggacataaaagaaaatcagacagaagcagcatctttgtcaatgagggctactgtagactgtggggactcacagaacttaacctgagagcagatggagcccttccctagatgtttgaaatctatggggagaagcaagtgacaggtgtgaatagaatacagacttgtttggtgggtcgaatgtgagggtgggaagggtgaagaatagttttgaatttgtctgaactctagatattagaggctctggacacccaggccataagactttatttgctgggttaagtgaaagacaaagtctgtggtcactgaaggttcacagtcaggttcccacttctacttgggaggactgtgaagagcagaatggggcaggaagagaccagaattggttttctcaaaatttatatgtgatagatatcttttgaaaatctctacatcttaatcaaaagactttaattctatatgggacacctgtgtgagtgggttttgttttgttttgttttgagttctccaaatcattcttttacatattactcaatgacagtgatttgaaaaatatcagatgggaggggaggaggctaagtcatctgggcgtgagcacaagggcattatatgtgtggggaggaaaaggcagacagccaaaagataatttgagataagaattaatttagagatctaggacaatcatcaggtctatggctgaaagaaggcataaagacaactactggcttcaaaatcagggactttggtggtatgtgggataggtacaagagacaggatagacttaccaggtcttgacaagagttagtttagctagctgggttttgagacctaaagatggccaccataaggaaatgtctactaggaaggacttcacaggacttcagttgggcagcaaggtaacggcctgagagatggtctgggaggcatatgcagatcgatggaatatgcaaatagtgaaaaagtttatgaaattaagagaagtctaaagaggatccaataaaatgaaaggttgtcctgaccaatacagatggagatgcttacagccaaccatcggactgagcacagggaccccaatggaggagttaggggaaggactgaaggagctgatggggccttatctggcatcagtggtaggggaggcccttggtcctgtgaaggcttggtgccccagtgtagaggaatgttagggtggtgaggagtgagtgggtggggtgggggagtacccttatagaagcagggggagggggaggggatagggggcttgcagaagggaaactgaaagggggataatttccaattagaaaaacaagaattctgatcttcagaaggaaggataaattggttgttttaataaaaaaggaaaaagccgggggggagagagagagagagagagagagagagagagagagagagagagagggaggagcaagcggtaagtgaagatttcaatttcaaagtctttaatatgaaggaaattagccctgctcatgtgttcctaagcttgaacccaccccagcctgagatcctgttaccctttacctcctgttgctgttctcacgcccacaccccgtgtttagcccattgccaactctgcaatataatgttcttaccccacttcttctggcctctttgtccccttccacccaggctcccatacaggccttctagctggcacttggatcacctatagcagtgcacatccctgtgcctctcccagacatcaggtcgctgctaagtactgagtgtggctttccatcatagtgagagtattgcaagcagcaaggtactattaggccacactcttctctgcctctccatcccttcactcatattcttggttcttgcctttgaatcacattagccctcagttaggatccagtctctctctctctttctctctgccacagaattcttttccactagtcagtttattttcttactgttttttgttttcttatcaaaagcttcctacatgaatgaaaccatgttttcccatctttgcctttcagtacccatctctgccacctctgtcttctctgttttagtctgatatttctgctcaccactccactctaccttacctgcacgagtataagacacacacagacacacagacacacacagacacacacacacacacacacacacaagtgtcttctctaacccctaccactatctcacttgttccttcttttctgtataactccaacagggtgggggaagattgtttttctagcattttctagattgtcaactgcctagtccattgtggatattagaaaaaaaattattgactaagtgaatgaatgactaaatgaacaaggccataaattaaagctttacagggtggagaacagattaaaaaataaacgtggctcctgggcacactcacaatctgagggggaactctgatttttagcagccacactcaacaccatcatgtgtctgaaatcaaaattacacacgagacagcttcccaacaggcgtacaaatcaggccacatctgctttctgcagatctgactttgtcagtttcaattcagcagagactaaatcctcttgggggagacgcggagctggggctgcagaagtgggctgcgatgatgggctttctctgggcagtacgctgggcaccgggactagagttatttgctctacatttccaaatagtttctcaattttagtaatacgttatctcaaccttctctccttgagatgcactttctctcaacagctcttttgattcattccagtggagaagtggctcctcttctgctctatttttacatcttaaaagcaaatagttaccttgagttgtctaaacacagccccacagactgttcctgagcagctcacaggatcaaataaatcactaggaggcaaagttaaagggatcatcactcattctcacagggacagaggaaacacagaaatcctgttaggattttgcctccattttttttttcttttcaaattgcaaattcttgtttttttctctctccttctgatggctccatttgaaatataccagaagatggaaataatgcaaagcaagaaacacaacccctccggaagtttgagtgtgacttgattctcacacattctgagggtgtgtgtgtggggggggggtgtgtgggggtcggtttccacatctgtgtctggaaagctggacaacctctgatgtcattccttaggactttattttgtcagattgtcagttttacctggagctcactgagttggtttggctgtctgtcaggtagtccctgcctgtctccatctccctggagctggaaggacaagcacacacaattctctcccgcttattcttagacagttcctcatgcttgcatgacacacactttactgactgagctgcctgcccagccctggttggtctgaagtcatcgaacacttaagcaaagccagcactggacgctccagtctgagctcctgagcagtccctctgctgtgtcagagcaggtccctcaggggatgaaaggcaggagtcctcacttgcacttgaattgttacttttaacctcctaagagtttcaccaggaaagacactttccctccagggtaagagtgtaagagtcaggcacttgactcttttgagcttttcagtggaaaactgaatgaaaagaagagtggaaagttctcatctacatcgcaaaactcatggaaattcccaggcacacagtgtcgaagggcattagtttgaaaaaatttcaaattcacctctctgcttaaaagaatcccatggagcttgtggagagatgcctcggcagtttaaatcacccagacttggtccccagcacacctgtcaggcagctcatgatcactgatactgccaactccagagaatgtgatgtctcttgacaccctcacagacacacatctacaccgattttgcaaattattctcaatcactgtgacgcttaggagtcacacggtctaggaacgagcagacactgtggagtgctgcacacttccctttcctccttcacaggagccctgtttattccactgcacacagaggggaatccatggaattaagatttatgtggtttctagaatcccaaatccctggccatgaggcctggtaaatacagatgaaacatttatctgtttcctctatagctttacctcagggaagaaggggaaaaggaatgagtatattgattccgttatttttaaagacacacatatgacttcatttattactattggttaagaaaaaaaatatatattcttaatgcaattctactaacctgggactttgtaaaaacaaagttcctgctttcaataaattcacatcctaattactggattaaaaattacactttaggcctgaaacagtgatggctcagtgggttttgtcattcaagtgtgaggatatggattcagatcatccgaacccatataaaaccaggcacaggtgtggtgcatatttgtaataacaacacttgccctgtgatacaggatgcagagacagaagaatctccaaaaaacctaccagaccagcaagcctggcttattccgcagtaaataacaagacacccggtctcgagggaagtagaagactaggaccaactgaagggattcctctgatcacctcaagtgtctggttggacacgtattcccacagttgtacacatgagcacacacacacacacacacacacacacatacacacaacaagacaaaaagtatcctttagcttttcagttacacactttattatgagcttaactattttccttaccccattttactgaaggggatcaaaactgaaaatggacttccaggtccaaaaccttctgagactttgcctcccacttaagaagaacaccaccaaggcaccagggaatctgtattagagcttatctgacatctcccctatgttgtacacatgcagtcaatctaaaccaaagtctacctgcctggcattacagctagttctctactgatgtgtgtatttccttccttccctcctcctgcactgaaatcctcactcaaactccactggtgccctggctgcgatgaggagggggatgaagagtttgctgtgtgaaccacgagacttgaagtcagctttgaaggcaaagcatcttacaaagataaggggagccagcatccagggaccaacagcagggaggaggggtgagggaaccagctcaggagaagcatttcccatggcctgggagtataaatagaggggcaagaagacaagcagatgagagcttgcaggtccaggctcattcatataaatatggcactcaagtgtctactgttgaggcttgggattcatctgtccttaagtcccagctgagacatcaagtgtagactaatagtcatagactcatttgagaaatatataagtgatacccagagtgctgctgggtactgacgattggctaggagaggagagatccctgcactaaagcccacagcgtggtgacctaagggccagattggaattatgtaaagggtactctggcaatgaaaacaactacgtcctaaacatcctttaaaaatcaacctttaagtttctgtgacatttctataacaatggaatatccacctttttggattctacagttggaactcgtcatgttgcgaaggtggatttgagaaacattgaaggaaatacccccaaagcattagctttgaaatggagcttccgagtcctgaatttgatgctatggagcaggacaggggtcagagctgaccagggaggaggggtgtttacctttgcaggggctcagcattggagagtttttccaacagcttaacataaaacatccttgctaagtctggaataattggtaagccggccacctgccaatggcatggaggttgtgccctgacctcacaacatcatgtcatgtgcctcctgttgtggtcatagtgcctccatctggacattttcttagagagctagccactgcagtcactgatggagcaaagacaccagcatcatcaaagccagagcctgaggtacttgctaaagtactctgtcttaggtacctgaatttataaaatcgagtttggtgtctcaaagaaacaggtttttgccttgttttctccatgcgtcctctctgtgggggtctaataaggaggaacaaatgtcacaagtgtcaggagaagctgtccctggtacaagtctgatggttcccagccgtgaactcctgtgtaatatctccatgctaatgactcacacgctgcctgctgaatggacatggagacatgcggtagcaaaagcaaagaagaaacacttcccactaatgcagcctcatgagaagaaatagatatttgcctagtttgtgcaaaggtctggctttaagcccagcaaaaagactgtgactaatatcataacaaagtgagaaacccataaaaatgttattgttcttgtgtattgtattttgtttttgagacagagtcatgttgtacagtgctggttggcctggaaactaataggtaaaacagactggcttcaaacttacagtgagttctacctggatctgcctcccgagtgctgggatcaaaagcataagtcactatacctagcataaagggcactttttaaacaaaatctctctatatgtacaattaatatttgtgatttcatatgagaccactataggctataggtacatcgtttatttttacaaggcacagtcttgacacacaaccatcacggccccatgagttatgtacgtttgctatctgcatttctgctgagcatccagcaagctggagagcagacaacaggcagagctgggaatcacccttacgtgttcacagagtgatgctcttttccagtgcttcatcttattggagtctgcacgctgcaccactgaagtttccttccagacaccggagtgtacttttggcctaagaaagaaatactttctatactgctcatagaaggaaaattccgttctcaagttccataagaacaagtccaacctcagtagccttcagtcactcattacattaaaggtggttaacctcgtcatctgtttactggagtacatagctggaaggagaatcaacatgacagctttcgagccctctgacctttatttgttaggattttccacatcttagtctccttatctggtcaatgggaagtgccatgtctacaggggaggcactgtttagtacttaagtgcaatgataacagaaatatttctttttcttttttccccttccattttccgtcctgctccgggcccctgcttgctccaggcccccacttgctctggcccatagggtttttagttaaagtttgtttgtttctcattagggatggttgtgagctaccatgtggttactgtgatttgaattcatgacctccagaagagcagtcagtgctcttaaccactgagccatctccccagccccagaaatatttcttaaagttctctgctccaggctttctggtggagaagggcatccatgattgtcttaaatcttcaatctagatctaagcatttttttaaatcaccaaacaccagtgaggaaatcgaaactcactaagatttaaaactttccccaaggtaacagcactgtgaaagcaagattcacaccaacgtttctgcttaccaccacccctcagactcgaaaacattgttaaactactggacatgatttcatttaacagttttgggcaataaagccatgtattacaacatagtcatttgaaaacacatactttgtacataggagaacactattgttaaacagaccctgtggatttggagtgggttgtgaattaataacactggtgaataccgttgattggttcctattgtcagaggaaagacatacagactcatgtagaatattctatcctgactttgttattccttccggatcaacacgggcaggaagtggaaaggtggggcatttctacacccatagtcatttgtaagagatgtgtaaagtgttctttttgaactataagtcatcttttggataagatcaaattgaatttgtatttcctttgacacagattggaatcagggatgtgtctttccctcctgtgcagggagaaggaagaaaatcctcttagcaaatctccttgactttttcagggtatttggcatctctttgtacaaagcaacaggatgtcaaggcacagagtttaggccccaaggttgcaaatcatgtatgcttgggatctcatattacaatgggattttgatgaggaaaaatgttcaattcctacatggtgggtggggcttgttcaattatttggccactgcctagtccataggagcacttttaaccgagatctgaaacagtgagaatcagaaccaagacaggcttttctaggaaaagtgtatgttggaggcaaaggctatgagatctgagtgtggggtgggtttgctgactcatccaattgggaatggtgaaagaagtgcccaacttgtgaccactgcaagattttatctgtaacctgaaggcagatgggtagacagtggagggcttttgaactgaaatcctaattcagtttcaattctgatacaatgctggatttggggtacagagttgaatgggaacagaaggaagcagaagaagtgatcaattgtgaaaaaaaaatccatttatttgggggattggtgaaaggccccagaaggaacagtaacagtattgatctatactgaaggtacagtcagtgaggacagacatcactatggcctgcgaaagaataggtggcttcaaagaaatcctccagtattttcctctgagaaaggggataacaaagtcagtctaccagtgacactggaaaggatagcaagtgaaaatccagaaattgattttgaacatagtaggaatgagatagttgccagatgtttagccaactgctctgtaggaatttagctacgtcaggagggagtctagggatgagaatctgggatctgtatgtatatggatagtcttgaagagctcgaggtaggatctcacatatttggagcttaaacatagataaagaagagatttgaagctgatccatgccaacactgcaacattttaagattagcagagactaggaaaaggaatttgaatacggtctccatttacagaagcaaggaaaagggctagggtgataggtcagggtttcagtgcttgatgctcttatagaggacctgccctgactgtgttcccagaactcacttcaagcaagtcatgactgcctgtctctccaggtacagggatgtctcatgcctctggtctctgtggcacctgtactcatgcctcagacccacacaccgacatagacgcatgattaaattagtaaaaaaagaaacaaaccttgaaaaacaaaaagaaatagaaaatttacacatacgcacacacacacacacttcactgaggcagcatttgagagaggataatgctgagctccttaaggtaaagtaagaagaacccaaggagccttgggggagaagcttaacctgctccaagtcttgcttgtgggaacaaatgactggaattttagatgaagacatcctctgcactgtgaggtgagctaagaggggggctggcagtgaggatagaaaaggagatggggtggactttatgacacgtgtctcaggactattacgataacacttctctcaaacatcttagcaagtgtacagcttacagccgtgacaggaaatggctgctgagagtttggtgcacattttcctgtttgtttgtttgtttgtttgtttgttttaatacgcacatgtgttcttaaaaagcaagcaagcaagcaaacaaacaaacaaaaaacccagagttatattgtatatctataattgcaagttgagctatattgcacaatcacacacggtcctgtaatcaactcgatattgcacatatattattgtggccgactttctacttgtttctatagggggacttggagagttggggggggggagatttctttccaagaggagagagatgaaggaagagaaggttgtgtcagggtgagaaatgtcacatctagtagatacatgcagagtgacagtggcacgtgtagaagagagggacagaaagcaagtacctctgtgagtccgggagccttggtaccaggaggaggacataagaagactgacagacatcctgtttactttttatatcagggaggattcaggcacatttcctgtgaggctggagcaggctttgttttcattactagatggagcagaaactgaaggagaaagatgatgtggggagggaaggctctggctggtcctagcaaccgaaatgggcaatggtgttcatttgccacacaaagtggattgtttgtccaaatttctcagcccaactttcctcagagctgactaaagacacccaagtaatcctgtttcatccggtttttctttttttgggggtgggggtgggggtggggaagggggcattgcaatccagactgacatacaccagccagatttaatagaagaatttttccctataaatctgtgaacagtgtggaaatcagttttagtttatcggtgaagtgtcagagcctaactacgagaaaatcacccttcagctgttgttttcctgccatcagttcccccttgaagaaatacttgatgcagtcagattcaggtgaaattgctcagactagagccaggaaaagtctttttgaaatcaaggaaaacaataacactcactcgctaacttcagccgacagatcttgtgtttaggaagtccaagctctgtctttttttattatggagtcttcactggtgacttcaactggctagggatggggattacaaggtcaaggtcatgctctccacgggccacgaggaagcacagactatgtcgtaaccatcaatcttaccagaatatacagttactcatacccatgtgctccatgtcacccaaagaccaactaagactgggtcccagtctcactaaaggctgtcattctgctatgaggaacacccagccaacttcaagcctagaggtctctcaaccaaaggaaaatgacctcgagtttgtgtgtaaatggcagtgtgtacacaggagctcaaaaagaccagaatctcacttaaccctaattccagcatttaactgaaaactaacattgtcctcaacacttatttataccgtgttatgtggatggtgtagaccagtggagaatgttacattctttataaatatgatcattgaagcgcttttggtgttcattatagctaaatgcatgcatcgaaatgcagaggtttttctgtttgtttgcttgtttgtttgtttttgtttgtttgtttggttttcaaaatagaaagcgttatccttacagctttgagtctgtgaggtccacaggggagagaacgcacccgccacggagggacacattcactttgtccctgccacttcacactgagggtcacaagcaatgacagtactggcaccggggatcaaattgcagaaacattggttttggatcattgtacttttgcctctgaaatctccgcgggtggttcctaccttccctctctagtagagctgtacagagcccatctgaagtgcaaggagatgtatgcagttccttgccagtgctaatcattgccccctcctcccggactgtggaacccaaccgctcctcttatcttcaaggaagattaagctttcgagctattcattaacaaaataaaaggtcaagtccttaacctctaaagaattcccgtttccatctgcagcccagcagttgctcaaaggcaagaacacgaacagagagaaagccccttctttactctcaaactcccggtctgtttttagcaaagccattaataggaacagaatggtgtggaccagcctttcaatatgcaagatggacagaggtaaccagatttctcttatagtagattatagggggaaatccatcactatcttctgaaataccctctgaccaccaaaacacactgactccaggaatatatatttacctaacaggtttcaagttcagcacggcttcctcctctatttttcttggctctctctgcctcccacctgccaaagtcttctctcagtgccccctccccagcctatcaggcaccactggtaagaaaagaactgttttctccatgacctctaagccttctactccaccgaaagcaacgtggagtgcacactcagcaggctgcgatcgagcccggagccaacctgtccatgaggctttccagacataaaacctcacactgcccagtgtgtcttgtgttttggtcagcgtggagccccaagtcaaccaagcctctctgtagcacctggctgcaatccctgaccgaccacaggcaccccagcgctgagcccagcgacaacaaaaagctccaaacagcaacagattcctttgttttacatgcaaatcctaccttcaggagttgtcacatcttcctcaaaagccacgcttaatttttaatgacagtgatcccgtgtagtcctccacacagccaccggtcctcatctttacctttcctgctggctgtctttgtggaccattgatgtcacaccctcgctaactcatagctttactcctcgctcaaaatgtctgcaagagtttggaaggacaataggagtgacaggcacgctagacagccatgcttaagattagttctccgaagctctgtggaagccggtccagactgtttttaaaagcgtgcaggaggtaggatttattagcctatgacaggcacgctgcttctgtttttattaaatactgtaataggctgtctgttagcatcgctgtgataggtccagcatttcttccccactgctttcgaattttcatactgaaaagggagcggagcctgatctgacttccctcctagctctgcggccaccctacctactagattagatttccaaatcctctaacttcggaagaaagaactcctcctgtaaataagctctctctaggagggtgaacttgggagtaaacacccttggaatccccaagtgatcctgttagtcccagcaagggactcttgctttcccaagttagaaaaagacattatttccagagctaggcgagaggatcctttcacacagggaaagttgtgatgggtaactgaggatgccttatggcatgtactcacctgaagtctcaaatgttgtatcagacggacagcatgcatcagaaaacagatgaactcattagggcatgtcggctgcacagttctttgctccatgcaaaggtcaccatttttcctgcatcactgctctctccatggaaagaatggaaggtgggtagaggagcttgggatgggtgccctgccttggtgtggtcctttacacagtagtgacatagaaacactggccagagaggaggctgttctgtgtgtgcaaacacacatcactctgaaaagtgtttttccggacaggaatgcaaaaacaaagttcttgccagagaatgttttaatgctccaactacccaggtttagtcttttttttttaactcggttttcctttctcttctcttgctacctcagaaccatagttatatagtagttactatggaaactgagtggtcggcactaagggaggggcttagagaccagcagatgcaatatggacaggagtgttctatgttggactatggaacagaaattgaatagtggtaatgaacatcttacagccactgccagtgaccctctggaagaccatctcaggggcatgattctaagttgccactgtttaattgtgggcatttttgctgtttgggagtacgacattgagcagacccacatcctcttccacataataactgaatatcagaattgctctcatatcggtccaaagattttgctttcattcctttctttctttctcatgttcctggctgctggtttgaatataccctgattatatttgaattttagctgttatttgattggttacagttttttcttgggaataaaatgtgattcagtaggaaaaaaagactctctttgtatcacaaaccataatcatacttcattctgagtgagtgtccttacatcatttccttagagctaaccctgggcctgaatatgaagtttgaattttgaaagataaccctggacccactggattgatacaacagaaagaagagtttcttcttgtttttagctcctcaaatagaaaagaaacttttttttcttttttttttttaaaagaagttttgctcatcacttggtcatctaagagaaaccatttcagaaatagttaaatattcataattgtaaagagagcagaagaagtgctgattactgtcatcagtatcttaatttcatggtaattggagcaattcacacaactgttgacacaaaacaaggctctcatctccaagggaataagagaatattcgggaatcaaatttgatggccaaagcccaggaaacatagaactacattcccatggtttccccttgtccacatggaagcagtggaagccggtttcttagagttcaaacaatgacagctgtaagtcaaggggttttaagaacactggtgggtacatcaaagagacagtctcagcaagatgcaggagtctcatctgaggcctcagactctatattgctctgttcttagcttttgggttggtaggagtcagcagtctgttaagttgctaaattgcaaaggggttgtatctgttactcacaggatgttagttcccaaagaggtgggcaaggagtagttacttagaggtctaaagctaggccaagataaagataaagtgtaaagccagactctgtaacatcctaacctgtcgctgtgactgaaattcttagtccatcagtgtttgtggacacagcttccttccaggggctcttgttcacactccaaggtgtgagtacaaacgttcaaaaatgaaattgttgggagggaattctttagggttttatggaaatcttcttttttttttttaatggacaagcatatcacccaacatttgtttatgggagaaggattatttcagtaaaagaataaagatttctttttgaatgattggaaaagcagcgtcataaattctgtagttcatctatttttctagatgagaagctaaacaccattgtaagcaacgtgttcatggtttggaaggggacagaggaagacaccagaaaagaaaaaggaaagaggggaggccccaaaagcatcctcaccaaaaggtaattcccactgcatccccccagttcttctgacaactcagctgttgctctgctgtgcccagccatgggttccctggaggctggcgcgggtggaggctggcgcgggtggaggctggcgcgggtggaggctggcgcgggcaggggggttagagatgcttcagtacagatgtgggttgtctggatctttctgagaggtgagaagaattctctacctgtgatgtcagggtcagattctgttatttgtttttgtttgtttgtttgtttgtttgtttgtggtgagaaaggaggatcatgattgagagaagaaggaaggaaaggaaaggggaggaaaaggaaggggaggggagggagaagcagagaggaatggagagagtggaggaggatagaggaggggagagcttggagaaagagaggggaaagagtggagggagggaggggggagggaaagagatctaagaggaagatggagagggaggaagatctccagcctccacagtagtagaagagggcacaggcttgggagtaaacaagcaggcctgagtttgagacctttgtactgtttgagcatctggtgttgaaatgaaaaaaccagagtggccctcgcaagttggcaaggatgcgacacagggcgagtctgggaaaaaataaagttcattacaaacaaaactcctccaataaactatggttgtaactaaacaagaagagagatgatgggtaaataggaagaatgggcagccttaggaaccaagggtaaaaagatttaggaggagtggaaggcaggcagggaaaaggggccgagagcatcactccccctcagtcctacataacagtctccctttgtttcttttttattttctggatctcagctccatgactctttctttaggagtcagatcacaaggtacccgtcaggaccactgctcccaatggagaggaagctgtggcacagatgttgaaagcctgctcttccattcatgaaaggagctgatgtgaggaaagcgtttggtcttgcccagcataacttctcagtccagaggaggaagtgtggacctgcagaaggcaggcaaggcttactccagggtggaagaatgtgcaaagcctctgcaacttggtagcatctccctagcatctgctctccctgtgtacaggagaaaacttgttctcaaagaaatgtgtgtgtgtgtgtgtgtgtgtgtgtgtgtgtgtgtgcgcgcacgcatgtgtgttaacaaacactgaatgggaaaggtgagttgaggggggtctgagctgtgagtttgcagcctccctgtgcaggcggtgagtagatggtataatgaatgagatcatccattcattgtgagtcatcgctgttaaaatgaaaatttgatagaaatataacttgaaggtgtagctattggctacagatccgagcaataatgataatgtgcagtgtataattcacactctgaatagtgcagcctgagcatttgctctgctctatttttctaggaataactgagtttagaagcagcttccttcctgttatcctgtgaactcagaggctgactcattccgcagtgagcgcccttccacttcgagtgcatacaaaagtaattctccagcgcagactgacatgtgtgacccttggaatgaaggagaatggtgtgaattcaatgagtccataattccttaagagattacatgagtatactaaattcatctattttttctcaagatcgagctccttatatggcccagtctagcctcaaacccaggacaaaccccctgctgtagcctcctgagtatgaggattttaggtgtgcgccatcctgccttctctcctacagttttcaatcttcagaacaaaattgatttgaggcaagacatagctctctctctctccccctcccccctctctgtgcacatgtgtttgtgcaggcatatgcatgtttcatatgtagagatgcttagagaggccagaagacaactttgaacgttgttccccaggcaccatgtacattatctctggagacagcatctctcactggcctggaactcatgaaggagactaggctactggttaaacagctccaagggttctccccagtgctgggattataagcaaccacttccatgacagttttgtttgttcttttaatgtttagctttttaacacgagttctgggaatagaacccaggttcttaggtttgtatggcaaatgctttactgactgagccatctgcccagaggggcaaatattaattgctctatctctattgatagaaactgaaaagagaggttaaagtagcttcctaaagaccaggcagcatgtatgtccatcttccaacttatagcccggtgttctttgcattaaatgaaactagcttccaacacggtgaccagatatacttctactttgatacccaggtatgtaagcaccaaaggatagttcttgaaaagaatttataaatagaaaaataaaagagaaagtcatgggctaagtgaaaacatttgcagaagctacagctcgtgtaggattgtatctgacccagacaaggaactttcaatgcccagcaagaaggaatcgacccagttaaaaccacaccccaaatctactttagaactccctaatgaaaacatgcaagtgcaaaacaagcaggtgaaaagctgttgcatgccatagtcacagggaaatgcagactaaagcacctggctgctactaggctttagtcagaattagtcagggaacaccaggtagcaacagtgactttttgttcactgtggtaagggtatacttggtacaaccctaggatgttgattgtgtgcatggtacagcatgttggaggttgatttggtgaggtctggtgagggtgcacattgatttggtagtctcatgtataaactaagactcagcaagcagcacagtgctgacttggactgccctcagtgaacgtgttggaagtctgttttccagggcaacactgaagagacacaccattaagaggagactctcagagctcagagacttgaagggactatgttgctgtggtagtaggctagtaacggcagaaatagttttatgattaaaaaaacaaaatttgttgctgcttttctgccttctgccatttagcaagaaatctcttcccataggcataggcaggccttcatcctggaacttgcatactcacacaactgtgtgagatctatttctgttcttttgtaagttaccattccacacattcagttacagtagcatacatggaccaggacacataggatccatctgtcctttgggataaatccaaacttacattccctcttaaagctatacagaacttaccacagctttctgtataatcgtccatctcaaaactgccccagaggttcagtgggtgaatggatggtttctgccaaggcgggcagggcagtgcatctggcgcccagaagaaatgaatgagtacagcagagaagacacgggggaggggcttagatgcctatcagtaaggtagaggcaccagttggagaaagttaaacattttctccaaacatctgacctgaaaatggtagaattagggagatgatgcagcctccacagtgaaactagtctgtcagacatgtctgtacccaaatgtttatgacagcactagtcacaaaaagctgacaaaggggtaaagaaaacaaggcacatatttacaatggaataccagttagccacaacaagtgtaatttgtcctttgcaacaacatgcatttaacaggagaaaattatgtaaagtttagtaagttggcaaagagcagaggtgctgtgtgttttcccacagatggaatttctgatttaaacaaaattctaagcgtgatgctacacttttgaattctcctacctagcaaccagccccttcctatagtctgatgtggggctaatctcctgtgcactgtgtggaagagacacctgtcaataaaaagctaacagccaataagttgagacaggattagcagtaggacttctagttgggctatactgaggagtggaaaggaaagttttgttgggacatgaaaaagtgggatgtaagaagacagggagaggagtccagccatattgctgagctcaggtagagtaaaagggataataagttaggagttagtcggggaaccagcctagtttatggcttaggtgtttgtaaataatagtaagcctctgaggttttgtttgggtacctggtttcctgcagcaatgggctaaactgaaagagctgaaagaaacagctgctcctacaaagctgagtgaattttatgagaggctggggagtgtgtgggggtggggaagtttggatattgacttgtacctggagaggactcagaactagtggtttgctatttggaaggtaaggtggctgtgggtaatgagatctgctgtgtattctgaaaagctagaagaaagaacgtttgaatgttcactgttagcaatgaatgcccgaggagactcaatagtccaatttaatccttctgcatacctggatgcttcccacaaaccccacaagatatatgcattatattcgtgctttcgaatgtcggttgaaactagtataacttaaaaatgcagaattggggctgaagagatggctctgcagttaagtgtgcatacggcttttgctgaggacccaaagttctgttctcagcacccatgtcagcctgggactccaggggacaacatgccttcaactggactgcatagaatctgtacctatacacatatatgtatggcatgtccaacacacacacacacacacacacacacacacacacacacacacacacacaccaccacaaacacaaataataataaagttaaaaatgcaaaaaagcctttaaaataggtaaaaacataaagccaagcactgacatagtttttttcctctttgtcaaacacagtttttaataatgttttctaacacgtttatgttttcaaatgtagatggagctgctcaaagatgatataccatgacatgtcctaactcgtctaactgcagaatcaacactgaatggcctttattgagggatcctcatgggatctcatctctggtctggaagcctgtcttccacttactgttttctaccccatgtctataacaattggaagggcaagccctgcaggcctctgccctgcactctgtggctttgcttgctcctttggattcaatgcaatatagtctagtgtacctgtggtggaaaggaaagaaggagggagtctagcccaacacacacacataaattactctgcatttctcactcttctttctaccaacacaccaatgcccagggctctgacttgggtaccatgaggaaaagtcacatgagctattttaatactcccggaggccatcattctttggttgagccattgcatttggcaggcaggtgattggggctgcattattgccacccttctgaagcctgtcagaacactgaacataaatcagctttaaaaatgaaacataaaggacaacattggcggttgttggagttctattttgtttggatgctcctacttcctggggtctggctatgattctcatgctaacttgagaacacaggcatggtgttccaggctgttgttacacagcactggtgggatacctgctgcttttaatccagtatgttaattaaaagacatttgttttctgaactaaataaattcaaacagccctgaagttaggaggacagcatcagcacgctcatgtcacactcctgtgagtgttttactggttcacttcatgttgccaacatcttagaaggaggaagagctatggggcaaaatctttttaacatagaataaatgtgtgctgtaaaaagcccagctagacaaaaaagtacaacttgtataatttttgtaatatctttgctactttgttatttagagaactttttttattttccccagtcgagccagggtttctctgtataactctggctgtcctggaacgcactctgtagaccaggctggcctcgaactcagaaatctgcctgcctctgcctccaagtgctgggattaaagacaagtgccaccaccacccagccttagataacttttaagagtttgtcacattctaaaaatctagaaaaatcttaaccattttctcatttcataatgtaatgtccatggagtggatattttcgtggctgtctctatgctgatggtcaaaacaggtggtagagaccagaagctctattcactgtgtaaatgtgggcaaagtacaatgtgtatgaaagtgctgaaacaaagcctgtcccagtctcttctgccttaagaataagtgaacaggcttagagagatggcttagcagcagtggagctcttacaggacaaacaggaggacctgagtttgaatctgcaaaaccattcaagaaagagcacgtgaggacacagactgtgattccagggccacagcagtaagatgccaggcagagacagagagtccccagaaactctcaggtcagctagcttcacatatgcagtggtaaagaccctgtcccaaacacaggagaaggcaaggaggagcaacactcaatattatccactgctcttcacatgagcacccacactcgtatatgtgagcgtgcacacacatgcacacatgcacctacaggcacacacacagactcatacatgcatgcctaagtttatccagatatatacatacactcacacatgtgttgtcaaatagtgtcacacatgtgtacaaaagtggattcacacagacacaaaaggttttagaaagggaaataagtaaaattttgagaaaatataaggcaaaagaagaaaataaaaacaaacctcacatagctgacagtacatgggtgagtatttgcttttaaagaacactgggctgtgcaggaaatgatttttaagccacaagccaaaaaggacttctgatatgacgacttttaaaacttagcattctcttgtcttaacattcatttcatgaattcattttccccttaaaacgtgttttctgttttgaaatcctcacatctttttaactggtgccttctgtagaaaggaccaccctcatttctgttggtgaccccatgattcccacaggggaagagaaggaacctttctgttttccatcagcacaaggctttgctcaagtgtttgttcagaactcttggtccccatctttgtgtttatttaggatggatttccacagtgggaggggtggctgctttgaaatgacgagcaccctacatgctgagttgcaccatggaaggctggatcatttcagcctcactcctgacttggagttagacttcgtcagggtcattgaagtggaagaggaggatgctctgtcctccttacccagtccactttactgtctttgcttgattcctgtagaggcaggtgtcatgtaacaagggaggataaagaggagacaaaagagcaaaagagctaacttggccttttccttttagctcctgaaatgaagtacctttgataccattatgggagtgagaaggaaaaaccacagacaaggtctgggctgaccctccagtaaaatgtttctggtgaatcctttaagacctacggattccaagagtctgatgtgactcaaatatgcataaacccactgtgtgttgtcttgaaaattcagcttgcttaaagactttgggaacaaaaacttgaaattttctgttctataaaggtttatagtaggtgcatatcagcttttgacatcaaacctcactttttaataaaaaaaaaacagttaatttatgcacataggtgtctgtaccacatttacctggtacgtgtggaggccagaagacagcatcagattccatagacttggagctacagatggttgtgagctgccatgtaggtactagtaatccaactaggtcctctggaagaacaccagtgttcttccctcggaattgtctattcagctccttaaatccttaaaacagaagttcagggaacaaaacgtcttgatgactgggagtcatgtggaatctggaactttctttgttttcagagaactcttgtggaatgcattagtcaaaatgaacagaaagcatgaactagggatggtgatagagaagaaagtctcaaatggcatcttcataaatcaaaggagactcaccctctcctgtattagaaaaatacataatttttcccgaagctgactgatctggatgctaagaaaggcaaccgtggcccaacccaaatcggatcaggtttcttccagtattttagtcagtcacatattgtgttagcttacagatgagtttatgagctgttctttaagttttcattcactttgttttgttgatacactttcttatctaccctaacctggactggaattccatgtgtagctgagactaaacttgaacttctgatctttctgactctccctcctaagtgttggcattgcaggagtgaggcagcacaccctgcttgagtctacattttatttcctgccagtgaagtcactcagactatatgtgtatggtgtgtgtgtgtgtggtttgaataccactcctaacttattgttaaaacttatactaattctaaaattatgttttcaacctgtatcacttagtagttagaaaagtacatcactttaaatgaggctgaaatatcacagactatgaaagataatgagggaaaccaagaataacctgaaaatcctgagacatgtgtcaagactgatgtctgtagggagcatatagggcactttgcagagcagaggttgggagcatgatttaaccaggtcagaaacggcaaagagaaagcagccagatttatcacatggtacaaagctgtattgatgaagaggagcccatgatccagtatgttgaaggaatctcactccgtacctttcctttcagccagtcaattgatagcttgccgatggagtggcttcaagttctgttgaataatacccagtggggaaaatctttaaaaagaaaaaaaaatgcctggaaattgaccactgtaagtcgcacagctacaacaacaagtggaatactactgggaaaaacttgtgacctgtgtgatatctaatttctcaaagaaacttcttgttacaatttgcttgattttatcgaattcaagagagaatgatataccttggcccctctttaacctaatcctaggagagtatcctactccaggtatccagacgtgagcaacactgtctccttggtatcccgggagtagataccactgccttctcagaatgctactcttggatcctcctaaaaaggcacacagtagccaacaaggacacagaggaaaccacagtctacttacattgacttagatgctagaaagaaaatgggtttccaagctgaatacatggccagtgaatagagaagacaagtgtgtgtgtgtgtatgtgtgtgtgtgtaaacaactaaaggcaatttgagctccgatggtaattttctaagtcagatatttgg

SEQ ID NO: 61 - DNA, 44143 bp, Homo sapiens
agtagctgggactacagatgtgtgccaccacacctagctaatttttgtatttttagtagagacagggttttgccatgttggccaggctggtctcagactcttggcctcaagtgatccacctgcctcagcctcccaaaatgttgagattacaggagtgagcccctgtacctggcctgggattttatttttaaaaattaagcactggggccaggtgtggtggctcacacctgtaatcccagcactttgggaggccgaggcgggcgaatcacaaagtcaggagatcgagaccatcctggctaacacggtgaaaccctgtctctactaaacaaaatacaaaaaattagccgggcgtggtggttggcgcctgtagtcccagctactcgggaggctgaggcaggagaatgacatgaactcgggaggcagagcttgcagtgagccgagatctcgccactgcactccagcctgggcgacagagtgagactctgtcacacatacaaaaaaaattaagcactggatatagatttatttttctattctttgtctttttctccttagaaagtgaaacagaaaaaaaacaaaataaaataacttctaattgattaagaattcaggttatttgtgttcttattaataggggttattctataacatttaggaatgcatcaaaattcatgatcagatatcacttgccaagaatgggggcttcatcagatccggaatagaatttatctaaaagtgatcaagacatgcagacttataaaaagctatgaacatcctgtctgtataacaacttggccagcaacattcctggcgcaaagggctaaggctccttcaagccttgagaataagacacttaaaagaataagcccaagctcctcctgagcgaggaggccgaatattgtcagtagaagcatggacttttggatgtgatctgttctggagccccggacctagcccttgttactttgtgatttttgcacaagttcctcggactctctggtcttctgtgtcctcatctgctgaatgcgcaaaaagttcctacctcctcaagttctgtgtctgaaggacattatgttctcatagcactgagcacaatccctggcacatggttactcagggcacccaagttatcattatgtgtctagggaaagttgggttgggcatgcagttgttgaattctcttctttctgggtgagcgctgcctctcagcagctgatgggggaatccttgcattattgtcactccaggagagaagatacctgcttcctgcaagcaaacttacggtttcatacactttattggatctcaaaggcagatctttttttgttttgttttgctttcttgagatggagtttcgctctcgttgcccaggctggagtgcaatggcacgatctgatcgtggctcactgcaatctctgcctcctgggttcaagtgattctcctgcgtcagcctcccaagtatctgggatgacaggcatgcgccactatggccagctaattttgtagttttagtagagatgggtttcaccatgttggtaaggctggtctcgaactcctgacttcaggagatctacctgcgtcagcctcctaaagtgctgggattacggtggtgagccaccacacccggcttaaaggcagatcttaaaagcacattaaatcatctgctctaactcccacattgcacagagaaataagctgagttccaaggaggcagcataacctgagactagaaatggtgcttaggttcctaagcccaggcctccaaggtctatttactgtataatgtgagctgatgtctcccaaagtataaatgtagggtcacctgtgttaggatcatatgaagggctttttaaaatgcaagttcttgggtcctttaccctaattgttttatcagaatctctagagatgggacctgggaatctgtatttaacagaggatcacacctgagttcaagaaccactcatgtagtagaacaattacctcaacttaaaatatgaaatgtatctgtagcaagtgccacctggtaaagacttgatcacagtggatttcaaacaagacaaagtattgagggctgttgaactgtcaaagaatttcagctattatttctattagtttctgcctcactatccatcgagttgtttgtatgccaggataggccaagttctctggctcttgtgagcttgtgtaagtcagtgtagctctctgctcttgaaaaagcccaaaaagtgaattaacatttgtatagacttagaactgtaactagctcataaatagtagccactagtattatcactcagagcaggaaaagcatctgcacagaggtgacgctggtttctctgatgtgagcctagttcaggcagtcaggtgcccatttgattagcaagatggctggagataataatcagggtaaaggaaaggaaagatcccatcgaaggctccagaagtttgtggcacagatcatacttccttgttgtttgttttcctgcaaagagaatgtaagatcagatgtgactttacttttgacagtttgaattcttgctcacatcagcaaaaattctccatattggaataactgtccagttaggggtttacttattctcctacgaacaaatatagatagtcacgcaaagaacataggctgttgtgtaaattttaggttgttgtcaatgatttgtgcatctctaaattggaaaacacagacatagttttcatgaacatggagaatttcagctacaaaataattcttagccataataggtattgtatatttaattgagagaatgtgaaaaacaatgaggaagtagtttctccagtatggtgaaaggcaaagagggttcttttttttcccctaagtaaagcatctactaaatgcaaaagaaatgattgtggactctggaatctggaatccacgatgctagcactttgcagtaatagcctctttcatatatagatctcacaacagtttgtagacactaagtttttccatgctcctgcaactcacactgagtttttatttactccctttttactctggaaaagcagggcaggaagtttttaaagggttccttgcagttacaaagctagaatttgaacccagtgtcaaagcctctgggtcagattgggagggggcccacgttgtgaacttgacagttaattcatggttgctgttttatggagcaggaagtgacctttagtgactcagaggaaggaataagctgagggagggtccaggagaccagaggtacagtgcctggcatctcttatcactgcattctaagtggcttagccttgctgtgttcctgaatgcacacattgggattgcaactcacaccgaccactttaggttcttcttgagagataggctgtgagtcctgaatggagtgtgtgtgtgtagggggcttggctttcaggccaagagtggagtgagtgtggtacttggtggacagagaggccagttggttatcaagtgaaggggcgttagggaaaaagttcagagggcaaaaagctatgttgctccttctcacttattgtccatgagtattttcttttaaatggaaccggaatcataagataagaatgaccaggaggctctggtaaaggcaggtgcaagttttgtgtgacaagatcctcatggactaaaaaatgatcatatttctgaggttgaatcaaatacataaaagcagcagcaaatcacacacttcttcgaagagagttaccaagttgcaggggaaatttattagcacaaataagtctgaaaaggaaaagctatccatatatacaaggttaagttggaagaaggaggcagaaagaagaaattccagttgttatcattattttttattccaaattgcatctgttcactaaaatacttcggactgggtgcagtggcttacacctataatcccagcactttgggagactaggcgggcagatcacttgaggtcaggcattcgagaccagcctggtcaacatgatgaaaccctgtctttactaaaaatacaaaaattagccagtcgtggtggcacatgcctgtaatcccagctactcgggaggctgaggcaggagaatcgcttgaacctgggaggtggaggttgcagtgagccaagattgagccagtgcactccggcctgggtgacagagggagactccatctcaaaaaaacccaaacaaatattttataaaatagaaatagaaaaataatacaaatgaaaagtctattaagtatatatttttattaagcaatattaaaatgactgcaagtaagagtttatatagctatatgtacatggatatttatagatgagattacgcttacattcttgcccacaccatcttggaaaatgttaagataatatcgccttgactgaaaaacatacagcaaacatggtctctttggcattctgtcatccacatctacaggtgcctgtagcaatgtgtggtactataatataatggtaattgatgttcctaatttgggagtgtggaaagatccccaaatgtcttttaagtcatcagagaaagataaaataatatttgatacagcttttcttaaaatttgagataattttaatggcgagttattttatggccctttgtatcttgaaaaattgggaaatcacatatggtttaaaagcgaattatcttaattggaacatgccattaactagaaaacccattatttcagcttgcactctaacagacaatacgtggaaaaggaaacgcggccagggcaaaacatttcctcttcttataaaccttgaactgagtacgtccctcaccaattatagagggtccccttgggcctcagaactttccacaagcgttgaggtctctatggcgatgctcccggctgccgaggcggaaacacaggtgatgaggtggcggcaagcacagtgcaaagagagagaagcagcttcggctgcagcaaaccacgcaggtccttcttgatcatctagaactgaccgctccgccttgccaggagtctgcagaaccacgtggctagcctgcctgaagttctcacctctccaggaaggcggggggcttctaatggctgcagctgcgctgggggctgggggctcccgctgggactccacttccgtggatgtctaagcttcacctttcttgcgcccgcaggggcatgactcaggtgaaagggagccattttctcagacccctggcctcatgcagcccttcagcatccccgtgcaaatcacacttcagggcagccggaggcgccaggggaggtaagtcacttccggaagctctgccggtagtgggaatctggctgaacaagcagttgcaagaagaggggacatctcgagcttggggagtgagtgtttcctttttctctgaggatgcccacttgccatgcctcccagggtacccagcaggcttccccagtagcactcacatcacggggctgcagcctttcctgttggctctatcctctaggttgccagttcttggagactggagaccttttaaactcacctgtagctccccagcactgatcatagcccagcccatagttggtgctcaagaatgatctgttggttgaatgaggaatgaagaaattagaccagcatttggtcccattggtgaagccctggagtcacagcccttggattcaaacccagctcaccacttaatcagccatatgactgggcaggtcccattggtgaagccctggagtcacagcccttggattcaaacccagctcaccacttaatcagccatatgactgggcaagtcacttaacttctctgtttgcctcatctccttatctgtgaaatgcagatagtaagagcccctgcgtgtctcagcacagtataccacatcctctctaaactatactgttataccgggtatacgctctacacctccctaaactctagccttttagctattgttattacccaccctactcttctccttaaagggggaagtgagagattattttcaggacccgttttctccccagggaaatgaaaagcaaagaagctgaaagcctctagtgacctgcaccccttttgcctgccctagggttggggcatggggcagtcaatgtgggaaccaaaatggagagaagagtgatgcctgagggtgttggacaaatgggatactaaaaccttttgtgccaggcgcggtggctcacacctgtaatcccagcactttgggaggccgaggtgagtggatcacctgaggtcaggagttcgagagcagcctggccaacatggtgaaaccccgtctctactaaaaatacaaaaattagctgggcatggtggtggcgcgcctgtaatcccagctactcaggaggctgaggctggagaattgcttgaacctgggaggaggaggttgcagtgagcagagattgtgccattgcactccagcctgggcgacaagagccaaactctgtctcaaacaaagaaaaacctgttgggaggggtacatttcagaaccaggttcactcactatctggaaatatgcatgatttattattggctctagtggagttgggagctgagaattggaaaacattaaagatggtaatggtcatcatgttactcacttccattatcacttaactgcactcaggggtatttgagagggagcatgaggagagtgagatacaggagtttggataagatgggggttcagggaagaaggaccagacagactacagaggaaagaaaggtgttcttctcgctagacatgaaccaatttttttgtgaacagacaattaaaatgaattactttatggcaaaagatcaaatgacaaacatgcaagcaaacaagttttagtgtcccatacgtcacacaattaactagatataaaggcagttgtgttgtcatcaaagcaaactactgtatcccattttcatttctgaaatgcacaactgaattattgctatttcctcttgctgaacttgatgaactatgttgacttaaccttatttgctgtttcaaaataagttgttaaataatgttgtaattaaaaaatagaagagtaaaaataattaccaagggtctcctctgtaaccaaaacgaattacagggaaatattaatatagtgtacttcatgtttagacattcatttcacatacacccgtgaaatgaatgtcagatgaattatgaagttttgatgagccacagcatgtttctaaggaatacttcttgcaaaagtttcagtgctggagggagaggctgctggcttctgtggggatcacacccaggtgagtgtgttcaggctgtttgtaattgagtttgcctcaggctaagccagaagctgcctgtagccatgtgtcgtacttgggctgggtgggaaagtcagtcctatctgcagtgaagagaatagaaggtggtggatattgccttgattatgaataaaacagctcaaggtaatacactggttagaagcggacatgtattactggcagaaaaaggaatcaatatgctttttatccatcttcctgactagaaagcaaactagatcatacttaagtgctttgaggtccttggatgaaagatgcttgtaaatacaacaaagttaattacaaggctgtttatggtctgagaaaactggaaacaacctaataatattcaataataaggaaatggttaaggaaatatggcatatctaattgatggaacattatgtagccaataggattacaaagaattgttaatgacatgggaaagtgcttattatgttaagtgaaaaagataagattaacaaaaaaatctcaaatcatatctaatgtgatctcattctgtttaaaacaatataggccaggtgcggtggattatgcctataatctcagcactttgggaggccgaggcaggtggatcacctgaggtcaagatttcgagactagcctggccaacatggtgaaaacccgtttctactaaaaacaaaaaaattagctgggcgtggtagccggcgcctataatcccagctacttgggaggctgaggcaggagaattgcttgaacccgggaagcagaggttgtagtgagctgagatcatgccactgcactgcagcctggatgacagagtgagactccatctcaaaaaaaaaaaaaaaaaaaaaaagaaaagaaaaagaaaaacaaaacagaaacaaaaaacaaaaaacaaaaaacctaatatagagcaggaggggattaacccagcaaaccaagtgcacaatcattacctttaagtgttgtgggtgagtttttgttctcttctgtacatttttttttgtatttttcaagtttcatacaatgagcatataaaaatatattactttcatgaatcatttgacatttgttgaggaattctttgtggctaagtttgtagtcaggtcttgagaggtgacaacgtgctggcagcccttgcagccctcgctcgctctccgcgcctcctcggccttggcgcccactctggccgcgcctgaggagcccctttctgggctggccaaggctagagccggctccctcagcttgcagggaggtggggagggagaggcgcgggcgggaacccgggctgtgcgcggagcttgcgggccagtccgagttccaggtgggcgtggactcagcgggccagcactccgagtggccgaccggcctacaagccacggacagtgaggggcttagcacctgggccagcagctgctgtgctcaatttctcacagggccttaggtgcctccccgcggggcagggcttgggacctgcagcccgccatacctgagcctccccccgcctccgtgggctcctgtgccgcccgagcctccctgatgagcgctgccccctgctccacggcacccagtcccatccaccactcaaggtctgaggagtgcgggcacacgcacaggactggcaggcagctccacctgtggccccggtgcgggatccactgggtgaagccagctgggctcctgagtctggtggggacttggagaacgtttatgtttagctaagagattgtaaatacaccaattggtactgtgtatctagctcaaggtttataaacacaccaatcagcaccctgtatctagctcagggtttgtgaatgcaccaatcgacactgtatctagctactctggtggggacttggaaaacgtttgtgtccacactctgtatctagctaatctagtggggatgtggagaacctttgtgtctagctcagggattgtaaacgcaccaatcagcaccctgtcaaaatgggccaattagctctctgtaaaatggaccaatcggctctctgtaaaatggaccaatcagcaggatgtgggtggggccagataagagaataaaagtaggctgccccagccagcagtggcaacctgctcaggtccctttccacgctgtggaggatttgttcctttgctctttgcaataaatcttggtactgctcgttctttgggtccacgctgcctttatgagctgtaacactcactgcgaaggtctgcagcttcactcctgaagccagggagaccacgaacccatcgggaggaatgaacaactccagaggcgccgccttaagagctataacactcactgcgaaggtccgcggcttcattcttgaagtcggtgagaccaagaacccaccaattccggacacagtttcataaatgttccatacatgcttgagaataatatatattctgtagaagtgagtattctatatttatcatttagataaaacttgttaattgctttacttaaatctattaccctactggtttgttcaggtcaagctatctaaattactgggggagtgtataaaaatacatcataatctgatagtggattttgtctatttcttcttgtagtttaatcagtgaaacaatgctatcaggtacctacaaattagcattgttacattttccgtgtgaattgagcctttaatcagtgttaaaacacttatttttaaatttctaataaagctttttaatttttaacattcatgtttgctttttgttacattttgcctataaatttcaccctttttgtatctgtgttttagatgtatcttttgtaaaaacatgcatatagatagttctccatttacagtgggattacatcctgacaaatccatcataagtggaaaatactgtaagttgaaaacttcagagtattagctatttaccctcatgattgtgtggcagactgggaactatggctggctgccactgcccagcatctcaagagagtagggtactgcatatcgctagcccaggaaataatgcaaattcaaaatttgaggtacagtttctactgaattcatattgctttcacaccatagtaatgtaaaaaaattgcaagtgtggggcggggcgggccatggggcgggcggaggcgcccgagccccgcttcccccgcgccattccacccccggccaggctcagcccgcggccacctacgccccgcccctgccggctgcgcccgagcccagtcccgcgagccgctccccggcgggctggctcttggccccggaagcgcgagcgttcacttcgcggcgagtggctccgtctccgcggacagagcgcgcgccccctggcccggcccgcgggggggggctccggcacggtccccgagcgtttcccgccgggtggagcgggccgagcccagcaggttgaccagccccgcggccacgcagagccgggagatctactgtttgagcgcggaagcgcagaggctggcggaggcccggctcgccgcaaaacgggaggcccgcgcggaggctcgtgagatccccatgaaggagctggagcggcagcagaaggaggtagaagagagaccagaaaaatattttactgagaaggggtctcgtaacatgctgggcccgtctgcagccacgctggcctttctgggtgggacttcctctcagagaggcagcggagacacctctatatccatcgacaccgaggcgtccatcagggaaatcaaggactctctagcagaagttgaagagaaatgtaagaaggctatgttttccaatgctcagttagacaatgaaaacacaaacttcatttaccaagttgacaccctgaaagatatgttgctggagattgaagaacagctggctgaatataggcggcagtacgaagagaaaaacaaataatttgaaagggaaaaacacgcccacagtatactgcagtttcagtttgctgaagtcaaggaggccctgaagcaaacagaggaaatgctcgagaaacatggaataatcctaaattcagaaatagttaccaatggagagacttccgacactctcagtaatgtttgataccaagatcctaccaagatgacgaaagaagagttaaatgccctcaagtcgacaggggatgggaccctaggaaagccagtgaggtggaggtgaagaatgaaatcgtggcgaatgtggggaaaagagaaatcttgcacaatactgagaaagaacaacacacagaggacacagtgaaggattgtgtggacatagaggtattcactgctggtgagaataccgaggaccagaaatcctctgaagacactgccccattcctaggaaccttagcaggtgctacctatgaggaacaggttcaaagccaaattcttgagagcgcttctctccctgaaaacacagcacaggttgagtcaaatgaggtcatgggtgcaccagatgacaggaccagaactccccttgagccatccaactgttggagtgacttagatggtgggagccacacagagaatgtgggagaggcagcggtgactcaggttggagagcaggcagacacagtggcctcatgtcctttagggcatagtgatgacacagtttatcatgatgacagatgtatggtagaggtcccccaacagttagagacaagcatagggcatagtttagagaaagaattcaccaaccaggaagcagctgagcccaaggaggttccagtgcagagtacagaagcaggtagggatcacaacgaagaagagggtgaagaaaaaggattaagggatgagaaaccaatcaagacagaagttcctggttctccagcaggaactgagagcaagggtcaggaggcgacaggtccaagtacagtagacactcaaagtgaaccctcagatatgaaagagccagatgaagaaaagaatgaccaacagggagaggcattggactcattgcagaagagaaagaacaagaaaaagaaaaagaagaggaaaaaatccccagtacccatagaaacccttaaagatgtttaaaaagagttaacttatcagaacacagatttaagtgaaattaaggaagaagagcaggtaaagtctactgacagaaagtcagcagtggaagcccaaaacgaggtgactgaaaatccaaaacagaaaattgcagcagaaagcagtgaaaatgttgattgtccagagaatcctaaaatgaagttggatggaaaacttgaccaagaaggcaatgatgtaaaaacagcagctgaggaggtactagctggtagagacacattagattttgaggatgtcacagttcaatcatcaggcccgagggctggtggtgaagaattagatgaaggtgttgcaaaagataatgctaaaatagctggtgccacttaaagcaatcctgaagaaccagagagcgaagatgcagatcactgcaccgtacccaaaaatgaaagtccctcacaggacattagtgatgcctgtgaagcagaaagtacagagaggtgtgggatgtcagaacatccaagtcagaccatcaggaaagctttagacagcaatagcctaaaaaaccatgacttgttggcaccaggaggagagccgggggacttcaatccagaaagcagagaagataccagaggagggaacgagaagggcaaaagcaaagaagaccgtaccatgtcctaagctgaggcaggcggcaggcgtggtgcacaggaagtctgagtgtgaggggctcttttctctccactgccaatgtaagtagaatgttctaaattcatagagatgcactgtatgccaatcaccaggtgatctactgctttaagttatagactgttacttgtagatttccatgtaatcattgaggttatcacccagattagaaagacatatttgttatcagtgtacattctaattgagagcatatatccagtagtatcaaacaataatgtctactgtttatagtccacttaataaaaatagaagcatttaccatttgccttaggctgataggaatgtgaatattcttgaccaaatatatcagcatctaattgaaatgaccaaatagcattcttagacttctgtattatgaatataattgatatttaaattaatgtcttgttcatatatgtgtactttcatatttgattttaaaatatacattataacctgtatggtattttatttaaaggagataaaccgccaaatagcaaataggtcactgaaaagatttgcaccttagaacaataatcattttaaggataacaagtaaaggtctgaaagcatgaggggctttatttgccttcacctcatataagtctttgattttgaaccaatgcttttggatctcattgttgatgatacttgaatttactttgtaggagattttaacttcatgctgatgatgtatcaaattcattttatacaaagtttaaagattttttctggaagtgatacatgtcaaattacatttcctactgcagtatttgagcagggacagtcattttttaaatgtttttggccgggtgtggtggctcacgcctgtaatctcagcacgttgggaggccaaggcgggtggatcacctgaggtcagaagttcaaggccagcctggccaacatggtgaaaccctgtctctacgaaaaatacaaaaaattggccaggcgtggtggtgggcgcctgtaatcccagccactccggaggctgaggcaggagaatcgcttgaacctgcgaggcggagattgcagtcagccaagatcaagccattgtactccagcctggacaacgagcgaaactctgtctaaaaaacacacacacacacacacacacacacaaaacaatgttttcatgcctgtaaccctagcacattgggaagccaagtttggaggatcgcttgaggccaggagttcaaggctgcagtgagctatgattgcaccactatactctagcctgggagacagagtgagaccctgtctctaaaaaaaagaaaaagtttttgaaccttaaaattacttctctttgtttgaatttctaatcatcattcaaaagaacagtaaaaaaaggttacttgttcttgtgcaaactacaaattagactggagtaggatattttaaagagctgaatcacttttggtattttgttataaatgttttcatttgttatgtcccagtatattcttattggaaaattcttgttttgatctgcctgaagaaaatatctgttttctatataaagaaacatttaaaaataattgtaaagttagatttaattgtaaaatataaaatcacaaaggaatgtaccttatgaatgttgacattttatgaaattatgtagattcatattactgttacaagatagaattgaatgcaaaaagaccaaatcctcattaaaatttgaggaaaacataagtgttattatgtaattgaaataaaaacattttatagttgtaaaaaaaattgcaagtggaaccatcttaagttgggggaccatctatatgtatttaaatctagtctgacaatctttatatttgaaaaacagtttttttagagatagggtctcacctatcactgaggctggagtgcagtggcacaatcaagcttattgcagcctcaaacacctgggctcaagcaatcctcctggctcagcctcctgagtagctaggactataggtgtgccactacaactggatggtgttttaatttttattgtgtagagacagggtcttgctatgttgcccaggctggtctcgaactcctgggttcaagtgattctcccacgttggtttcccaaagtgttgggactataggcatgagccaccacagcctgccctactctctatcttttaactggatcatttactccatttagttttattgtaattactgatatactgatgcaataacattattctatcatgttattttgtgctatttgtcctgactttttcatgagtttttccctcttctttattgccttttttggattgatttttttcccttccattctttgtttctctactagtttggaatttctggagtatcacctaaaagagtagagaaaggtgatatttctatttagcatgcatatttgaacttttcaacatgaaattaatgtctttatttttccccatggaaaaattatcactgttactccctctaaattatattctcttgtcatgtatttatcttttcttttaaccccacaagacataatagtaataagataattactattattattattttgtagaattaatatctttttttttctttgagatggagtctttctctgttgcccaggctggagtgcagtggtgtgatcttggcttactgcaacctctgcctcctgggtttaggtgattctcctgtttcagccttccgagtagctgggattacaggtgtgtgccaccacgtccagctaatttttgtattttttgtagagatggggtttcgccatgttgggcagtctggtctggaactcctgacgtcaggtgatctgcccacctgggcctcccaaagtgttgggattacaggcgtgagccactgtgtccagcctagagttaatatctttacttacctgtttacttctgtatttgctcttcatttctggttaaatatcagctgttatctggatttttttcgttctgccttgagtaaatacttgacccttttccttcagtgagggtctatcaaggacaaactcagttttgtgtttgaaatgtctttgtctgaaatgtctttattcattgagaggatttttttgtagacatagaattctgtggttactttttctcagtatattgataatattcttgccttatggcttctagtcttgttacagagaagtaagctctcagccaaattgtcattactttgaagttaatttgtctttttctttggcgactgttaagattttctcttgtctttgtagctgtgcaatatatctgtgatgtgtttaagtgtgggttcctctttattttattccatgggcttctggagtctgggaactgggtcttcaatcagttctagaatttgactatctttttaaaatattgcttctgacttatgtctcttttcttctggaattctgaatagatattatgttacactatttaatctatctttcatgtctctgaacctctctttaatactttccatttaaaaatctctctgtattatactctggctatttttgcagatccagctctgtgttcactaattatcttctcagatgtatctaattgagtgttatgtctgttcattaaatttttactttcaattattttatttttgatttctataaattcttttttaaatattagctctacattttagaattccttgatttctgacattttggatccttcctttatttctttaaatatgttacagatgtgtattttatattctatgcaaatatctgaaatttttcgtggatctcattttgtggtctattttttttgcactcaaacgccttgatttcctgtgtgttttatgacttttattttattttttattatgtatttatttattcatttttttttgagatagagtcttgctctgttgcccagactgaagtgcagtggcacgatctcagctcactgcaacatccaccttctgggttcaagtgattgtcccacctcagcctcccgagtagctgggattacaggtgcctgccactacacctggctaatttttgtatttttaatagagacagggcttagccatgttggccgggctcgtctcaaactcctgacctcaggtgatccacctgccttagcctctgaaagtgctgggattatagccatgaactacctcgcctggctgttgtgtgttttatgacttctaaatgagtgcatatactccttggacatttatatacgtcttctttttttattttattttatttgagacgagtcttgctctgtcgctaggctggagtgcagtggcgcaatcttggctcactgcaacctccgactccttgttcaaaggattctcctgccgcagcagctagaattacaggcacgtgccaccacgcccagctaattttttgtgtttttagtagagatagggtttctcaccatgtaggccaggatggtctcgatctcctgacttcatgattcgcccacctcgacctccaaaagtgctgggattacaggcgtgagccattgcgcctggcctatagaattcttttaaggcctaagttaaatgtgtgtgcctacagagaacatacgtatttaaatttgccaggttgcagagggcactacctacttaaacaacattacacgaaattcttagcttgagatttttgtattacccaggtagtatgaattcaggctgtaaactcccttgaggatccccttgaggattatctaaaatttcaggggagattgtagttttcctcttttagtcagtgttaaggtttgagaaaggcattttccttgccatttcctatggagtggtacggtgtgggtgaagggagaggggctatttccagttcaacctgacactgacttttaagtcctttggggtcccagctctagttggatggtatattaaactacatacctcggatagaccctggacattgtctcctgtccctgtgaccctataaactgtgaaacaaaagctcaagttcaccaagttccgcaaatgccctcaagttaaaacttgacttctgtccaccttcctttctgggttcctactttcacatagtttttgtcttttgagtatttccaattctttttaagctttggccagaagttttagttgtctgtagttagagtgggtgtctagtgtaccataccactgaaacagaagcctgttacttttacaataataaaaacatatctatgtgggctttttaaaaaaatttttaaatttatttatttacttttttttttgagatggagtctcactctgtcgcccaggctggagtgcagtggcatgatcttggctcactgcaacctctgccacccgggttcaagcgattttcctgcctcagcctcctgagaagctgtgattacaggcgcatgccaccgtgcctggctaaattttgtatttttaggagagacagggtttcaccatgttggtcaggctggtctcaaactcctgagctcaggtgatctgcccaccttggcctcccaaagtgctgggattacaagcatgagccactgcacctggccaaacctatctatgttttagttttttatgattattttatattatcccttccccacacatgaaataacttctttccaagtgacttatgaagttgtcaacttttcataaagccttggaacaaagtgggcagaaaaattataaataaaaagtcttgtctaggacagtacaggtctgtcttattcctaaattagatcagaatcgggttatgccggttttttataacataccattataattgggtatgttaaagaatgtattagagatgcattagaagagcgacctcattataagcctcttcacccatggattccaaggatatcttacaataaacctctgggataccttacgctacagagcaactaaagtccagctttagagcacaagggaaaatgcaggatattgggtcctggaaactacaaaaaccatcaaactctactttagggctaaaactttcttttaatcaatctgtcatatttattgataaattagaaaatgtggctgggtgcagtggctcacacctgtaatcctagcagtttgggaggccgaggtgggtggatcacgaggtcaggagatggagaccattctggctaacacagtgaaaccccgtctctactaaaaatacaaaaattagccgggcgtggtggtgggcgcctgtagtcccagctactcaggaggcggaggcaggagaatggcttgaacccgggagacggaggttgcagtgagccgagattgccccactgcactccagcctgggtgacagagggagactccatctcaaaaaaaaaaaaaaaaaagtacaggttcaaatttcattaaattttttttccatgccccttctctggtggtaggatgataggggatgagtaaaatatcaaagacaactaaaaattcctaaactagatcctcgggtcccaaagaagtgttaaccatggagtgccccaccttctgaggttggtgcttcctggcacaggctcttggaacattctggattgtctgacattccttttactcgctttagaacctaaagatgttgctgggggaaaagggagctagggagagggaaggggaaggatgtgggataaggcataaactatgcttgtgggaaaaaaacaaccagtaatttccttgatggggtttttgcttgactttaaaatgcagtaagcttttaggaagcttgatggagcctgtgtttctaccattagtgctgcatttgtttggcttaagatttcattaagcttcttaaaatggagatacttctggaactcaaatggctactgagcagggaatggcaaatcagtgacactgtaggaagtggagggattttggcaaactagagaacacaccttccacaggggcagccactgctctgctgggcccgctgttcatctgcagggacgtgcatcttgggattatttccaaagtcagaactcagcatttttatgagaaatgtcatgatttttaaggtcttaacaagttatcccacattaaaaaaataataataaaccaggccgggtgcagtggctcacgcctgtaatcccaacattttgggaggctgaggtgggtggatcatgaggtcaggcgttcgagaccattatggccaacatggtgaaacactgtctctacttaaaatacaaaaattagctgggcatggtggccggcgcctgtaatcccagctactagggaggctgaggcaggagaatcgcttgaacctgggaggcggaggaggttgcagtgaactgagatcgtacccagcctgggcaacagtgcgaggttccgtctcaaaaaaaaccaaaaaacacaaaaacaaaaaacgacagagaaggccaaacaaaacacatctgtgggctggatgccgccatgcccaccggtttgcgacctttgtgttggactcttctgttcaccagacaccctgccctgcgagaatgtatctcatcctttgctggagcaggtttgcaggcacagtggagagaggagagaagaaatgaagggacacttatgcagaaccatgagtggccagagaggaggagaaggagggtgagaggagcaaagaagccatgacaacttcataattctgagtggactgggcagtggccagaaattctggtggtggatatgctgcctttccaacaggtgaatatgaaagaataagtcaaaccctgttcaggacgctgttaattccaaatgtgaactttttgagtcattctttccatgtggaattcaaaggagaatgtaaacaaattttcaggagggacgtgcaatatccctgaaagataacaaagttcgtaacacttatttacatacaacattctctagttattgattaaacagatctctacagacttgcatgaggcaacatttcttaggcttgtttgctacaatatctttaaaaatacttgattacacatcactttagcttatttagatggacttttcaccaagctctgaactgggatttcattttgttgcattcatcctgctcacgagacacaggtaggcagcaaatgagattatccctccagtccccatggattggaaatgttcccccttctttatgagctcactgcagtatctccttctccctttccccaaaggacagcctttcctgcctcagggaagaagagagagacagactacagtgatggagacccactagatgtgcacaagaggctgccatccagtgctggagaggaccgagccgtgatgctggggtttgccatgatgggcttctcagtcctaatgttcttcttgctcggaacaaccattctaaagccttttatgctcaggtaagaaacagaggaaggaaatctagagtttccaattcagataagatccaggcacagcggtaaaggaggagaggctggctttggtttctcaatctgtgactctctgccatggtctagaaaaagaaaaatacaattcctcttccgctgtcagtgctgggggcagctgggtgtggaggaagaggtggcgagaaggtcaaagatatttccctgcactgcctcctcccatctcataatctatatatacctccaaacacgtaatccacaaattatagtttcttcatttaggtcataaatcctccccttaaaatgttggtattccaagagagagttaaaccttgtatgtgagcacaataaaagttttttgagtctgaattttttgagtttgacagtgtctacctggcacatagtagttgctcaatacatattagtttccttccttttaattaggttctttattcaatatatgtagtgatacagttgacctttgaacaacatgggtttgaacttcgggaatccacttataaatggattttcttctgtgcctgccacccctgagacagtaagatcaatccctcctctttctcctcctcctcagcctactcaacatgaagaggacagggagaggacctttatgatgatccacttccatttagtaaatagtaaacatgttttctcttccttatgattttttttcttcaatttttgttttaagttccggggtacatgtacagaatgtgcaggtttgttacaaaggtaaacgtgtgccatggtggtttgcagcacagatcaacccatcacctgggtattaagcccagcatgcattagctattcttcctgatgctctccctccccctactccactgagaggccccagtgtgtgttgctcccctctaggtgtccatgtgttctcatcattcagctcccacttttaagtgagaacattcagtgtttggttctctgtttctgcattagtttgctgaggataatggcttccagcttcatttcatctatgtccccgcaaatgacatgatcttgttcttccttatgattttctttccttttcttttttctgagacggagtcttgctctgtcgccaggctggagtgcagtggcacgatcttggctcactgcaacctctgcctcccgaattcaagcagttctcctgcctcagcctcctgagtagctgggattacaggcgcctgccaccatgcccactaatttttgtatttttagtagagatggggtttcaccatgttggccaggctggtcttgaactcctgacctttgaactcctgaccctgtgatctgcccgccttggcctcccaaagtgctgggattacaggcgtgagccaccatgcctggccatgattttcttaataacattttcttttctctagcttatttatttatttttttaagagaaggggttgggccaggcgcggtggctcacgcctgtaatcccagcactttgggaggccgagatgggtggatcacgaggtcaggagatcgagaccatcctggctaacatgctgaaaccccgtctctactaaaaatacaaaaaaattagctgggcacggtggcgggcacctgtagtcccagctactcaggaggctgaggcaggagaatggtgtgaacccaggaggtggagcttgcagtgagccgagattgcgccattgcactccagcctgggtgactgagcgagactctgtctcaaaaaaaaaaaaaaaaaaaaaaagagacggggtcttgctctgtgacactggagtgcagtggtgtgatcacagctcattgcagtcttgaactcctgggctcaagcagtcctcccacctcagcttcctgagtcagtgggattacaggcataagctactgtgcctggctattctagcttattttattgtaagaattcagtatataatacatataaacatacaaaatatgtcttaatcaactgtttattggtaaggcttccagtcaacagtaggctattagtagttaagttttttttttttttttttgaagcagggtgtcactctgtcacccaggctgaagtgcagtggttcaatcatggctcactgcagcttcgacctcctgggctcaggcgatcctcctgcctcagcctcccaagtagctgggaccacaggtgtgtgccaccatacttggctaatttttaaattgttggtagagatgggatccccctatgttgcccaggctggtcgtgaactcctaagctcaagtcatccttctaccttggtctcccaaagtgctgggattacaggcatgagccaccatgcctgaccagtagttaaatttttgaggagtcaaaagttatatgcaaattttcgactgcaggtttgggggtgtggtgttggcatccctaacccctgaattgttcaagggtcaactttagttgctacttattaagtatatgctgtatgctcaatacatactatattttatcctacttaaacctacagcagcccatgatggaagtgttattttagttttcattttataaatgagaaagctgaggctcagaaaggccaagtaacttgcccaagttcacatagccggtaaataatatgcctgtcattctgacgtaagacttgcttcttaatacctaaatgatgtttgctgaaatgaggggaatgggggttctgattagggaaggggaggggctatttaattttgtaggatggcccacacaacatgtggtactctggggccaggtcagttcagggtaaaaggaaggcaaggggtgctttttggacattgctttatttttggacagcccttttttttttggacagccaaagagcaacaggaggcccagggggagtggaagaggaaggcctaggagttcagtgagggaaaggggtcataaaaaaggaagagagtggcctacttctgttatttatgattcatctcctgccattcctaggttaccattgttaggggaaagatgtagaagtcaccatttactatagcacacagtgccactgttggaagaattccagaagaagcttctctctggtattagcaccaggagaagctgtgctgctcctgatcaaccagcttactttcatttaatggacgccaggagtcttgtatctggttgtgtttccttcattgctttggctgctaggaaacccagaggcaactttgtagctcggttctcataactacaagggatcttatggtctgcagattacatgtttgtacctcacttttttttaaacttttttttttaagaagtgggatctcactatgttgtccaggctagtctcaaactcctaggctcaagcgattctcttgtcttggctatacctcacttctgacttcattctgtctttttttcctctttttcatttactccttttcctctcatcatatatatatatatatgcattacatgtctatgtaatttgattgaatgtttgaatgtatgggaatgttgagtaaatgtccgtgtgtgtgcacaggcagatcatttttaaaaatgtgacatatttgggagatggcttgagggtaccttctgcaagctggtaccaaactgttgctcataattaagttttacttttctaagcattcctggaaattatttggttaaattaattaagtgaatgcctaagagtggtgagttctcatctctctcttgccttacatcttgtgccatctcagcgagtagttttgctccataaagggtggtagttaagaagccctgcgtagttcatacctatccccactccctcaacctctcatccctcaatcagatgatggattttgtcacagctgtagccaaatacacacccgatgctattgaaggaacatgcttattttttagccctaaatacatccctggttccacctgaaaggctctgaccggggccttgtgcatgggacagaatgtcccactctattttgaagctttctaaaatctttaaggaaaattcaaatcatactcagttcagtactcggtcaagatttagagagcttaagttctaacagataaaaaagtaactctaaattattatttcaagatgcctagttaaaataaacatataaattaatttagtgaaaaagcaggccagtgctaagtctatgaaataatcttattttccgcttttgtattttcacttgcccagtattttttctttggccatatctagtgatttttataccccagaccttgaggccatgttaaactgcacagtgtgtctcaagtttgttatattaataagggaaaatgattattttggtcaaagagattagtgagagtgcattatgaacctagctaaatattgcttttcgaacattcttacttttttttttttgggacagagtcggcctctgttgccctggctggagtgcagtggcacaatcttggctcactgcaacttctgcctcccgggtttaagcaattctcctgcctcagcctcctatatagctgggattacaggtgccggccaccatgcccagctaatttttgtattttcagtgaagacgtggtttcgccatgttggccaggctggtctcaaactcctggcctcaagtgatctgcccgcctcggcctcccaaagtgctgggattataggcatgagccactgcgcctggccctgcttttcaaacattctgactttagagcttgctaatctaacttattatgtttaaggaaccggtaagtaaacacaggagtccacctatatgtgagtgtgagggtatatgaagagctggtctcatatattcaatcaaagcgtttcctcttcccctcgtttactttgtcttggacttgttttcaaattatttcatacatatacacatgtcctttctcttcaacatcaccacaaggtcttcatggcaggaattttgtctgtcccttctgggatgttttgcatatgtattacatgtgaaaattctcaagaaattttccaagtaaaatttaattcagaccaggagccgtggctcacgcctgtaatcccagcactttgggaggccaaggtgggaggatgacgaggtcaggagttcaaggccagccaggccaatgcggtgaaaccccatctctactaaaaatacaaaaaattagctgggcgtgatggtgcgcacctgtaatcccagctactcaggaggctgaggcaggcgaatcgcttgaaaccagaaggcggaggttgcagtgagccgagattgcaccactccagcctgggcaacaagagcgaaactccatccccccccccaaaaaaattaattcagtacagcacttattaaacatctactcagtgagaagcattctgtttcatgctttgaggaacatacggatgaattggatatagctcttgacctctaggaacttaattgatagcaaaaatatggtaagtattctactgagagattccatgtatgatttgcacttgcctctttggaagtagtgggtatgtggaattgtaccttgttgccagaaattgtgtaggctatgttgaccaacggccctgtagttagactccttccaaaggcacattttcatcaggacaagccagtgcatcttgagatgatgagcatgagaggtgatgagattcctgagtgagggtgaatcttggtggttacagcattatggtaatgctaacactgtttacactgtggttctccaaatacctgcatcttaaatactattaaagattcctgggcctcaagtcagacctaccaaatcagaatttctggaatgaagccctggaatccacagtttaacaaattcttcattctaacaaactcacagatgattctgaagtttgaaaaccactggtgtagtgagaaatatgccagtagggtcatcagaagtgaggtggaacttggcactttgtggctctttaccccaactctgtgtcttccatgctccctgtttattatgtgcctgctgtaaggatcctgcaccacctcaaaatacacaaatgccttgtacacaaatgccttgggcattgtgtacataagctcataaccacaccaaaatgtagaatgaaattttctaataagtgaagaacattttttttttttcaaattgaagcattcagagagaagaatcgacctgcactgccatccacacagatatcatggacgactggctggactgtgccttcacctgtggtgtgcactgccacggtcaggggaagtacccgtgtcttcaggtgtttgtgaacctcagccatccaggtcagaaagctctcctacattataatgaagaggctgtccagataaatcccaaggtattgtaaagtttaaagagttcttatgacagcaacccttccctgccagactgtccctagcagggtacataaataacccagggctgtctttagggataaatctatttttttggagtgaacatttttatagtgatcaaatcaggataaatgaagctttcttcttggtggagaaatggggtatatagaaaggagagaaattattccaatttcacaacttggtgtctggaatttataggctgagccaatgagtagtcatttgtggggagtctttcttttggagattccactccgcgccatatgacatatgctacagtgtactcacagtctcccttgaatcaagtaatttttcttatcaaataaatgtaaagattatttttattttagtaagttacacaatgggttcatatgatttaacgaattatagaaatgatccctgaaatagtctttcatatgatttaaaatttatatttatacctaactataaaagttgagttgtgttagattagttgacatgttacattttattgtctttaagcatcaatttcaatccgatgacttttgttttctgtttgggatgcaatgatttttaagatttcaaacagtttttggcctttagcacagtacctcaagtacctaatggatatggtaataaacctcaagcttttttgaaaaaagtcaccagctgacagagctcccttctccactggttctgtctcccaggaaccaaagtccaggtggggctccctctctgtgagtctagagcaaaagcctcaacgtgcttttcttcagggtgatattttgctacaggagatcaagacagagacaacagaggcattactaagcgttgaaagctcatagtgaggcccaatacatttttgttcaatggacaaacggattcatactgtccaagagtccaagaacctgcatgtagggaggagtcatattccttatgaagttggtcactgactctcctgcaatgtcatataactaagaattctcttccacatccttgcttaatgactggaaatggccatttcactgtggccctccaatcaaccctttcccatgagctatgtaatattttaccaccttctaagattgaaactgcccactaataacttcagcctgaagctatttcataattaaaaactgttaagtatttggtattggtgacagtgcctttatctttttccctcttccatattcctagtgcttttacacacctaagtgccaccaagatagaaatgatttgctcaacagtgctctggacataaaagaattcttcgatcacaaaaatggaacccccttttcatgcttctacagtccagccagccaatctgaagatgtcattcttataaaaaagtatgaccaaatggctatcttccactgtttattttggccttcactgactctgctaggtggtgccctgattgttggcatggtgagattaacacaacacctgtccttactgtgtgaaaaatatagcactgtagtcagagatgaggtaggtggaaaagtaccttatatagaacagcatcagttcaaactgtgcattatgaggaggagcaaaggaagagcagagaaatcttaagacggtggccaaattaaagtgctggccttcagatgtctgtgatttctgcaactgaggacctaattatgcctgtctgcaaactaataatgtaaaaggtaataattaaagtatcatattttcatgtgggaaaaaatttaaaagcctcattttgtattctatttatttctataaatacatacaaattcaccatcttttctaatcccaatctctttccaaatgagctaaggaagcactgttttttttcctgtatagcaaaatgagttcaagatattctttgcctaatttcagctctagctagaaccagtcaatatggaaataaacaatgagggtatctaatctactgaacactgaaccatcagcctaactctatgcaatatagtcatactaaaatatttctcataaaaaagttcttaacagtttgttcactatacaaagacaaaaatctggtagaaaacttaagaaaacatggagctaacatatttattatagttttttttttttttcctttttgagatggagttttgctcgtcgcccaggctggagcacagtggcacagtcttggctcactgtgacctctgcctcctgggttcaagcaattctcttgcttcagcttcctaagtagctgggattacaggtgtgcaccaccacgcccagctaatttttgtatttttagtgtagacagggtttcaccatgttggtcaggctggtcttgagctcctgacctcaggtgatttgcccgccttggcctcccaaagtgctgggaatacaggcatgagccactgcgcttggctttagtttgttctttaccagtctagacagcagaggaaagctgctgcctagaaaattcactaagtttagagttactagtatttagccttgtcatgtaccatgtaatttttctttcagtaacatttttctagttaattaagcttttcataagctcatttcactttgtgcactttctggtgggaaaaatgggccagaaatatgaagaagctatactggattttaacattcatctcagatgatccacatcgtattaggctggtgcaaaagtaattccagtttttgctgttaacttttaatggcgaaaaaccgcaattatttttgcatcaacctaatagaaaagaagtcccacatggatagtcaacaattgtctgtactttaattaatgaatcaaccatggttattaaatgatgtcataaggctctcaacaaatgctttccaggttgattaagccgaatctatgagtggaaaagagattttggtctgattttccaaagtgcctcaaagtatctttaaaattttattatactcaaaaatcttaaattatggacagtggaatgagacatttgaagctacttttgtatgtagatgtaatcaaacaaaaaactgattctaagtcagtttaatcccttttagcaattaatttcgacacatattactaaattagctgaatacagcaatattgacttgatgagtaatgaataatcttggtgttttcctttctagtgtgcaatggtggaaagaacatgtgtctcagagtaggatttatttgactttgtaggccataattacaactttgggcaaataagctaacctgtgtaaacctttcttttctcatctataaaatggggataacccgttctttcacgcagttgttattttatggaataagcaaagtagggcaggtgaaactttagcttagcttctagcatctagtagcagtgctcaaaaatgttagatcatttatttaaaaatctgctaggttataacattcagtgagccttggtacttttcactggacagctggtatagaggctagggatagggagctgcagttcattttccatgcccctacctgagttctcttggctaaatgtgatacgcatttaaggcccagaacctgctgtttaaaaggttgtggtaaactattttgtataccaaagacttctctgtaataaagtatgtaagtacacatgaacatttgatgtgcacgcacattttaaatcatctgcacattgagattctacacttttctcaagggcacatctctattccgtttttgtaaatttgacttctacctaacaatatgcagttgctgggattttttttttccctaacaaattcaaaactgctaatttaaaatataaagcgtgtgtttcaattaccacagttttccatttagataggagctacctgattcattccagcaaagagagagattatccctggagaacaaagtcaattcaaaattatttaaaccatttggcaaataaataaaatttaagtaattatttgcttaattgctcagaaatactaagttgttaatgcctatgtgcattaatggtcaaagaaaagcccacacttaccttttgcaatgtttatgagaactgaaagcaaaaccagtttgcttctagcctaacttcatttctaggttctgatcttcaaacgacttggaaaaaagtctacttacctattgcatatacatacatacattcatacatatatgtatatacatatatttcttaaaatacaagcatataattctttatgcttaaaggaagtaaatatttaaacatacattcctttaatattcatcactttactggggtagaaaaattggcttttaaggtataatagtttcagattttcaatcaagtattcttagtcattactgaaaagaactcaaattcagctaaattttgattattagcaacaccggcttgcttttcaaaaggaatggcaaaagagaattatcacagttttttgcttatgtagtacactaaggattgtttggacacaaaaagtaatttttctttttttttttaataaacagcgtgatgttacagactgcagagttaaagaaaagcagacattgacagtttctgatgagcataaacagtaagtgcagtcacaggccaaacttcttgctaggaacagcaagactgggaagaggtcttaaatttagtgatactgttattattctatattctcaatatagtaacacatgcatcttgctgtgtcaaatgctttctgggccatcattaaaaggacattaaaaacgtttttcttctaatgaatgcagtataccacaggacttcaattcactgaatgacaaaatatagagaaataaacttgctacaattaatggggccaaaagggtggttcgaatttcttgataaagcttccaggtgaacatctgacgtgttagtagtcttcttttggtagtgccacattccccaaggtattaaaatgttatgctccaaaagggtatattcttttagattttattcaacccaattaggtctgaggactgaatcacactgaaaccattaacttcatttgaaactcaaaacatttttgaaatcagatgaaggccaagttctccaacctctcttaggaacataagttaaattgaacaagggacttttaaaaatgaaataaaaacaaaattaaataaaaatgaaataaatagataatgattttggaaattcatactagaattaagtttagtctaattatattttaatatgaaacaatgaaggttttctgcctccttgccaacctagaaaaattgacaaaaataagaatacctaaaagtatacatggttcttagcataaccacaaaattattatagtgacagattaaataaggttgcagatagattcatagactttaactggctaaaaaaatacatttaaaaaccttttctgtacttacctacatgaggaatggagtatactgttggtagaaaaatcatttacctaactactgtatacgcacaagggactaatttttttcctccactaaaactcttatatgtagttgtgtacaaattaagtcagaaaatttcctcatggctcacacctgtcactttatgctaactagcaaggctggaatattaacatacctaaaatcaagcagaagaaatggcactgcactaataaaaaggaggtgcaaaaccttaagtggaataggtgcatgaagtttatttaaagactaacatcccaacttgggaaactcctaataaattctaaactcttccgaattttagaaccttgatatttctttacaccttttataaaagatgcctcttgactagggctaagcaagcagtgtgtacacaaacagaattgtgtgcaagtatacacacaccaaatgcactaataatgaagaagagagaacaaaatgaatttcaaatgccgaattcgggaacctcctcaaactattgcctttttcaaatggctggaccaacgattaaacttcagccaagtttttttcttaaggtcttccatatcattaaaaacaaggcatgccaactctgactttataaatctaaaattcagtgatctgcacagtttctgagcttgaagtattgaattgtgactcatctatttttttttcccattttccttctgaggtagagttaccaatccaattttatcaggaccacagatattttgagctaaaccccatgatcttttcatacagtaaaaataatttttatgaaaaaagaaagcaggcttcccaggccatggcacatagatatatttacaatttttaatgtaataattaaaaatggtattgtttatattttaaaaaacagcccagctgtattattctgtcaccaagaattattaattgaggatgctgtcaatgctgaattttatagttcagccttcacaatcccatccatgatgaagagttgattctcttacggtatacaatatactctcacaactttcagccttctcttaaagacatgccccaaatgagcaggatggatataaagaatgtaattcattcaaacaactcctccctgttctgccccctcccctcacattcccctcttctcaaaaacatctgaagtatgaaagttgtctttaaatagtaaaagcaccacaatctattaacaccacatattatctttaaacttaaatattttagtgatgtcttggacatcaaaataatttcttaaggtggactcttgagtatgtgggtccagcccaggtctgcagtttgtgcagacatagaaaaaagaggaactttaaatattcagaaaaagttaacaggctagctttaaaatactgctggaaattaaatttcttcagagttggcaagcatgggctattgatcaaagtatgaattaaacggatttacatcattaagaaaaaacaaatccgtgttattgtgctgtgaaatttccatgatgcctttcaaataggctgctcacaatttttttataattccaaatcactcgatttttgatggaaaaaagaatacagatggactgtgttttacctatgtgaaagtcaccaatccatttaaaataaaatccaagagggcatatacagtctaatcaagtcatcattttcctgattaataagaactacactttacacaaaatactttatcagcagctgttttcatcaaaaaatcaagtcagtttcacagttgaaaaagttacacattaaaatattttacaattcattatatattcaccaggttcccattttctaatgggcttttaatataaagcagaatagaagggaaaatctcaaagttgattactttgacactaagttttacataggacactaagaaccacaaaaagcttaggttctattgtaaaatagcaaccaaattccattcttcttttaaaaatccaattagaaacatcttttttaaaaaaacaaattccacaataagagtaacagatttcaaattaacagtagtctaaaaatcttcaaaataaatggttttgtatagctgagaatatggtagaaagtgaaagcataattttccaacagtcatttcttactacagtgtgtttaaaattatttttattacttttagactttttctcaaaataattattcaaggaaatatttcttaagtggcccaataaaactgtagagccaatagtcagttacaccatattcaaggacaaggatagtcagctatagataggaactgtctaaaccacgagaactgatctctgatactgaagtacccagaagtggctatattatcactgacttgaaacagatcttagtcacccatgtagcatttaattcaatgtttggttctttgcctcatttctttcttaggtcacaatctatagtctttatagaatttgtctacatttcttctaatagaattaatttggttgtagtaacttttgaaaataaatgtaaatggtgaaatcggccatgtggtttgtgcattttaatggtggagaggtcctgggagaaggaggggagacaactatctggactgatagataaaaatgcaaaagtggtataaattttgtgcaaggaggctcacagcatttttggcactcgggtaaaacacagttctctgttaaatcttcagtttctaccatcaaactttcagatttgtaccattttactgagttttcctataatttaaccctgatattgaaaaggctgggatgttagtatgtatcaactgcctatatctaaacaacacaaaatgttaataagttttaataagttatgaaatcttctacaactgcaaaataatctttctggtttcctgcttaaaacagagtttaaattctgcttaactatcgcaagacagtttgcagaagtaagttcccttaatcttcaaatttacttttcttgttggcaatattatatacatgctttagtgaaatacctaaatttccaataattatgccctttaagggatctaaaatagccagatattaagagtattggtattagagtcccttgttcactactcaagacttcaactataggtaacagatttcataaatgaatatttttaaagtgatgctgttttactagagtatacaatgttcactctttataaagttgttttccaataatatgcctaatctaaaaaactgtcaataattattgcacttttttgatgtggcacctggacatctgctaaagctaatttcctaggacattaatcattcatttcaaatacagagtaaaatatcagattctagaatgacgactagcagtagcctctacatcttgggttaatgtttttcaaaatgtttaagaatgtgtcctgtgctcaaatagtatttaataaagttggagagtgagctctgactacttgggaatgagacatatcttaaaatggtttaatgttctactttggagatatggataaatagtttaaaaaggtaaaaagttcatggtttctattcccccatattttaaagtattattcatgagtatacttcagtaaaggggtttaaggaatcaggaagatagtctaaattgtgttaattctggtaactaatttcatatgattgagacattctcaattataaaagagaatggaagacgggagattcacataagaaataaaaggaaagaagatgaagtttttatgttttccttaagtagttatacactggttattggtataaatgggatagtgcctgagcctcatctatagatcaagaagaaagctgaccatgctgctatgaacaataaaaaatttggggtgcaaaacaatgcatgactatgggacagatcatgtaaataaagaatatatattaatgatagtttctataatataaatagcctttaataaaaaaaataatctttttaataacattaatacttctattttctggaaaacatgcatgaaaaatgtattcagttcaattgcagaaggagaaaaaaaatcaacttaaggtgaatactgtacaattctggaataagaactattcctgctcattctttttctatgatttttttttttttttactttgtgggagcccagaatttccctgggaaataagaataagatcctttaaatactgtccagaagaaaaaaaaaaataccaccttataacaggtctcatttgtgactgcttccaaaactgcagataaaacctcaaatcatcaaaaggtttgatttattaaaaagaaaaagtctctggtgaaatctcaagagtcccttccaccccaagcatttttcttcattaaacaagcagtcaaaaacccacttcaaactataaattgaacagcaatggaaaaataagaaattttcattcttttccaatcaatgtaatttaacataaactccagtttacttacacctaatgcaataacagcctttgttgtgtccacatttcaaaacatagaacatttgcaagacaaaaaaaaccatcactttttccttctccatcatttctatatattttggggatttttgttttgttttgttttttaaaaaaagatacaaacaatcttcaaagtttacctttttggacttaaggcataacatgaaattgcgcattattctaaagcttaattttgaaatgaactagtttaagtgctatcaaaccctgtttgcgtttacattatttaaattatatagtattttatttctgttcttgctgtaaattctaatgctgttcatggattgtgcaattcctatgcaatcggtctttgcctgctgagagttattaacagtgcagtgtggaatccagagtgagctttcattttctcagttatcttttcagttcaatgcatgctgtttaattgtgtggaagatccaatccatttttgttgtccagccaccatgatgtgcatcattcatttgtttcatgaaatactccaaagcctcttgctcagttttatctaaggctagggtctttcgaatgtatgcaatgtcatcaaaagattgtagttctggcattccagagccaagcatcattgagaaaagatttatgaagagattggcatgctgtcgaatagctagataagccttgtaacacatctcctgaaacctataagtaataagaacagtttggtcagtttggagcaaatgatgttaataccttcaggtctttgctcaaatgtcacaaaattagagaggctttcgtagacaaagctataaaaaaatagcattcctctctcacttctcttaccaacatcttttgattccctttaccccactagaatgtaaacttcaagagaataaggactttttaaaaactgctttattaccagcacctacaacaatgcctggcatgtcaggagtttaataagtattaaatgtatgaattggttcatactaaatccttttgtgcttaagctagagtcaggactgtgttgtagacaaagcagaattttatagaagattgtaaaaagtactttaaagtctgatatagtctaatgagataccataaggtggtaaaaaagttatgaataaacaaggtgattatggttgactgactttcctcaaagtgtatgaccaaaaaatgtcgtattaagcactatacattatttgtcaatatagaggtggagtccaactatttaaagctcagtaaataaaaacctttaatgtgttatgaagtttaaggattactttctttttaggccttaattagctcaacaaattaaattgtattccctttccattttccttcacagcatcacacaaataaatacaaaaaaaaaaaattaaaatagtttttcactcaacaaactaggcatagaagggacttacctcaaaataataaaagtcatgtgacaaacccacggccaatatcatactgaatggggaaaagctgaaagcactccccctgagaactagaacaagacaaggaagcccacattggcatccaaattggaaaagaggaagtcaaactatagctgtttaccaatgacataatcatatacctagaaaacccaagagttctccaaaaaattcctagatttcagccaggtgtggtggctcatttctataatcccagcactttgggaagccgaggcaggaggatcacccgagattgggagttcaagaccagcctggccaacaaagtgaaaccccatctctactaaaaaatataaaaattagctgagcatggtggtgcatgcctgtaatcccagctacttggaaagctgaggcaggagaattgcttaaacccaggaggtggaggttgcagtgagctgagatcgcaccactacgctctagcctgggggacagagcaagactctgtcttaaaaaagataaaaaaaaagactcctagatttgataaatgaattcagtaaagtctcaggttacaaaatcagtgtacacaaatcagcagcattgctatacaccaacaacaaccaagctgagaatcaaattaagaacacaagcccttttagcttcaaaaaaatacctaggaatgtacttaaccaagggggtgaaagatcttttcaaggaaaactacaaaacactgtcaccatcatttttcacagaattagaaaaaaaaatcctaaaattcatataaaaccgaccaaaaagagtctgaatagccaaagcaagactaagcaaaaagaacaaatctggaggcatcacattactggacttcaaattataccaggaaactataattaccaaaacagcagatacacacaaaagcagacacacagaccaatggaacagaatggagaacctagaaataaagccaaaaacttacaacgaactgatcttagacatataaaaacataaattggagaaaggacattctgtttaataaatggtggtgggaaaactagctagccacatgtaaaagaatgaaactggatccctgtctctcaccttatacaaaaatcaactcaagatggatcgaagacttaaatctaagacctgaaaccataaaaattctagaagataacttaggaaaaactcttttaaacactggcctaggcaaataataaatgactaagaccccaaaagcaaatgcgacaaaaacaaacaaaataaatgggacctaattaaactaaaaagcctctgcataacaaaagaaagaatcatcaaagttaacagacaacccgtagaatgggagaaaatattcccaaactatgcatctgacaaaggactaatatccagaatctataaggaactcaaatcagcaagaaacaaagaatcccatcaaaaagtgggttaaagcaggatgcagtggctcaagcctgtaatcccagcacttagggaggctgaggcgggtggatcacctgaggtcaggaattcaagaccagcctgaccaacatggtgaaaccccgtctctactaaaaattcaaaaattagccgtgtgtggtggcatgtgcctgtagtcccagctacttgggaggctgaggcaggagaattgctttgaacccaggaggtggaggttgcggtgagctgagatcatgccattgtactccagcctgggcaacaagagtgagactccatctcaaaaaaaaaaaaaaaaaaaaaaaaaaaagtgggctaaggacatgaatagacaattctcaaaagaagatatataaatggtcaacaaacatgaaaaaatgctcaacatcattaatcatcagggaaatgcaaattaaaaccacaatgagataccaccttactcctgcaagaatggccataattaaaaagtcaaaaaacaacagatgttgacatggatgtggtgaaatgagaatgcttatacactcctggtgggaatgtaaattagtacagcctctatggaaaacagtatggagatttcttaaagaactaaaagtagatctaccatttggtccaggaatccctctacccagaggaaaagaagtcattatatcaaaaaggcatctgcatgcatatcgtatgtttactgcagcacaattcacaattgcaaagatatgaaaccaacgttaagtacccactgaccaatgagtggataaagaaagtgtacatatacaccacagaatactactccaccacagaaaagaatgaaataatgtcttttgcagcaactgggatggagctggaggccaggaatggaaaacctgaaaatacagtatgttctcacttgtaagtgggagctaagctataggtacacaaaggcatacagagtgatataatggactacagagactcagatgggagacggtgggaagaacagtgagggataaaaaagtatatactgggggcaaagcacactacttgggttacaggtgcgctaaaatctcagactttaccactatttaattcatccatgtaatcaaaaaccacgtgtaccccaaaagctattgaaataagatagaataaaaaacaaacaaaaaatagtttttgctgaagtggtaaaagaacttctattatttcattttatttattttgatacagggtctcactctgttgcccaggttggagtacagtggcgtgataatggctcactgcaacctcaacctcctgggctcaagtgatcctcccatctcagcctcctgagtagctgggactacagtgcatgccaccacgcctggctactttttaaatttttttgtagacatgaattctctctatgttacccaggctggtttcaattcctgagctcaagtgatcctccagcctcggcctcccaaagagttgggattacaggcatgaaccaccacacccagccaacatttattattttgaaattgcttgaaaaatattgattgtttctaatagagcagccagaactctttattttgtgtttttaattgctcgagctcacctctcaaattctcttgtctttgtgcattcttgggctcctttactaatcactattaagaaatcctgtgtcaaaacaaatggcacacgttctcgtttataaccaaattttttcttcttgtgatccaaaaagtgtccaaaatctatatgaaacagctttcaaaaataagaaattatgttatagtttgatatatgcagatacaaaatgtcttgaataaattaagaacaccaaaacattttaaacagagaaaaccattacttgtccatcgtctttcaccatgatgttactattgtgacgatctccaattcccaaaatgaaggtagctacacagtatccagcacatgaacgtgtaaacaggtcaatggctgcatcatatctacaaagaataaacacctcatgagtagtatggaaatatagtgattcaggccaacttgagaaaagaaaacagggtgcaagtttccatttaaacaatgaaaacaatcactgacaacgaataaggaaattatgtccaaagattttgagattgtgaagttttcatgggtttctaaggaaatttccagatgttccctgaccaaagcataattcttcatgtgaaaaaatacttagcatgtcattaaaattatttttttctaatcattttaacaatgaattagaaataaaattttgaatgtgcaatattcatttgttttaaaaagaataagcaataacaatacattttagataatacataagatgaatgtttaagattttaccaaattaaaagtaattataatcatttaaatccattaacatcaaatatttcaaaggttgagcatatttttttccatagaaagtacaattgttttctctgttctaactcagaggaatacacaaacaccgacagactcatctaacaaaaacttagattaacataggaagaaagaataatacaactcacatttctcctttgttcttgtctttgagccactgatgtagtgtgtggctgttgaactgcagtgcacctttcaagccgcctttgcactgaatttgcataatagtgtgagaatttcgcaccacctcaataagtcccacacagtcaccgattgacagacaaccataaggtaacattctgaaagaggagtaacacgtttacaattaaatgatggaattttaaaatagcaaatgttttaacaggctaaaacatgagtattttattagtaaatttgtcatgcatgacctttactgcctttccccaattttaattttcttttttatggtgtgataaacatactcctggaataatcctcaaaattacctgtcatcatttattataaccttcaactgagaaagcactgtatttttatcagaaaagaattaagaaaattattgtggcaattaaaattttacaaacatttatgattttaaaaatatgtgttaatttaaagatgtttaattgacatcgaaataaaactgtagggcagaagttctcaattttggtctcaggactcctttacacttgtagaaattactgaggactccaaagagcttttagttatgtgaattacatctaatgatattagaaattgaaatagggaaaataaaaattttaaatatttactaattcatttaaaagcaacaaactatgacatgttaatataagtaacatatttcatgaaacaaaaaatgcatttaaaaaatttagtgagaagagtgaaattctttcacatttaaaaaaatttttaaatgtctggcttcatagtacccagctggattctcatatatgcttttgtatgcaatctaatgcaatgttttaattaaagtataaaaagaaaatctggcctcacaaagataggtaggtagaaaaagaaggagtattataatagacttttcagataattgtgatatttttctttggtactattctaaaacctgacaagataagtttcttaagttgcaaaatgtaatctaaaactgtatcaataaacttttcatactcagttacattaaaatcaatttgtctttcttgccttttaatggatctcttacccatacatgattttatagtatcctgcatggtcatttgtagatgttccaaatgttgatacttttcattataccatactaaaaaaccacaattgttaatattaccaagaatctcatcagaaagatgttaagtttagggactctattaggttcagcggcagataatgaaaattagaattttcaaaattctaattttgaatttctaatgaaatttttgttgcaagtttgaattttatcattggcaacaaatactgtcacagttgttttcttcaaagagacaggcacatattgttcattttcaagaaaatgtctgccaaatatccatgtctgaataaccatagcttgcctactagttatttaagtaaaaatcgtgttccataaaaacagcagctagttcagctcacaactcaaataatcccacaaatgtttccctttgatacaaccataatacttgggatgtggcacaaatgctttttagggtacctctcatttattcacatagaaaattaaataggacacttagtcaagggtgcagatgtgaggatttaaagagacaatgaaaaaaagcacctaacattcagattgacacgtaagtatccaaagtttggt

SEQ ID NO: 62 - DNA, 44143 bp, Homo sapiens
accaaactttggatacttacgtgtcaatctgaatgttaggtgctttttttcattgtctctttaaatcctcacatctgcacccttgactaagtgtcctatttaattttctatgtgaataaatgagaggtaccctaaaaagcatttgtgccacatcccaagtattatggttgtatcaaagggaaacatttgtgggattatttgagttgtgagctgaactagctgctgtttttatggaacacgatttttacttaaataactagtaggcaagctatggttattcagacatggatatttggcagacattttcttgaaaatgaacaatatgtgcctgtctctttgaagaaaacaactgtgacagtatttgttgccaatgataaaattcaaacttgcaacaaaaatttcattagaaattcaaaattagaattttgaaaattctaattttcattatctgccgctgaacctaatagagtccctaaacttaacatctttctgatgagattcttggtaatattaacaattgtggttttttagtatggtataatgaaaagtatcaacatttggaacatctacaaatgaccatgcaggatactataaaatcatgtatgggtaagagatccattaaaaggcaagaaagacaaattgattttaatgtaactgagtatgaaaagtttattgatacagttttagattacattttgcaacttaagaaacttatcttgtcaggttttagaatagtaccaaagaaaaatatcacaattatctgaaaagtctattataatactccttctttttctacctacctatctttgtgaggccagattttctttttatactttaattaaaacattgcattagattgcatacaaaagcatatatgagaatccagctgggtactatgaagccagacatttaaaaatttttttaaatgtgaaagaatttcactcttctcactaaattttttaaatgcattttttgtttcatgaaatatgttacttatattaacatgtcatagtttgttgcttttaaatgaattagtaaatatttaaaatttttattttccctatttcaatttctaatatcattagatgtaattcacataactaaaagctctttggagtcctcagtaatttctacaagtgtaaaggagtcctgagaccaaaattgagaacttctgccctacagttttatttcgatgtcaattaaacatctttaaattaacacatatttttaaaatcataaatgtttgtaaaattttaattgccacaataattttcttaattcttttctgataaaaatacagtgctttctcagttgaaggttataataaatgatgacaggtaattttgaggattattccaggagtatgtttatcacaccataaaaaagaaaattaaaattggggaaaggcagtaaaggtcatgcatgacaaatttactaataaaatactcatgttttagcctgttaaaacatttgctattttaaaattccatcatttaattgtaaacgtgttactcctctttcagaatgttaccttatggttgtctgtcaatcggtgactgtgtgggacttattgaggtggtgcgaaattctcacactattatgcaaattcagtgcaaaggcggcttgaaaggtgcactgcagttcaacagccacacactacatcagtggctcaaagacaagaacaaaggagaaatgtgagttgtattattctttcttcctatgttaatctaagtttttgttagatgagtctgtcggtgtttgtgtattcctctgagttagaacagagaaaacaattgtactttctatggaaaaaaatatgctcaacctttgaaatatttgatgttaatggatttaaatgattataattacttttaatttggtaaaatcttaaacattcatcttatgtattatctaaaatgtattgttattgcttattctttttaaaacaaatgaatattgcacattcaaaattttatttctaattcattgttaaaatgattagaaaaaaataattttaatgacatgctaagtattttttcacatgaagaattatgctttggtcagggaacatctggaaatttccttagaaacccatgaaaacttcacaatctcaaaatctttggacataatttccttattcgttgtcagtgattgttttcattgtttaaatggaaacttgcaccctgttttcttttctcaagttggcctgaatcactatatttccatactactcatgaggtgtttattctttgtagatatgatgcagccattgacctgtttacacgttcatgtgctggatactgtgtagctaccttcattttgggaattggagatcgtcacaatagtaacatcatggtgaaagacgatggacaagtaatggttttctctgtttaaaatgttttggtgttcttaatttattcaagacattttgtatctgcatatatcaaactataacataatttcttatttttgaaagctgtttcatatagattttggacactttttggatcacaagaagaaaaaatttggttataaacgagaacgtgtgccatttgttttgacacaggatttcttaatagtgattagtaaaggagcccaagaatgcacaaagacaagagaatttgagaggtgagctcgagcaattaaaaacacaaaataaagagttctggctgctctattagaaacaatcaatatttttcaagcaatttcaaaataataaatgttggctgggtgtggtggttcatgcctgtaatcccaactctttgggaggccgaggctggaggatcacttgagctcaggaattgaaaccagcctgggtaacatagagagaattcatgtctacaaaaaaatttaaaaagtagccaggcgtggtggcatgcactgtagtcccagctactcaggaggctgagatgggaggatcacttgagcccaggaggttgaggttgcagtgagccattatcacgccactgtactccaacctgggcaacagagtgagaccctgtatcaaaataaataaaatgaaataatagaagttcttttaccacttcagcaaaaactattttttgtttgttttttattctatcttatttcaatagcttttggggtacacgtggtttttgattacatggatgaattaaatagtggtaaagtctgagattttagcgcacctgtaacccaagtagtgtgctttgcccccagtatatacttttttatccctcactgttcttcccaccgtctcccatctgagtctctgtagtccattatatcactctgtatgcctttgtgtacctatagcttagctcccacttacaagtgagaacatactgtattttcaggttttccattcctggcctccagctccatcccagttgctgcaaaagacattatttcattcttttctgtggtggagtagtattctgtggtgtatatgtacactttctttatccactcattggtcagtgggtacttaacgttggtttcatatctttgcaattgtgaattgtgctgcagtaaacatacgatatgcatgcagatgcctttttgatataatgacttcttttcctctgggtagagggattcctggaccaaatggtagatctacttttagttctttaagaaatctccatactgttttccatagaggctgtactaatttacattcccaccaggagtgtataagcattctcatttcaccacatccatgtcaacatctgttgttttttgactttttaattatggccattcttgcaggagtaaggtggtatctcattgtggttttaatttgcatttccctgatgattaatgatgttgagcattttttcatgtttgttgaccatttatatatcttcttttgagaattgtctattcatgtccttagcccacttttttttttttttttttttttttttttgagatggagtctcactcttgttgcccaggctggagtacaatggcatgatctcagctcaccgcaacctccacctcctgggttcaaagcaattctcctgcctcagcctcccaagtagctgggactacaggcacatgccaccacacacggctaatttttgaatttttagtagagacggggtttcaccatgttggtcaggctggtcttgaattcctgacctcaggtgatccacccgcctcagcctccctaagtgctgggattacaggcttgagccactgcatcctgctttaacccactttttgatgggattctttgtttcttgctgatttgagttccttatagattctggatattagtcctttgtcagatgcatagtttgggaatattttctcccattctacgggttgtctgttaactttgatgattctttcttttgttatgcagaggctttttagtttaattaggtcccatttattttgtttgtttttgtcgcatttgcttttggggtcttagtcatttattatttgcctaggccagtgtttaaaagagtttttcctaagttatcttctagaatttttatggtttcaggtcttagatttaagtcttcgatccatcttgagttgatttttgtataaggtgagagacagggatccagtttcattcttttacatgtggctagctagttttcccaccaccatttattaaacagaatgtcctttctccaatttatgtttttatatgtctaagatcagttcgttgtaagtttttggctttatttctaggttctccattctgttccattggtctgtgtgtctgcttttgtgtgtatctgctgttttggtaattatagtttcctggtataatttgaagtccagtaatgtgatgcctccagatttgttctttttgcttagtcttgctttggctattcagactctttttggtcggttttatatgaattttaggatttttttttctaattctgtgaaaaatgatggtgacagtgttttgtagttttccttgaaaagatctttcacccccttggttaagtacattcctaggtatttttttgaagctaaaagggcttgtgttcttaatttgattctcagcttggttgttgttggtgtatagcaatgctgctgatttgtgtacactgattttgtaacctgagactttactgaattcatttatcaaatctaggagtctttttttttatcttttttaagacagagtcttgctctgtcccccaggctagagcgtagtggtgcgatctcagctcactgcaacctccacctcctgggtttaagcaattctcctgcctcagctttccaagtagctgggattacaggcatgcaccaccatgctcagctaatttttatattttttagtagagatggggtttcactttgttggccaggctggtcttgaactcccaatctcgggtgatcctcctgcctcggcttcccaaagtgctgggattatagaaatgagccaccacacctggctgaaatctaggaattttttggagaactcttgggttttctaggtatatgattatgtcattggtaaacagctatagtttgacttcctcttttccaatttggatgccaatgtgggcttccttgtcttgttctagttctcagggggagtgctttcagcttttccccattcagtatgatattggccgtgggtttgtcacatgacttttattattttgaggtaagtcccttctatgcctagtttgttgagtgaaaaactattttaattttttttttttgtatttatttgtgtgatgctgtgaaggaaaatggaaagggaatacaatttaatttgttgagctaattaaggcctaaaaagaaagtaatccttaaacttcataacacattaaaggtttttatttactgagctttaaatagttggactccacctctatattgacaaataatgtatagtgcttaatacgacattttttggtcatacactttgaggaaagtcagtcaaccataatcaccttgtttattcataacttttttaccaccttatggtatctcattagactatatcagactttaaagtactttttacaatcttctataaaattctgctttgtctacaacacagtcctgactctagcttaagcacaaaaggatttagtatgaaccaattcatacatttaatacttattaaactcctgacatgccaggcattgttgtaggtgctggtaataaagcagtttttaaaaagtccttattctcttgaagtttacattctagtggggtaaagggaatcaaaagatgttggtaagagaagtgagagaggaatgctatttttttatagctttgtctacgaaagcctctctaattttgtgacatttgagcaaagacctgaaggtattaacatcatttgctccaaactgaccaaactgttcttattacttataggtttcaggagatgtgttacaaggcttatctagctattcgacagcatgccaatctcttcataaatcttttctcaatgatgcttggctctggaatgccagaactacaatcttttgatgacattgcatacattcgaaagaccctagccttagataaaactgagcaagaggctttggagtatttcatgaaacaaatgaatgatgcacatcatggtggctggacaacaaaaatggattggatcttccacacaattaaacagcatgcattgaactgaaaagataactgagaaaatgaaagctcactctggattccacactgcactgttaataactctcagcaggcaaagaccgattgcataggaattgcacaatccatgaacagcattagaatttacagcaagaacagaaataaaatactatataatttaaataatgtaaacgcaaacagggtttgatagcacttaaactagttcatttcaaaattaagctttagaataatgcgcaatttcatgttatgccttaagtccaaaaaggtaaactttgaagattgtttgtatctttttttaaaaaacaaaacaaaacaaaaatccccaaaatatatagaaatgatggagaaggaaaaagtgatggttttttttgtcttgcaaatgttctatgttttgaaatgtggacacaacaaaggctgttattgcattaggtgtaagtaaactggagtttatgttaaattacattgattggaaaagaatgaaaatttcttatttttccattgctgttcaatttatagtttgaagtgggtttttgactgcttgtttaatgaagaaaaatgcttggggtggaagggactcttgagatttcaccagagactttttctttttaataaatcaaaccttttgatgatttgaggttttatctgcagttttggaagcagtcacaaatgagacctgttataaggtggtatttttttttttcttctggacagtatttaaaggatcttattcttatttcccagggaaattctgggctcccacaaagtaaaaaaaaaaaaaaatcatagaaaaagaatgagcaggaatagttcttattccagaattgtacagtattcaccttaagttgattttttttctccttctgcaattgaactgaatacatttttcatgcatgttttccagaaaatagaagtattaatgttattaaaaagattattttttttattaaaggctatttatattatagaaactatcattaatatatattctttatttacatgatctgtcccatagtcatgcattgttttgcaccccaaattttttattgttcatagcagcatggtcagctttcttcttgatctatagatgaggctcaggcactatcccatttataccaataaccagtgtataactacttaaggaaaacataaaaacttcatcttctttccttttatttcttatgtgaatctcccgtcttccattctcttttataattgagaatgtctcaatcatatgaaattagttaccagaattaacacaatttagactatcttcctgattccttaaacccctttactgaagtatactcatgaataatactttaaaatatgggggaatagaaaccatgaactttttacctttttaaactatttatccatatctccaaagtagaacattaaaccattttaagatatgtctcattcccaagtagtcagagctcactctccaactttattaaatactatttgagcacaggacacattcttaaacattttgaaaaacattaacccaagatgtagaggctactgctagtcgtcattctagaatctgatattttactctgtatttgaaatgaatgattaatgtcctaggaaattagctttagcagatgtccaggtgccacatcaaaaaagtgcaataattattgacagttttttagattaggcatattattggaaaacaactttataaagagtgaacattgtatactctagtaaaacagcatcactttaaaaatattcatttatgaaatctgttacctatagttgaagtcttgagtagtgaacaagggactctaataccaatactcttaatatctggctattttagatcccttaaagggcataattattggaaatttaggtatttcactaaagcatgtatataatattgccaacaagaaaagtaaatttgaagattaagggaacttacttctgcaaactgtcttgcgatagttaagcagaatttaaactctgttttaagcaggaaaccagaaagattattttgcagttgtagaagatttcataacttattaaaacttattaacattttgtgttgtttagatataggcagttgatacatactaacatcccagccttttcaatatcagggttaaattataggaaaactcagtaaaatggtacaaatctgaaagtttgatggtagaaactgaagatttaacagagaactgtgttttacccgagtgccaaaaatgctgtgagcctccttgcacaaaatttataccacttttgcatttttatctatcagtccagatagttgtctcccctccttctcccaggacctctccaccattaaaatgcacaaaccacatggccgatttcaccatttacatttattttcaaaagttactacaaccaaattaattctattagaagaaatgtagacaaattctataaagactatagattgtgacctaagaaagaaatgaggcaaagaaccaaacattgaattaaatgctacatgggtgactaagatctgtttcaagtcagtgataatatagccacttctgggtacttcagtatcagagatcagttctcgtggtttagacagttcctatctatagctgactatccttgtccttgaatatggtgtaactgactattggctctacagttttattgggccacttaagaaatatttccttgaataattattttgagaaaaagtctaaaagtaataaaaataattttaaacacactgtagtaagaaatgactgttggaaaattatgctttcactttctaccatattctcagctatacaaaaccatttattttgaagatttttagactactgttaatttgaaatctgttactcttattgtggaatttgtttttttaaaaaagatgtttctaattggatttttaaaagaagaatggaatttggttgctattttacaatagaacctaagctttttgtggttcttagtgtcctatgtaaaacttagtgtcaaagtaatcaactttgagattttcccttctattctgctttatattaaaagcccattagaaaatgggaacctggtgaatatataatgaattgtaaaatattttaatgtgtaactttttcaactgtgaaactgacttgattttttgatgaaaacagctgctgataaagtattttgtgtaaagtgtagttcttattaatcaggaaaatgatgacttgattagactgtatatgccctcttggattttattttaaatggattggtgactttcacataggtaaaacacagtccatctgtattcttttttccatcaaaaatcgagtgatttggaattataaaaaaattgtgagcagcctatttgaaaggcatcatggaaatttcacagcacaataacacggatttgttttttcttaatgatgtaaatccgtttaattcatactttgatcaatagcccatgcttgccaactctgaagaaatttaatttccagcagtattttaaagctagcctgttaactttttctgaatatttaaagttcctcttttttctatgtctgcacaaactgcagacctgggctggacccacatactcaagagtccaccttaagaaattattttgatgtccaagacatcactaaaatatttaagtttaaagataatatgtggtgttaatagattgtggtgcttttactatttaaagacaactttcatacttcagatgtttttgagaagaggggaatgtgaggggagggggcagaacagggaggagttgtttgaatgaattacattctttatatccatcctgctcatttggggcatgtctttaagagaaggctgaaagttgtgagagtatattgtataccgtaagagaatcaactcttcatcatggatgggattgtgaaggctgaactataaaattcagcattgacagcatcctcaattaataattcttggtgacagaataatacagctgggctgttttttaaaatataaacaataccatttttaattattacattaaaaattgtaaatatatctatgtgccatggcctgggaagcctgctttcttttttcataaaaattatttttactgtatgaaaagatcatggggtttagctcaaaatatctgtggtcctgataaaattggattggtaactctacctcagaaggaaaatgggaaaaaaaaatagatgagtcacaattcaatacttcaagctcagaaactgtgcagatcactgaattttagatttataaagtcagagttggcatgccttgtttttaatgatatggaagaccttaagaaaaaaacttggctgaagtttaatcgttggtccagccatttgaaaaaggcaatagtttgaggaggttcccgaattcggcatttgaaattcattttgttctctcttcttcattattagtgcatttggtgtgtgtatacttgcacacaattctgtttgtgtacacactgcttgcttagccctagtcaagaggcatcttttataaaaggtgtaaagaaatatcaaggttctaaaattcggaagagtttagaatttattaggagtttcccaagttgggatgttagtctttaaataaacttcatgcacctattccacttaaggttttgcacctcctttttattagtgcagtgccatttcttctgcttgattttaggtatgttaatattccagccttgctagttagcataaagtgacaggtgtgagccatgaggaaattttctgacttaatttgtacacaactacatataagagttttagtggaggaaaaaaattagtcccttgtgcgtatacagtagttaggtaaatgatttttctaccaacagtatactccattcctcatgtaggtaagtacagaaaaggtttttaaatgtatttttttagccagttaaagtctatgaatctatctgcaaccttatttaatctgtcactataataattttgtggttatgctaagaaccatgtatacttttaggtattcttatttttgtcaatttttctaggttggcaaggaggcagaaaaccttcattgtttcatattaaaatataattagactaaacttaattctagtatgaatttccaaaatcattatctatttatttcatttttatttaattttgtttttatttcatttttaaaagtcccttgttcaatttaacttatgttcctaagagaggttggagaacttggccttcatctgatttcaaaaatgttttgagtttcaaatgaagttaatggtttcagtgtgattcagtcctcagacctaattgggttgaataaaatctaaaagaatatacccttttggagcataacattttaataccttggggaatgtggcactaccaaaagaagactactaacacgtcagatgttcacctggaagctttatcaagaaattcgaaccacccttttggccccattaattgtagcaagtttatttctctatattttgtcattcagtgaattgaagtcctgtggtatactgcattcattagaagaaaaacgtttttaatgtccttttaatgatggcccagaaagcatttgacacagcaagatgcatgtgttactatattgagaatatagaataataacagtatcactaaatttaagacctcttcccagtcttgctgttcctagcaagaagtttggcctgtgactgcacttactgtttatgctcatcagaaactgtcaatgtctgcttttctttaactctgcagtctgtaacatcacgctgtttattaaaaaaaaaaagaaaaattactttttgtgtccaaacaatccttagtgtactacataagcaaaaaactgtgataattctcttttgccattccttttgaaaagcaagccggtgttgctaataatcaaaatttagctgaatttgagttcttttcagtaatgactaagaatacttgattgaaaatctgaaactattataccttaaaagccaatttttctaccccagtaaagtgatgaatattaaaggaatgtatgtttaaatatttacttcctttaagcataaagaattatatgcttgtattttaagaaatatatgtatatacatatatgtatgaatgtatgtatgtatatgcaataggtaagtagacttttttccaagtcgtttgaagatcagaacctagaaatgaagttaggctagaagcaaactggttttgctttcagttctcataaacattgcaaaaggtaagtgtgggcttttctttgaccattaatgcacataggcattaacaacttagtatttctgagcaattaagcaaataattacttaaattttatttatttgccaaatggtttaaataattttgaattgactttgttctccagggataatctctctctttgctggaatgaatcaggtagctcctatctaaatggaaaactgtggtaattgaaacacacgctttatattttaaattagcagttttgaatttgttagggaaaaaaaaaatcccagcaactgcatattgttaggtagaagtcaaatttacaaaaacggaatagagatgtgcccttgagaaaagtgtagaatctcaatgtgcagatgatttaaaatgtgcgtgcacatcaaatgttcatgtgtacttacatactttattacagagaagtctttggtatacaaaatagtttaccacaaccttttaaacagcaggttctgggccttaaatgcgtatcacatttagccaagagaactcaggtaggggcatggaaaatgaactgcagctccctatccctagcctctataccagctgtccagtgaaaagtaccaaggctcactgaatgttataacctagcagatttttaaataaatgatctaacatttttgagcactgctactagatgctagaagctaagctaaagtttcacctgccctactttgcttattccataaaataacaactgcgtgaaagaacgggttatccccattttatagatgagaaaagaaaggtttacacaggttagcttatttgcccaaagttgtaattatggcctacaaagtcaaataaatcctactctgagacacatgttctttccaccattgcacactagaaaggaaaacaccaagattattcattactcatcaagtcaatattgctgtattcagctaatttagtaatatgtgtcgaaattaattgctaaaagggattaaactgacttagaatcagttttttgtttgattacatctacatacaaaagtagcttcaaatgtctcattccactgtccataatttaagatttttgagtataataaaattttaaagatactttgaggcactttggaaaatcagaccaaaatctcttttccactcatagattcggcttaatcaacctggaaagcatttgttgagagccttatgacatcatttaataaccatggttgattcattaattaaagtacagacaattgttgactatccatgtgggacttcttttctattaggttgatgcaaaaataattgcggtttttcgccattaaaagttaacagcaaaaactggaattacttttgcaccagcctaatacgatgtggatcatctgagatgaatgttaaaatccagtatagcttcttcatatttctggcccatttttcccaccagaaagtgcacaaagtgaaatgagcttatgaaaagcttaattaactagaaaaatgttactgaaagaaaaattacatggtacatgacaaggctaaatactagtaactctaaacttagtgaattttctaggcagcagctttcctctgctgtctagactggtaaagaacaaactaaagccaagcgcagtggctcatgcctgtattcccagcactttgggaggccaaggcgggcaaatcacctgaggtcaggagctcaagaccagcctgaccaacatggtgaaaccctgtctacactaaaaatacaaaaattagctgggcgtggtggtgcacacctgtaatcccagctacttaggaagctgaagcaagagaattgcttgaacccaggaggcagaggtcacagtgagccaagactgtgccactgtgctccagcctgggcgacgagcaaaactccatctcaaaaaggaaaaaaaaaaaaaactataataaatatgttagctccatgttttcttaagttttctaccagatttttgtctttgtatagtgaacaaactgttaagaacttttttatgagaaatattttagtatgactatattgcatagagttaggctgatggttcagtgttcagtagattagataccctcattgtttatttccatattgactggttctagctagagctgaaattaggcaaagaatatcttgaactcattttgctatacaggaaaaaaaacagtgcttccttagctcatttggaaagagattgggattagaaaagatggtgaatttgtatgtatttatagaaataaatagaatacaaaatgaggcttttaaattttttcccacatgaaaatatgatactttaattattaccttttacattattagtttgcagacaggcataattaggtcctcagttgcagaaatcacagacatctgaaggccagcactttaatttggccaccgtcttaagatttctctgctcttcctttgctcctcctcataatgcacagtttgaactgatgctgttctatataaggtacttttccacctacctcatctctgactacagtgctatatttttcacacagtaaggacaggtgttgtgttaatctcaccatgccaacaatcagggcaccacctagcagagtcagtgaaggccaaaataaacagtggaagatagccatttggtcatacttttttataagaatgacatcttcagattggctggctggactgtagaagcatgaaaagggggttccatttttgtgatcgaagaattcttttatgtccagagcactgttgagcaaatcatttctatcttggtggcacttaggtgtgtaaaagcactaggaatatggaagagggaaaaagataaaggcactgtcaccaataccaaatacttaacagtttttaattatgaaatagcttcaggctgaagttattagtgggcagtttcaatcttagaaggtggtaaaatattacatagctcatgggaaagggttgattggagggccacagtgaaatggccatttccagtcattaagcaaggatgtggaagagaattcttagttatatgacattgcaggagagtcagtgaccaacttcataaggaatatgactcctccctacatgcaggttcttggactcttggacagtatgaatccgtttgtccattgaacaaaaatgtattgggcctcactatgagctttcaacgcttagtaatgcctctgttgtctctgtcttgatctcctgtagcaaaatatcaccctgaagaaaagcacgttgaggcttttgctctagactcacagagagggagccccacctggactttggttcctgggagacagaaccagtggagaagggagctctgtcagctggtgacttttttcaaaaaagcttgaggtttattaccatatccattaggtacttgaggtactgtgctaaaggccaaaaactgtttgaaatcttaaaaatcattgcatcccaaacagaaaacaaaagtcatcggattgaaattgatgcttaaagacaataaaatgtaacatgtcaactaatctaacacaactcaacttttatagttaggtataaatataaattttaaatcatatgaaagactatttcagggatcatttctataattcgttaaatcatatgaacccattgtgtaacttactaaaataaaaataatctttacatttatttgataagaaaaattacttgattcaagggagactgtgagtacactgtagcatatgtcatatggcgcggagtggaatctccaaaagaaagactccccacaaatgactactcattggctcagcctataaattccagacaccaagttgtgaaattggaataatttctctcctttctatataccccatttctccaccaagaagaaagcttcatttatcctgatttgatcactataaaaatgttcactccaaaaaaatagatttatccctaaagacagccctgggttatttatgtaccctgctagggacagtctggcagggaagggttgctgtcataagaactctttaaactttacaataccttgggatttatctggacagcctcttcattataatgtaggagagctttctgacctggatggctgaggttcacaaacacctgaagacacgggtacttcccctgaccgtggcagtgcacaccacaggtgaaggcacagtccagccagtcgtccatgatatctgtgtggatggcagtgcaggtcgattcttctctctgaatgcttcaatttgaaaaaaaaaaaatgttcttcacttattagaaaatttcattctacattttggtgtggttatgagcttatgtacacaatgcccaaggcatttgtgtacaaggcatttgtgtattttgaggtggtgcaggatccttacagcaggcacataataaacagggagcatggaagacacagagttggggtaaagagccacaaagtgccaagttccacctcacttctgatgaccctactggcatatttctcactacaccagtggttttcaaacttcagaatcatctgtgagtttgttagaatgaagaatttgttaaactgtggattccagggcttcattccagaaattctgatttggtaggtctgacttgaggcccaggaatctttaatagtatttaagatgcaggtatttggagaaccacagtgtaaacagtgttagcattaccataatgctgtaaccaccaagattcaccctcactcaggaatctcatcacctctcatgctcatcatctcaagatgcactggcttgtcctgatgaaaatgtgcctttggaaggagtctaactacagggccgttggtcaacatagcctacacaatttctggcaacaaggtacaattccacatacccactacttccaaagaggcaagtgcaaatcatacatggaatctctcagtagaatacttaccatatttttgctatcaattaagttcctagaggtcaagagctatatccaattcatccgtatgttcctcaaagcatgaaacagaatgcttctcactgagtagatgtttaataagtgctgtactgaattaatttttttggggggggggatggagtttcgctcttgttgcccaggctggagtggtgcaatctcggctcactgcaacctccgccttctggtttcaagcgattcgcctgcctcagcctcctgagtagctgggattacaggtgcgcaccatcacgcccagctaattttttgtatttttagtagagatggggtttcaccgcattggcctggctggccttgaactcctgacctcgtcatcctcccaccttggcctcccaaagtgctgggattacaggcgtgagccacggctcctggtctgaattaaattttacttggaaaatttcttgagaattttcacatgtaatacatatgcaaaacatcccagaagggacagacaaaattcctgccatgaagaccttgtggtgatgttgaagagaaaggacatgtgtatatgtatgaaataatttgaaaacaagtccaagacaaagtaaacgaggggaagaggaaacgctttgattgaatatatgagaccagctcttcatataccctcacactcacatataggtggactcctgtgtttacttaccggttccttaaacataataagttagattagcaagctctaaagtcagaatgtttgaaaagcagggccaggcgcagtggctcatgcctataatcccagcactttgggaggccgaggcgggcagatcacttgaggccaggagtttgagaccagcctggccaacatggcgaaaccacgtcttcactgaaaatacaaaaattagctgggcatggtggccggcacctgtaatcccagctatataggaggctgaggcaggagaattgcttaaacccgggaggcagaagttgcagtgagccaagattgtgccactgcactccagccagggcaacagaggccgactctgtcccaaaaaaaaaaaagtaagaatgttcgaaaagcaatatttagctaggttcataatgcactctcactaatctctttgaccaaaataatcattttcccttattaatataacaaacttgagacacactgtgcagtttaacatggcctcaaggtctggggtataaaaatcactagatatggccaaagaaaaaatactgggcaagtgaaaatacaaaagcggaaaataagattatttcatagacttagcactggcctgctttttcactaaattaatttatatgtttattttaactaggcatcttgaaataataatttagagttacttttttatctgttagaacttaagctctctaaatcttgaccgagtactgaactgagtatgatttgaattttccttaaagattttagaaagcttcaaaatagagtgggacattctgtcccatgcacaaggccccggtcagagcctttcaggtggaaccagggatgtatttagggctaaaaaataagcatgttccttcaatagcatcgggtgtgtatttggctacagctgtgacaaaatccatcatctgattgagggatgagaggttgagggagtggggataggtatgaactacgcagggcttcttaactaccaccctttatggagcaaaactactcgctgagatggcacaagatgtaaggcaagagagagatgagaactcaccactcttaggcattcacttaattaatttaaccaaataatttccaggaatgcttagaaaagtaaaacttaattatgagcaacagtttggtaccagcttgcagaaggtaccctcaagccatctcccaaatatgtcacatttttaaaaatgatctgcctgtgcacacacacggacatttactcaacattcccatacattcaaacattcaatcaaattacatagacatgtaatgcatatatatatatatatgatgagaggaaaaggagtaaatgaaaaagaggaaaaaaagacagaatgaagtcagaagtgaggtatagccaagacaagagaatcgcttgagcctaggagtttgagactagcctggacaacatagtgagatcccacttcttaaaaaaaaaagtttaaaaaaaagtgaggtacaaacatgtaatctgcagaccataagatcccttgtagttatgagaaccgagctacaaagttgcctctgggtttcctagcagccaaagcaatgaaggaaacacaaccagatacaagactcctggcgtccattaaatgaaagtaagctggttgatcaggagcagcacagcttctcctggtgctaataccagagagaagcttcttctggaattcttccaacagtggcactgtgtgctatagtaaatggtgacttctacatctttcccctaacaatggtaacctaggaatggcaggagatgaatcataaataacagaagtaggccactctcttccttttttatgacccctttccctcactgaactcctaggccttcctcttccactccccctgggcctcctgttgctctttggctgtccaaaaaaaaaagggctgtccaaaaataaagcaatgtccaaaaagcaccccttgccttccttttaccctgaactgacctggccccagagtaccacatgttgtgtgggccatcctacaaaattaaatagcccctccccttccctaatcagaacccccattcccctcatttcagcaaacatcatttaggtattaagaagcaagtcttacgtcagaatgacaggcatattatttaccggctatgtgaacttgggcaagttacttggcctttctgagcctcagctttctcatttataaaatgaaaactaaaataacacttccatcatgggctgctgtaggtttaagtaggataaaatatagtatgtattgagcatacagcatatacttaataagtagcaactaaagttgacccttgaacaattcaggggttagggatgccaacaccacacccccaaacctgcagtcgaaaatttgcatataacttttgactcctcaaaaatttaactactggtcaggcatggtggctcatgcctgtaatcccagcactttgggagaccaaggtagaaggatgacttgagcttaggagttcacgaccagcctgggcaacatagggggatcccatctctaccaacaatttaaaaattagccaagtatggtggcacacacctgtggtcccagctacttgggaggctgaggcaggaggatcgcctgagcccaggaggtcgaagctgcagtgagccatgattgaaccactgcacttcagcctgggtgacagagtgacaccctgcttcaaaaaaaaaaaaaaaaaacttaactactaatagcctactgttgactggaagccttaccaataaacagttgattaagacatattttgtatgtttatatgtattatatactgaattcttacaataaaataagctagaatagccaggcacagtagcttatgcctgtaatcccactgactcaggaagctgaggtgggaggactgcttgagcccaggagttcaagactgcaatgagctgtgatcacaccactgcactccagtgtcacagagcaagaccccgtctctttttttttttttttttttttttgagacagagtctcgctcagtcacccaggctggagtgcaatggcgcaatctcggctcactgcaagctccacctcctgggttcacaccattctcctgcctcagcctcctgagtagctgggactacaggtgcccgccaccgtgcccagctaatttttttgtatttttagtagagacggggtttcagcatgttagccaggatggtctcgatctcctgacctcgtgatccacccatctcggcctcccaaagtgctgggattacaggcgtgagccaccgcgcctggcccaaccccttctcttaaaaaaataaataaataagctagagaaaagaaaatgttattaagaaaatcatggccaggcatggtggctcacgcctgtaatcccagcactttgggaggccaaggcgggcagatcacagggtcaggagttcaaaggtcaggagttcaagaccagcctggccaacatggtgaaaccccatctctactaaaaatacaaaaattagtgggcatggtggcaggcgcctgtaatcccagctactcaggaggctgaggcaggagaactgcttgaattcgggaggcagaggttgcagtgagccaagatcgtgccactgcactccagcctggcgacagagcaagactccgtctcagaaaaaagaaaaggaaagaaaatcataaggaagaacaagatcatgtcatttgcggggacatagatgaaatgaagctggaagccattatcctcagcaaactaatgcagaaacagagaaccaaacactgaatgttctcacttaaaagtgggagctgaatgatgagaacacatggacacctagaggggagcaacacacactggggcctctcagtggagtagggggagggagagcatcaggaagaatagctaatgcatgctgggcttaatacccaggtgatgggttgatctgtgctgcaaaccaccatggcacacgtttacctttgtaacaaacctgcacattctgtacatgtaccccggaacttaaaacaaaaattgaagaaaaaaaatcataaggaagagaaaacatgtttactatttactaaatggaagtggatcatcataaaggtcctctccctgtcctcttcatgttgagtaggctgaggaggaggagaaagaggagggattgatcttactgtctcaggggtggcaggcacagaagaaaatccatttataagtggattcccgaagttcaaacccatgttgttcaaaggtcaactgtatcactacatatattgaataaagaacctaattaaaaggaaggaaactaatatgtattgagcaactactatgtgccaggtagacactgtcaaactcaaaaaattcagactcaaaaaacttttattgtgctcacatacaaggtttaactctctcttggaataccaacattttaaggggaggatttatgacctaaatgaagaaactataatttgtggattacgtgtttggaggtatatatagattatgagatgggaggaggcagtgcagggaaatatctttgaccttctcgccacctcttcctccacacccagctgcccccagcactgacagcggaagaggaattgtatttttctttttctagaccatggcagagagtcacagattgagaaaccaaagccagcctctcctcctttaccgctgtgcctggatcttatctgaattggaaactctagatttccttcctctgtttcttacctgagcataaaaggctttagaatggttgttccgagcaagaagaacattaggactgagaagcccatcatggcaaaccccagcatcacggctcggtcctctccagcactggatggcagcctcttgtgcacatctagtgggtctccatcactgtagtctgtctctctcttcttccctgaggcaggaaaggctgtcctttggggaaagggagaaggagatactgcagtgagctcataaagaagggggaacatttccaatccatggggactggagggataatctcatttgctgcctacctgtgtctcgtgagcaggatgaatgcaacaaaatgaaatcccagttcagagcttggtgaaaagtccatctaaataagctaaagtgatgtgtaatcaagtatttttaaagatattgtagcaaacaagcctaagaaatgttgcctcatgcaagtctgtagagatctgtttaatcaataactagagaatgttgtatgtaaataagtgttacgaactttgttatctttcagggatattgcacgtccctcctgaaaatttgtttacattctcctttgaattccacatggaaagaatgactcaaaaagttcacatttggaattaacagcgtcctgaacagggtttgacttattctttcatattcacctgttggaaaggcagcatatccaccaccagaatttctggccactgcccagtccactcagaattatgaagttgtcatggcttctttgctcctctcaccctccttctcctcctctctggccactcatggttctgcataagtgtcccttcatttcttctctcctctctccactgtgcctgcaaacctgctccagcaaaggatgagatacattctcgcagggcagggtgtctggtgaacagaagagtccaacacaaaggtcgcaaaccggtgggcatggcggcatccagcccacagatgtgttttgtttggccttctctgtcgttttttgtttttgtgttttttggttttttttgagacggaacctcgcactgttgcccaggctgggtacgatctcagttcactgcaacctcctccgcctcccaggttcaagcgattctcctgcctcagcctccctagtagctgggattacaggcgccggccaccatgcccagctaatttttgtattttaagtagagacagtgtttcaccatgttggccataatggtctcgaacgcctgacctcatgatccacccacctcagcctcccaaaatgttgggattacaggcgtgagccactgcacccggcctggtttattattatttttttaatgtgggataacttgttaagaccttaaaaatcatgacatttctcataaaaatgctgagttctgactttggaaataatcccaagatgcacgtccctgcagatgaacagcgggcccagcagagcagtggctgcccctgtggaaggtgtgttctctagtttgccaaaatccctccacttcctacagtgtcactgatttgccattccctgctcagtagccatttgagttccagaagtatctccattttaagaagcttaatgaaatcttaagccaaacaaatgcagcactaatggtagaaacacaggctccatcaagcttcctaaaagcttactgcattttaaagtcaagcaaaaaccccatcaaggaaattactggttgtttttttcccacaagcatagtttatgccttatcccacatccttccccttccctctccctagctcccttttcccccagcaacatctttaggttctaaagcgagtaaaaggaatgtcagacaatccagaatgttccaagagcctgtgccaggaagcaccaacctcagaaggtggggcactccatggttaacacttctttgggacccgaggatctagtttaggaatttttagttgtctttgatattttactcatcccctatcatcctaccaccagagaaggggcatggaaaaaaaatttaatgaaatttgaacctgtacttttttttttttttttttgagatggagtctccctctgtcacccaggctggagtgcagtggggcaatctcggctcactgcaacctccgtctcccgggttcaagccattctcctgcctccgcctcctgagtagctgggactacaggcgcccaccaccacgcccggctaatttttgtatttttagtagagacggggtttcactgtgttagccagaatggtctccatctcctgacctcgtgatccacccacctcggcctcccaaactgctaggattacaggtgtgagccactgcacccagccacattttctaatttatcaataaatatgacagattgattaaaagaaagttttagccctaaagtagagtttgatggtttttgtagtttccaggacccaatatcctgcattttcccttgtgctctaaagctggactttagttgctctgtagcgtaaggtatcccagaggtttattgtaagatatccttggaatccatgggtgaagaggcttataatgaggtcgctcttctaatgcatctctaatacattctttaacatacccaattataatggtatgttataaaaaaccggcataacccgattctgatctaatttaggaataagacagacctgtactgtcctagacaagactttttatttataatttttctgcccactttgttccaaggctttatgaaaagttgacaacttcataagtcacttggaaagaagttatttcatgtgtggggaagggataatataaaataatcataaaaaactaaaacatagataggtttggccaggtgcagtggctcatgcttgtaatcccagcactttgggaggccaaggtgggcagatcacctgagctcaggagtttgagaccagcctgaccaacatggtgaaaccctgtctctcctaaaaatacaaaatttagccaggcacggtggcatgcgcctgtaatcacagcttctcaggaggctgaggcaggaaaatcgcttgaacccgggtggcagaggttgcagtgagccaagatcatgccactgcactccagcctgggcgacagagtgagactccatctcaaaaaaaaaagtaaataaataaatttaaaaatttttttaaaaagcccacatagatatgtttttattattgtaaaagtaacaggcttctgtttcagtggtatggtacactagacacccactctaactacagacaactaaaacttctggccaaagcttaaaaagaattggaaatactcaaaagacaaaaactatgtgaaagtaggaacccagaaaggaaggtggacagaagtcaagttttaacttgagggcatttgcggaacttggtgaacttgagcttttgtttcacagtttatagggtcacagggacaggagacaatgtccagggtctatccgaggtatgtagtttaatataccatccaactagagctgggaccccaaaggacttaaaagtcagtgtcaggttgaactggaaatagcccctctcccttcacccacaccgtaccactccataggaaatggcaaggaaaatgcctttctcaaaccttaacactgactaaaagaggaaaactacaatctcccctgaaattttagataatcctcaaggggatcctcaagggagtttacagcctgaattcatactacctgggtaatacaaaaatctcaagctaagaatttcgtgtaatgttgtttaagtaggtagtgccctctgcaacctggcaaatttaaatacgtatgttctctgtaggcacacacatttaacttaggccttaaaagaattctataggccaggcgcaatggctcacgcctgtaatcccagcacttttggaggtcgaggtgggcgaatcatgaagtcaggagatcgagaccatcctggcctacatggtgagaaaccctatctctactaaaaacacaaaaaattagctgggcgtggtggcacgtgcctgtaattctagctgctgcggcaggagaatcctttgaacaaggagtcggaggttgcagtgagccaagattgcgccactgcactccagcctagcgacagagcaagactcgtctcaaataaaataaaataaaaaaagaagacgtatataaatgtccaaggagtatatgcactcatttagaagtcataaaacacacaacagccaggcgaggtagttcatggctataatcccagcactttcagaggctaaggcaggtggatcacctgaggtcaggagtttgagacgagcccggccaacatggctaagccctgtctctattaaaaatacaaaaattagccaggtgtagtggcaggcacctgtaatcccagctactcgggaggctgaggtgggacaatcacttgaacccagaaggtggatgttgcagtgagctgagatcgtgccactgcacttcagtctgggcaacagagcaagactctatctcaaaaaaaaatgaataaataaatacataataaaaaataaaataaaagtcataaaacacacaggaaatcaaggcgtttgagtgcaaaaaaaatagaccacaaaatgagatccacgaaaaatttcagatatttgcatagaatataaaatacacatctgtaacatatttaaagaaataaaggaaggatccaaaatgtcagaaatcaaggaattctaaaatgtagagctaatatttaaaaaagaatttatagaaatcaaaaataaaataattgaaagtaaaaatttaatgaacagacataacactcaattagatacatctgagaagataattagtgaacacagagctggatctgcaaaaatagccagagtataatacagagagatttttaaatggaaagtattaaagagaggttcagagacatgaaagatagattaaatagtgtaacataatatctattcagaattccagaagaaaagagacataagtcagaagcaatattttaaaaagatagtcaaattctagaactgattgaagacccagttcccagactccagaagcccatggaataaaataaagaggaacccacacttaaacacatcacagatatattgcacagctacaaagacaagagaaaatcttaacagtcgccaaagaaaaagacaaattaacttcaaagtaatgacaatttggctgagagcttacttctctgtaacaagactagaagccataaggcaagaatattatcaatatactgagaaaaagtaaccacagaattctatgtctacaaaaaaatcctctcaatgaataaagacatttcagacaaagacatttcaaacacaaaactgagtttgtccttgatagaccctcactgaaggaaaagggtcaagtatttactcaaggcagaacgaaaaaaatccagataacagctgatatttaaccagaaatgaagagcaaatacagaagtaaacaggtaagtaaagatattaactctaggctggacacagtggctcacgcctgtaatcccaacactttgggaggcccaggtgggcagatcacctgacgtcaggagttccagaccagactgcccaacatggcgaaaccccatctctacaaaaaatacaaaaattagctggacgtggtggcacacacctgtaatcccagctactcggaaggctgaaacaggagaatcacctaaacccaggaggcagaggttgcagtaagccaagatcacaccactgcactccagcctgggcaacagagaaagactccatctcaaagaaaaaaaaagatattaattctacaaaataataataatagtaattatcttattactattatgtcttgtggggttaaaagaaaagataaatacatgacaagagaatataatttagagggagtaacagtgataatttttccatggggaaaaataaagacattaatttcatgttgaaaagttcaaatatgcatgctaaatagaaatatcacctttctctactcttttaggtgatactccagaaattccaaactagtagagaaacaaagaatggaagggaaaaaaatcaatccaaaaaaggcaataaagaagagggaaaaactcatgaaaaagtcaggacaaatagcacaaaataacatgatagaataatgttattgcatcagtatatcagtaattacaataaaactaaatggagtaaatgatccagttaaaagatagagagtagggcaggctgtggtggctcatgcctatagtcccaacactttgggaaaccaacgtgggagaatcacttgaacccaggagttcgagaccagcctgggcaacatagcaagaccctgtctctacacaataaaaattaaaacaccatccagttgtagtggcacacctatagtcctagctactcaggaggctgagccaggaggattgcttgagcccaggtgtttgaggctgcaataagcttgattgtgccactgcactccagcctcagtgataggtgagaccctatctctaaaaaaactgtttttcaaatataaagattgtcagactagatttaaatacatatagatggtcccccaacttaagatggttccacttgcaattttttttacaactataaaatgtttttatttcaattacataataacacttatgttttcctcaaattttaatgaggatttggtctttttgcattcaattctatcttgtaacagtaatatgaatctacataatttcataaaatgtcaacattcataaggtacattcctttgtgattttatattttacaattaaatctaactttacaattatttttaaatgtttctttatatagaaaacagatattttcttcaggcagatcaaaacaagaattttccaataagaatatactgggacataacaaatgaaaacatttataacaaaataccaaaagtgattcagctctttaaaatatcctactccagtctaatttgtagtttgcacaagaacaagtaacctttttttactgttcttttgaatgatgattagaaattcaaacaaagagaagtaattttaaggttcaaaaactttttcttttttttagagacagggtctcactctgtctcccaggctagagtatagtggtgcaatcatagctcactgcagccttgaactcctggcctcaagcgatcctccaaacttggcttcccaatgtgctagggttacaggcatgaaaacattgttttgtgtgtgtgtgtgtgtgtgtgtgtgttttttagacagagtttcgctcgttgtccaggctggagtacaatggcttgatcttggctgactgcaatctccgcctcgcaggttcaagcgattctcctgcctcagcctccggagtggctgggattacaggcgcccaccaccacgcctggccaattttttgtatttttcgtagagacagggtttcaccatgttggccaggctggccttgaacttctgacctcaggtgatccacccgccttggcctcccaacgtgctgagattacaggcgtgagccaccacacccggccaaaaacatttaaaaaatgactgtccctgctcaaatactgcagtaggaaatgtaatttgacatgtatcacttccagaaaaaatctttaaactttgtataaaatgaatttgatacatcatcagcatgaagttaaaatctcctacaaagtaaattcaagtatcatcaacaatgagatccaaaagcattggttcaaaatcaaagacttatatgaggtgaaggcaaataaagcccctcatgctttcagacctttacttgttatccttaaaatgattattgttctaaggtgcaaatcttttcagtgacctatttgctatttggcggtttatctcctttaaataaaataccatacaggttataatgtatattttaaaatcaaatatgaaagtacacatatatgaacaagacattaatttaaatatcaattatattcataatacagaagtctaagaatgctatttggtcatttcaattagatgctgatatatttggtcaagaatattcacattcctatcagcctaaggcaaatggtaaatgcttctatttttattaagtggactataaacagtagacattattgtttgatactactggatatatgctctcaattagaatgtacactgataacaaatatgtctttctaatctgggtgataacctcaatgattacatggaaatctacaagtaacagtctataacttaaagcagtagatcacctggtgattggcatacagtgcatctctatgaatttagaacattctacttacattggcagtggagagaaaagagcccctcacactcagacttcctgtgcaccacgcctgccgcctgcctcagcttaggacatggtacggtcttctttgcttttgcccttctcgttccctcctctggtatcttctctgctttctggattgaagtcccccggctctcctcctggtgccaacaagtcatggttttttaggctattgctgtctaaagctttcctgatggtctgacttggatgttctgacatcccacacctctctgtactttctgcttcacaggcatcactaatgtcctgtgagggactttcatttttgggtacggtgcagtgatctgcatcttcgctctctggttcttcaggattgctttaagtggcaccagctattttagcattatcttttgcaacaccttcatctaattcttcaccaccagccctcgggcctgatgattgaactgtgacatcctcaaaatctaatgtgtctctaccagctagtacctcctcagctgctgtttttacatcattgccttcttggtcaagttttccatccaacttcattttaggattctctggacaatcaacattttcactgctttctgctgcaattttctgttttggattttcagtcacctcgttttgggcttccactgctgactttctgtcagtagactttacctgctcttcttccttaatttcacttaaatctgtgttctgataagttaactctttttaaacatctttaagggtttctatgggtactggggattttttcctcttctttttctttttcttgttctttctcttctgcaatgagtccaatgcctctccctgttggtcattcttttcttcatctggctctttcatatctgagggttcactttgagtgtctactgtacttggacctgtcgcctcctgacccttgctctcagttcctgctggagaaccaggaacttctgtcttgattggtttctcatcccttaatcctttttcttcaccctcttcttcgttgtgatccctacctgcttctgtactctgcactggaacctccttgggctcagctgcttcctggttggtgaattctttctctaaactatgccctatgcttgtctctaactgttgggggacctctaccatacatctgtcatcatgataaactgtgtcatcactatgccctaaaggacatgaggccactgtgtctgcctgctctccaacctgagtcaccgctgcctctcccacattctctgtgtggctcccaccatctaagtcactccaacagttggatggctcaaggggagttctggtcctgtcatctggtgcacccatgacctcatttgactcaacctgtgctgtgttttcagggagagaagcgctctcaagaatttggctttgaacctgttcctcataggtagcacctgctaaggttcctaggaatggggcagtgtcttcagaggatttctggtcctcggtattctcaccagcagtgaatacctctatgtccacacaatccttcactgtgtcctctgtgtgttgttctttctcagtattgtgcaagatttctcttttccccacattcgccacgatttcattcttcacctccacctcactggctttcctagggtcccatcccctgtcgacttgagggcatttaactcttctttcgtcatcttggtaggatcttggtatcaaacattactgagagtgtcggaagtctctccattggtaactatttctgaatttaggattattccatgtttctcgagcatttcctctgtttgcttcagggcctccttgacttcagcaaactgaaactgcagtatactgtgggcgtgtttttccctttcaaattatttgtttttctcttcgtactgccgcctatattcagccagctgttcttcaatctccagcaacatatctttcagggtgtcaacttggtaaatgaagtttgtgttttcattgtctaactgagcattggaaaacatagccttcttacatttctcttcaacttctgctagagagtccttgatttccctgatggacgcctcggtgtcgatggatatagaggtgtctccgctgcctctctgagaggaagtcccacccagaaaggccagcgtggctgcagacgggcccagcatgttacgagaccccttctcagtaaaatatttttctggtctctcttctacctccttctgctgccgctccagctccttcatggggatctcacgagcctccgcgcgggcctcccgttttgcggcgagccgggcctccgccagcctctgcgcttccgcgctcaaacagtagatctcccggctctgcgtggccgcggggctggtcaacctgctgggctcggcccgctccacccggcgggaaacgctcggggaccgtgccggagcccccccccgcgggccgggccagggggcgcgcgctctgtccgcggagacggagccactcgccgcgaagtgaacgctcgcgcttccggggccaagagccagcccgccggggagcggctcgcgggactgggctcgggcgcagccggcaggggcggggcgtaggtggccgcgggctgagcctggccgggggtggaatggcgcgggggaagcggggctcgggcgcctccgcccgccccatggcccgccccgccccacacttgcaatttttttacattactatggtgtgaaagcaatatgaattcagtagaaactgtacctcaaattttgaatttgcattatttcctgggctagcgatatgcagtaccctactctcttgagatgctgggcagtggcagccagccatagttcccagtctgccacacaatcatgagggtaaatagctaatactctgaagttttcaacttacagtattttccacttatgatggatttgtcaggatgtaatcccactgtaaatggagaactatctatatgcatgtttttacaaaagatacatctaaaacacagatacaaaaagggtgaaatttataggcaaaatgtaacaaaaagcaaacatgaatgttaaaaattaaaaagctttattagaaatttaaaaataagtgttttaacactgattaaaggctcaattcacacggaaaatgtaacaatgctaatttgtaggtacctgatagcattgtttcactgattaaactacaagaagaaatagacaaaatccactatcagattatgatgtatttttatacactcccccagtaatttagatagcttgacctgaacaaaccagtagggtaatagatttaagtaaagcaattaacaagttttatctaaatgataaatatagaatactcacttctacagaatatatattattctcaagcatgtatggaacatttatgaaactgtgtccggaattggtgggttcttggtctcaccgacttcaagaatgaagccgcggaccttcgcagtgagtgttatagctcttaaggcggcgcctctggagttgttcattcctcccgatgggttcgtggtctccctggcttcaggagtgaagctgcagaccttcgcagtgagtgttacagctcataaaggcagcgtggacccaaagaacgagcagtaccaagatttattgcaaagagcaaaggaacaaatcctccacagcgtggaaagggacctgagcaggttgccactgctggctggggcagcctacttttattctcttatctggccccacccacatcctgctgattggtccattttacagagagccgattggtccattttacagagagctaattggcccattttgacagggtgctgattggtgcgtttacaatccctgagctagacacaaaggttctccacatccccactagattagctagatacagagtgtggacacaaacgttttccaagtccccaccagagtagctagatacagtgtcgattggtgcattcacaaaccctgagctagatacagggtgctgattggtgtgtttataaaccttgagctagatacacagtaccaattggtgtatttacaatctcttagctaaacataaacgttctccaagtccccaccagactcaggagcccagctggcttcacccagtggatcccgcaccggggccacaggtggagctgcctgccagtcctgtgcgtgtgcccgcactcctcagaccttgagtggtggatgggactgggtgccgtggagcagggggcagcgctcatcagggaggctcgggcggcacaggagcccacggaggcggggggaggctcaggtatggcgggctgcaggtcccaagccctgccccgcggggaggcacctaaggccctgtgagaaattgagcacagcagctgctggcccaggtgctaagcccctcactgtccgtggcttgtaggccggtcggccactcggagtgctggcccgctgagtccacgcccacctggaactcggactggcccgcaagctccgcgcacagcccgggttcccgcccgcgcctctccctccccacctccctgcaagctgagggagccggctctagccttggccagcccagaaaggggctcctcaggcgcggccagagtgggcgccaaggccgaggaggcgcggagagcgagcgagggctgcaagggctgccagcacgttgtcacctctcaagacctgactacaaacttagccacaaagaattcctcaacaaatgtcaaatgattcatgaaagtaatatatttttatatgctcattgtatgaaacttgaaaaatacaaaaaaaaatgtacagaagagaacaaaaactcacccacaacacttaaaggtaatgattgtgcacttggtttgctgggttaatcccctcctgctctatattaggttttttgttttttgttttttgtttctgttttgtttttctttttcttttctttttttttttttttttttttttgagatggagtctcactctgtcatccaggctgcagtgcagtggcatgatctcagctcactacaacctctgcttcccgggttcaagcaattctcctgcctcagcctcccaagtagctgggattataggcgccggctaccacgcccagctaatttttttgtttttagtagaaacgggttttcaccatgttggccaggctagtctcgaaatcttgacctcaggtgatccacctgcctcggcctcccaaagtgctgagattataggcataatccaccgcacctggcctatattgttttaaacagaatgagatcacattagatatgatttgagatttttttgttaatcttatctttttcacttaacataataagcactttcccatgtcattaacaattctttgtaatcctattggctacataatgttccatcaattagatatgccatatttccttaaccatttccttattattgaatattattaggttgtttccagttttctcagaccataaacagccttgtaattaactttgttgtatttacaagcatctttcatccaaggacctcaaagcacttaagtatgatctagtttgctttctagtcaggaagatggataaaaagcatattgattcctttttctgccagtaatacatgtccgcttctaaccagtgtattaccttgagctgttttattcataatcaaggcaatatccaccaccttctattctcttcactgcagataggactgactttcccacccagcccaagtacgacacatggctacaggcagcttctggcttagcctgaggcaaactcaattacaaacagcctgaacacactcacctgggtgtgatccccacagaagccagcagcctctccctccagcactgaaacttttgcaagaagtattccttagaaacatgctgtggctcatcaaaacttcataattcatctgacattcatttcacgggtgtatgtgaaatgaatgtctaaacatgaagtacactatattaatatttccctgtaattcgttttggttacagaggagacccttggtaattatttttactcttctattttttaattacaacattatttaacaacttattttgaaacagcaaataaggttaagtcaacatagttcatcaagttcagcaagaggaaatagcaataattcagttgtgcatttcagaaatgaaaatgggatacagtagtttgctttgatgacaacacaactgcctttatatctagttaattgtgtgacgtatgggacactaaaacttgtttgcttgcatgtttgtcatttgatcttttgccataaagtaattcattttaattgtctgttcacaaaaaaattggttcatgtctagcgagaagaacacctttctttcctctgtagtctgtctggtccttcttccctgaacccccatcttatccaaactcctgtatctcactctcctcatgctccctctcaaatacccctgagtgcagttaagtgataatggaagtgagtaacatgatgaccattaccatctttaatgttttccaattctcagctcccaactccactagagccaataataaatcatgcatatttccagatagtgagtgaacctggttctgaaatgtacccctcccaacaggtttttctttgtttgagacagagtttggctcttgtcgcccaggctggagtgcaatggcacaatctctgctcactgcaacctcctcctcccaggttcaagcaattctccagcctcagcctcctgagtagctgggattacaggcgcgccaccaccatgcccagctaatttttgtatttttagtagagacggggtttcaccatgttggccaggctgctctcgaactcctgacctcaggtgatccactcacctcggcctcccaaagtgctgggattacaggtgtgagccaccgcgcctggcacaaaaggttttagtatcccatttgtccaacaccctcaggcatcactcttctctccattttggttcccacattgactgccccatgccccaaccctagggcaggcaaaaggggtgcaggtcactagaggctttcagcttctttgcttttcatttccctggggagaaaacgggtcctgaaaataatctctcacttccccctttaaggagaagagtagggtgggtaataacaatagctaaaaggctagagtttagggaggtgtagagcgtatacccggtataacagtatagtttagagaggatgtggtatactgtgctgagacacgcaggggctcttactatctgcatttcacagataaggagatgaggcaaacagagaagttaagtgacttgcccagtcatatggctgattaagtggtgagctgggtttgaatccaagggctgtgactccagggcttcaccaatgggacctgcccagtcatatggctgattaagtggtgagctgggtttgaatccaagggctgtgactccagggcttcaccaatgggaccaaatgctggtctaatttcttcattcctcattcaaccaacagatcattcttgagcaccaactatgggctgggctatgatcagtgctggggagctacaggtgagtttaaaaggtctccagtctccaagaactggcaacctagaggatagagccaacaggaaaggctgcagccccgtgatgtgagtgctactggggaagcctgctgggtaccctgggaggcatggcaagtgggcatcctcagagaaaaaggaaacactcactccccaagctcgagatgtcccctcttcttgcaactgcttgttcagccagattcccactaccggcagagcttccggaagtgacttacctcccctggcgcctccggctgccctgaagtgtgatttgcacggggatgctgaagggctgcatgaggccaggggtctgagaaaatggctccctttcacctgagtcatgcccctgcgggcgcaagaaaggtgaagcttagacatccacggaagtggagtcccagcgggagcccccagcccccagcgcagctgcagccattagaagccccccgccttcctggagaggtgagaacttcaggcaggctagccacgtggttctgcagactcctggcaaggcggagcggtcagttctagatgatcaagaaggacctgcgtggtttgctgcagccgaagctgcttctctctctttgcactgtgcttgccgccacctcatcacctgtgtttccgcctcggcagccgggagcatcgccatagagacctcaacgcttgtggaaagttctgaggcccaaggggaccctctataattggtgagggacgtactcagttcaaggtttataagaagaggaaatgttttgccctggccgcgtttccttttccacgtattgtctgttagagtgcaagctgaaataatgggttttctagttaatggcatgttccaattaagataattcgcttttaaaccatatgtgatttcccaatttttcaagatacaaagggccataaaataactcgccattaaaattatctcaaattttaagaaaagctgtatcaaatattattttatctttctctgatgacttaaaagacatttggggatctttccacactcccaaattaggaacatcaattaccattatattatagtaccacacattgctacaggcacctgtagatgtggatgacagaatgccaaagagaccatgtttgctgtatgtttttcagtcaaggcgatattatcttaacattttccaagatggtgtgggcaagaatgtaagcgtaatctcatctataaatatccatgtacatatagctatataaactcttacttgcagtcattttaatattgcttaataaaaatatatacttaatagacttttcatttgtattatttttctatttctattttataaaatatttgtttgggtttttttgagatggagtctccctctgtcacccaggccggagtgcactggctcaatcttggctcactgcaacctccacctcccaggttcaagcgattctcctgcctcagcctcccgagtagctgggattacaggcatgtgccaccacgactggctaatttttgtatttttagtaaagacagggtttcatcatgttgaccaggctggtctcgaatgcctgacctcaagtgatctgcccgcctagtctcccaaagtgctgggattataggtgtaagccactgcacccagtccgaagtattttagtgaacagatgcaatttggaataaaaaataatgataacaactggaatttcttctttctgcctccttcttccaacttaaccttgtatatatggatagcttttccttttcagacttatttgtgctaataaatttcccctgcaacttggtaactctcttcgaagaagtgtgtgatttgctgctgcttttatgtatttgattcaacctcagaaatatgatcattttttagtccatgaggatcttgtcacacaaaacttgcacctgcctttaccagagcctcctggtcattcttatcttatgattccggttccatttaaaagaaaatactcatggacaataagtgagaaggagcaacatagctttttgccctctgaactttttccctaacgccccttcacttgataaccaactggcctctctgtccaccaagtaccacactcactccactcttggcctgaaagccaagccccctacacacacacactccattcaggactcacagcctatctctcaagaagaacctaaagtggtcggtgtgagttgcaatcccaatgtgtgcattcaggaacacagcaaggctaagccacttagaatgcagtgataagagatgccaggcactgtacctctggtctcctggaccctccctcagcttattccttcctctgagtcactaaaggtcacttcctgctccataaaacagcaaccatgaattaactgtcaagttcacaacgtgggccccctcccaatctgacccagaggctttgacactgggttcaaattctagctttgtaactgcaaggaaccctttaaaaacttcctgccctgcttttccagagtaaaaagggagtaaataaaaactcagtgtgagttgcaggagcatggaaaaacttagtgtctacaaactgttgtgagatctatatatgaaagaggctattactgcaaagtgctagcatcgtggattccagattccagagtccacaatcatttcttttgcatttagtagatgctttacttaggggaaaaaaaagaaccctctttgcctttcaccatactggagaaactacttcctcattgtttttcacattctctcaattaaatatacaatacctattatggctaagaattattttgtagctgaaattctccatgttcatgaaaactatgtctgtgttttccaatttagagatgcacaaatcattgacaacaacctaaaatttacacaacagcctatgttctttgcgtgactatctatatttgttcgtaggagaataagtaaacccctaactggacagttattccaatatggagaatttttgctgatgtgagcaagaattcaaactgtcaaaagtaaagtcacatctgatcttacattctctttgcaggaaaacaaacaacaaggaagtatgatctgtgccacaaacttctggagccttcgatgggatctttcctttcctttaccctgattattatctccagccatcttgctaatcaaatgggcacctgactgcctgaactaggctcacatcagagaaaccagcgtcacctctgtgcagatgcttttcctgctctgagtgataatactagtggctactatttatgagctagttacagttctaagtctatacaaatgttaattcactttttgggctttttcaagagcagagagctacactgacttacacaagctcacaagagccagagaacttggcctatcctggcatacaaacaactcgatggatagtgaggcagaaactaatagaaataatagctgaaattctttgacagttcaacagccctcaatactttgtcttgtttgaaatccactgtgatcaagtctttaccaggtggcacttgctacagatacatttcatattttaagttgaggtaattgttctactacatgagtggttcttgaactcaggtgtgatcctctgttaaatacagattcccaggtcccatctctagagattctgataaaacaattagggtaaaggacccaagaacttgcattttaaaaagcccttcatatgatcctaacacaggtgaccctacatttatactttgggagacatcagctcacattatacagtaaatagaccttggaggcctgggcttaggaacctaagcaccatttctagtctcaggttatgctgcctccttggaactcagcttatttctctgtgcaatgtgggagttagagcagatgatttaatgtgcttttaagatctgcctttaagccgggtgtggtggctcaccaccgtaatcccagcactttaggaggctgacgcaggtagatctcctgaagtcaggagttcgagaccagccttaccaacatggtgaaacccatctctactaaaactacaaaattagctggccatagtggcgcatgcctgtcatcccagatacttgggaggctgacgcaggagaatcacttgaacccaggaggcagagattgcagtgagccacgatcagatcgtgccattgcactccagcctgggcaacgagagcgaaactccatctcaagaaagcaaaacaaaacaaaaaaagatctgcctttgagatccaataaagtgtatgaaaccgtaagtttgcttgcaggaagcaggtatcttctctcctggagtgacaataatgcaaggattcccccatcagctgctgagaggcagcgctcacccagaaagaagagaattcaacaactgcatgcccaacccaactttccctagacacataatgataacttgggtgccctgagtaaccatgtgccagggattgtgctcagtgctatgagaacataatgtccttcagacacagaacttgaggaggtaggaactttttgcgcattcagcagatgaggacacagaagaccagagagtccgaggaacttgtgcaaaaatcacaaagtaacaagggctaggtccggggctccagaacagatcacatccaaaagtccatgcttctactgacaatattcggcctcctcgctcaggaggagcttgggcttattcttttaagtgtcttattctcaaggcttgaaggagccttagccctttgcgccaggaatgttgctggccaagttgttatacagacaggatgttcatagctttttataagtctgcatgtcttgatcacttttagataaattctattccggatctgatgaagcccccattcttggcaagtgatatctgatcatgaattttgatgcattcctaaatgttatagaataacccctattaataagaacacaaataacctgaattcttaatcaattagaagttattttattttgttttttttctgtttcactttctaaggagaaaaagacaaagaatagaaaaataaatctatatccagtgcttaattttttttgtatgtgtgacagagtctcactctgtcgcccaggctggagtgcagtggcgagatctcggctcactgcaagctctgcctcccgagttcatgtcattctcctgcctcagcctcccgagtagctgggactacaggcgccaaccaccacgcccggctaattttttgtattttgtttagtagagacagggtttcaccgtgttagccaggatggtctcgatctcctgactttgtgattcgcccgcctcggcctcccaaagtgctgggattacaggtgtgagccaccacacctggccccagtgcttaatttttaaaaataaaatcccaggccaggtacaggggctcactcctgtaatctcaacattttgggaggctgaggcaggtggatcacttgaggccaagagtctgagaccagcctggccaacatggcaaaaccctgtctctactaaaaatacaaaaattagctaggtgtggtggcacacatctgtagtcccagctact

SEQ ID NO: 63 - DNA, 43649 bp, Mus musculus
atttagggataggggtttcctaaggaacaggtcttttttgtacatttatcctgttcccattggttggggtattcaactgtggcagggcatttgccttacctaacattcatgtcttttttttttttttttttggtttttttcgagacagggtttctctgtgtagcactggctgtcctggaactcactctgtagaccaggctggcctcgaactcagaaatccacctgcctctgcttcctgagtgctaggattaaaggtgtgcgccaccgtacccggcaacattcatgtcttaacttgccaacccggatgtaagttccccacgtacatgtttctgccaagtaggatgtaggctcccagggaggtcttggaagcttaaactttactcaaccctctactcaaaatggaagtcttattccaaatagcttcttatattggtccaggtgtctgtcttatgtcggggtgcatcccagggtcagcttattacaggaagtgctgctgggtggttagttcacgtccaagtttattgtagcttattgggttctctgtatagccttggatgttctggaattagctctgtaggccaggctggcctcaaactcacagagatccacctccctgtgcatcctgggtgcttgggtgctgggattaaaggcatgtgccatcacctccagcttaaactttaaacctttaaactcatcagggagttcaacttcattttaacgggacacaagtacacaataaagatggttggtctgagtagaagcggaaggggccagcgctgctgcagaagtgcaggcctgacaacagaagcggcagaggggacaggcggcctcagaggcaggagcttaggccagggtagcggaagggtaggtggctgtgctgccagctcctacattagaacgaaaagggaagacaaaggcaggaggagctttctagaacccgtggttgagcattgctgtgatctagctcactgccctctcaggaaaaataatagaccagcggaactgcttagagaaggtttggaatactctgaatggagtgagcgagcgttggctccgacattttagtagttcaggcaggcatggcggtgtatgcctgtgggcagaagcaagggggtcacgagtccaagatcattctcagctacaaagtccgttggggtcaacctggtctatgtgggaccccggatagacagagaaagggagtggcctgactatgtgtgagtctcatcgtctttgttgttggtttttaagcactggagggagggggtgcgggggggggggggttggacctgtggcctttgacatactgagcatgtggcacagaccaacaggccagccctgagcctgcactctccccatagaacacagatttaatgtagctggtgaaaatgtccctattgtagacatttggtcctctggactgcatctctctgccctttctgactctcaacctgggacctggtcatggaaattgatctgatgagacaaccaagtttaatttggaagttcaggcatagaggaagatttgtccgtggggacactccctctcggttcagaagcaggagactaattacaagggaacacctcagccgactgagagtagatggaacatattgggtaattagcatttccaccctcagggaagcatgaagaagtctcatctgacctttgtgaactaatggacccaaatcttaaatccactttaatactaaaaagacgagtctacaggatgctcacagcacatgagagactaaataggggacctccatttggcttctcagaaatatgtgtctgttaacttgtatatatttttttctcctcagaatctctttgtgtgtctttggttagtctggaactcactatgtaaagcaggctggccttgaatttgtaaagacccttctgcttctgcctccttagtgctagaattataggcatgcactgctaaacctagttcttagtgcgcatgtcctggccctacttcagagtctcttgatgacagcatgtggggtagctctcagctgccttaatatttgagtagaatattaatattaggaatcaggaaactactacaggacataggcatgggcaatgtcttcttgaaaagaactccagtaacataggaaactgttccaagagcagacaaatgggttttaggaaaccaagagcagaatgagtggagcccacagcacgtaggatgtgggatgaactagcccactttgaagccgtttgtcttggtgagcattctattgctgtgaggagacaccacaaccacagcaatgtcggagaataagccaagtaaaccctacaccctccaacttgctctttggttatagtgttctgtagtagcaattaacaccctaactaagacgctaagtcttgccttaaacttagctattttcctggcatttcaagtgtgcacaatgttgtcagtttatgtgctgttggagatggaacccagtcttgcgcgcgctcgactggccaggaagaacgacgctgcaacaggatccttctgcacacgtttattgggagagcttgattgtagaggcgaaaagaccctgagcccagaactggtgctgcttacataggcctaggagaggcatgtctcacatctgattggttaacttgtcttggcaaaagaaccttcactgcctatgtatgtgtggtggccagcagtagccaactgccactctgcaactgccactctgcaacggcttcccacaacccagggtttcatggatgcttggcaaacactttcccaacagaggctacctctccagtaccagtattctactttaaaaaaagatttattttatgtatgtacatgtgttttgactgtttgcgtgtgtatgcaccacatgagtacaatgcctacagcatcagataacatagacccctgtgggtgctggaacctgaacccaggtcctctgcaagagaagcatgagctcgttgccacagaataatctctctagtcctcaaatgttctatctcttgaaaaaaaatcttttcatttacaaatgtcaaaacagatcatgtacatgcaaggtcctgaaaagtactcagaggatgggcactgtctttgaacagttttctgaattctaattccagcctgggaaaatcagcccagaggcaacattgggttttgcctattggaaataatccctaagcagaagtaggtagggaggagatggtttactctattcagcattatgtactcctgctgctcttagtcactgttctactgctatgatgaaacaccatgaccaaggccatttagagaagaaagcatttaatcatggccttgcttacagtttcagagggtgaggccatgaccaccatcataagagggagtgcagaggcaggtaggcagacaagcgggcacggggatggagtagcagcagagggctttacattcagatctgcaggcagagagagggagattgggctagatgtgaacttttgaaacctcaaagcccactctcagtgacacacctccttcaagtgtggcagtctgagtaaagaaagctgggacaaagtacagaatgttcttcccacagtgtggccttctagaaagaattacataaactgtgataaattaatgcacttgagagcaaggtcatgaagggatgcctggcacgtccacattatccctgttgcaaaggcaaagaaaggctcaggaagaatattcttggcttgttcacatgaccaaagatgataagatgtggcacaccaggagcattcctccagttcttgcatttacccaagcttacagtaaatttcaactcacattttgcctgctttataataaaaatgagaagtgattggctgtgtactatatcttagttagggttttactgctgtgagcagacaccatgaccaaggcaagtcttataaaggacaacatttaattggagctggcttacaggttcagaggtttagtccattatcatcaaggcatgaagcatggcaacatccagacaaacatggtgcaggagttgctgagagttccacatcttcatgggaaggctgcaagcagaatactgacttccaggcagctaggatgagggtcttagagctcccactcacagtgacacaactacttcaacagggccacatcttctaatagtgccactccctggactgagcatatatgaaccatcacatattccttgagctaaaaaaaaaaaaaaaatgagacttagctttgctagtcaaggggtgggttgacatccattgaagccatgtctactccagcaaggccatgtctcctttcctaaacattctaccaattgagatccaaacagttatccaatgtgccatacctgcatagcccattacgctgcaagtgatgcatagacctgggtcacatccactgactgtgtgaaccaacccaacgggattgaactaaagacagggacatctttggaaaggacacagattgtgctctggtacctgtagcatgaaactggcaagaggtgagcagaaggaggacaccacgggtgtttcagcagagaagacttgacctaaacactgattgaaggtgaagagcctgctaatggtttccaaggcatcttatgggcgcctcatctctcttcactcagggttcattgtatgaggacattgtttaatgttcagaggacattggtgggggtggagtgagggtggagttggagagggtggcatgccagctccatctagagtctcaagaatgaggtttttccctgatcattatatttacatttcaaggtttgggtgtcatggtggtagccattcaagggtaacacactattctcttttacccataaaaaaagagctgaggcatttgtatacctaagacccctagtgctgcttctagtgggtgtcagtgcctgagatgacccacaaacccgtgtgaaatctcaatgtctaaatgcaggggcatgtgagttgccgttattaatatatatgttaccttggatttattatgattattatttatttaatgtacatgagtacaatgtagctgtcttcagacacaccagaagagggcatcagatctcattttagatggttttgagctgcccatgtggttgctgggaattgaactcaggacctctggaagagcagtcagtgctcttaactgctgagccatcccactttggattttgggttttttttttttttttttggacagagtttgtttagcttggatttcaagaggaatccagtctctcaggacagggaggacaaggtggtgggcaaggaaggtgcttcagcagaggctctggtcacgatgcatctatactcaggaagcagagaaggggatgggtacatctattttaatctagttgaaatccatttgatgttggctttgcgtaaatgatgacagtctcaactattaagctagtcctcacaccgctcttttcaaccttaaatccagactttctgccatctaacaaatgaaataattgaagcaaagagctattggctggcagagaaagaccccaaatagaaagtgttctcactttgagtgtgatactgaacccttttgcaatcatagcatctaatttcttagcatatcaatgtttgacctatactatcatcttttaaaaggaaatcagctgtgtcctttctattggaaaatggagttaaatttaaagttattgggatataacactaagttttgtattaatgaagtattatataaaatcacacctttgacttgtgtagtcatatatgtatatatagatatatatacatatatatatgtgtgtgtgtgtatacatatacatacatatacacacatatgtatttggagagagagagagagagagagagagagagagtcttaattgcccacactggtctcaaactcaaactaattgtgtagccaagaatgaccttgaacttatggtatctctttcctaagtgttggaaaggtgtgtgccaccaccacaggccaattcagctcctcctcctcctcttcctcctcttcctcctcctcctcctcttcctcctcctcctcatcttcctcctcctcctcatcttcctcctcttcctcctcctcttcctcctcctcctcttcctcctcctcttcctcctcctcctcttcctcctcctcctcctcctcctcctcttcctcctcctcctcttcctcctcctcctcctcttcctcctcctctttcaatgttttgaagacatgtgcacacctgtaatctcattacttcaaaggtggaggtggaagatcaacaggtcaggctattcttgcacacagtttgagataaggctgggtgagctatgtgaaaccctgtctcaaaatattgtcaactaagatagtggctaccagcaaatattaagttaaatatatattccacactatcttttactgaattgtaaggagctactatctaaattccttgcaaggcctcttgttaggctcatgtctgagtgctgagattgtgaacttttgctgctaaaatgccttcccagggggagacagaagcactgtttactcttctaaggtcccaaagacaaactgaagtccatgccagagaaccaatgagtttactgggcttccttacagagcccagatgaggggtcatctacaggcgtatgggtgctgctttcccagcaggcacctgataaaccttacccagcagggctgagggtccccacagccatagatggagtcctcccttcccccagtcttccctggccaatatacttagcctctctctgagatcatgtacaatgaaagcggagttgtagacagcaggtgctagagaggaactcagatgacagtctagtcacccttcccaccccgccatgagagggtgtagacagacacaagtcaagttgggacaatgttttgcaaggggtcacaggtaaatgtcccaagatggcagttacttggcttactcacaggaacttccaatgcagagaaccttctgcacactccacatagcccctaaacctgtgatcagccaaagaaagccaactgatgactgtcttgcccctgttctggccctgtgggagaaaggttggcatatctaaaggattaccaggtggctatggtgattcacaactgtgggtctggggcagtgaataaaaagatgtgtgactcagccttcagctgaatgtagtgaaacactgaagcaactcattaagacagagtgcagtaggactgagcccagctaaatgtcactcccttctagtgatggagcactcattagctgttgcgccttggactcctgagcctccttcctctgcctccccagtgctgggaatccagaagccatggtgttgtgtcttcttgccaaccaggctcttgtgtctgcctggttatggtgtcttgctatctgttccattggctgctccttgctgtgaggctctcagctcactatgcagggcctacggcttcccatggctttccccaagcttgtttgctttcctttcttcaccacgcccaagcatctggattaactgtgcttgggtctcgatttctttatgtctccacaccagaatggaagttcctggtgggcaggaacttctctgcttatgctcacagttacgctgagggcctgaaaacattctggccaaagtgtgtattcactaaatcctttctagaatgttactgtttggtctgtgttgctggggccacagcatgctgagctgaccacatccctagggaatgtaatgaattagttatgctgactgaactggaggctccttctttagcactctctgctttgtctgtggggcagacttctgtccagacctctcttcttgctgtcctaacatctttttttttggggggggggcaggggcgagttctctacatagccctgaatgtcctggaacttgttatgtagactactctggccttgaattcagaagtgtccccccccccccccgccaccctccacccccgctcctgccaagtgctggcataaaaggcatgtgctacaacatccagtgctctcctaacacttttaagcttttaattttcctctcgtcacaaagcactgtgcactttctgcttgcctgcttcctcccatcctgcaccaggagctttagttagcaggaatttagtgagtctgtctgtgagtctctgatacagagctatagttttttgctagtgagcctttgatttgtgtgtattttaagactttatgtatcccacactggcctccaatttactaaatagtcaaggctggccttgaaccccgccttccttccccccccccagacttcctccttctaaaccctgggattacaggcatacgttaccacacctgatatatgtaggactggagcacaggatttctgcatgctaggcaagcacactgccacctgagtcacttccccaactctgttccaaatttacttgtgtggggctgtgccagttgagttcatcaggaatctgaatatgtgactgacatacaggcatcaaagctcaggcttgttgactatggccaaactcgtggatttcaaagccattcatatgttaaaaaccaaatttaaaaaatgcaagtgactgaagaatggagcctttgcgattgtggttggtacactcattagtcacggttcttgaaaggaacagagctggtagaaaacgtgggctttgttaggttgacttccagggtgtctgaaggggtctctgcgaacaccttatccagcagatgtcatgatccaagagaggcaaaaaaggcaatttagttcagcccgactcagtagccagtgatgcttcaaacttcaaaagtccaacctggaagagtttattttaggcacatttaaacacagcacagtttggcaaagagtttcctggtgataattaactcaatcccatgtgtaccacaaaagcttaagacatgactatgtcaaaactttctgtaaaggacaagtgacagcttccataaaaatggatcctatagattaactgaggaaataaactcaagttaagagccctggggaggatctggtgtggtctctgtcacacagggaatgaaaaggtcacaaggctattaaccacatctgctcctagtcttctggtcagaaaacaggttacatggctccctttgaagagagaacccgcatgtttaacattcctggttctgctggcatttatctgtgagcacaaggatttccatgccacctaagaagtccaacaaagactatctcacaccggcaaggttgaaaatccagtagttgctcgatccacagggctggaagtatcagcagtcccagtctggcgctagctggttttcagtctatacactggaagctcaaagaagttggttctcatatcggcaaaggaatgccacagcggtaggatggtgaacttgccatcatgagtgaaggcaagcaggttaaaagcaaagcttccttcttcagtgtcctttcatctgggccaccaccagaaggcgctaccagcattaagggtgtgtcttcctccttcaagtaaccccttacaagggatcccagcatgttgtgttctagttaattccagattcaatcaagttgacaaccaagattcgtcaccacagttggtcatggcacagggactcccagcattcttatgggccctttccttaagtgtatctgtgtcatcctacctaagcccacatttacttgaaaaatggaaagagtgtggtgtcctgtgccacttggggtgagtgcagagttgtggtctcagctcctgatcatctctatactcacctagtttcagctccagtcctgagcttggtaaacttgcctcgttgctggggagggcatctacctcttcctgtctatgtgtgacttagtgacatggcctcgttctcgtcacatcttgtcacctctcctctacacatcagtttactagctatgacaccagacacgtgagattgcaggacgcaggtcactcggtgatctgatgtaacaccatccctaggattctattttaattgggaaagaaaatcagccatggagccaattatcatttttcctgtgtcctaaactccatgcatcctgtaggagctgagaaggatgaataagagaaatgtctttatctttgaagcgacactactctgcaggccaacagaagacaagcatcggtgatttcagactcaccaccggtagccatggctaccatggtaaagatgggaaggttgactacaaactagttaataactgaggaggagcaaggcagagtggagctgcaagaacaggagaccggagaaaaaggctgcctgagacaaaagtatgagaggggctggagaaatggctctgtgtttaagagaaccaaggttcacttcccactacccatagccacaccatctgacatgccagttagttctggatctgattctcttttctggcctctgcgggcactattcatgcctgtaaacatgtaggcaaaacagtcatacacattaaatgaacaaattaattcattacaaatgatgagatatgctctttctctctctctctctctccctggtggatatggctcaagatgcgagtgctcaattgttccttcactgtgttatcatggactctaactctctgaagctgcaagcccagttaaacacttccttgtagaagttgccttggtcatggtgctttatcacggcagcagaaaagaaatgcatacagttagaattcttcagttgtaagaatagaattcataggaggttatacagctggccctgctcaagctgctttcactgggtcagctggtctcctgtagcctgtctggacgcagcaggcaaaactaggaaagggcaaaccgaaaggttcacacgtagcccctcacttctgtcctattctccaactgccacactccctatagaaagtccgtaggttcctcccgtccttgcgagcacctcttccccacaggagagggttcacccttcgatgttttgaaagaagtagtatccattttctgttgaggtcagtctggacatttgctgcctcctgtgtctttaatctgcttcagaaatctaacaaatatactgtgataaatcaacatgacccaaaacaacctggggagaaagggcttatttgtactgtatacacttggacaccacagttcatcaccgagggaagccagggcaggaactcaaacaggacagggacctggacacaggaaggggccttggcggagtgtggcttacttgttcgcctccatggcttagccgacctgcttttttttttagcacctagtgctacctccctgagctctgaccctcttgcctttgccttctgagtggaaactattgtgccagctgtaaatctaattttaaaaattaaacgaattaatattatgattgccaggtgtgtgtgtgcatgacctgtttgtgcgcttgtgtggaattcgaaggacagtttggtagacttggctctttcaccttccaccttcactggtgtctgggcatggagctcaggtcaccaggcttggccagatgaccttttacccactgagtcacctcacaggtttgtaaagctattcttttattcagaacaattttattcagaaaaggctactatattaagcctgtacccaaacataatattttgaaaaaagaagggaatgtgtctgggacagaacatttcctcttcttacacgttgtgtattgggtatgtctgtccccaattacagagtccctggggcctcagaactttccacagtcctattggtctctatgacaatgcacctggtgaattcagaggaaacacaggtgtcaggtggaacaggcgccaggcaatgctgggggagtgttgttggctacagaaccacctaggtactccatgagcaactatacctgaacgttgctttgcagccaggctgcctgagttcccacctctctaggaaacttctagaggaccccgccagctctggatgcagcaggggtcctggtgtctgtggctaggcagggaattggcaactccctctgggactccacttccgatgatgcttaagcctcctgcgctctaaaagggcacaactcaggcggggagcatccgatccagacatctcctggcctcatgcagcccttcagcatccctgtccaaatcacgctacagggtggccggaggcgccaagggaggtaagttccccacctgaatctcccatcagtgtgcctcctgctaatcaaggccagtgtggctacaatgcggcatgctgaaagctgagtttggtaggtgctttgaggaggccagcttgcaatgcctcccaggtacccctaccacccacctctaccccacccccacctttggttgctgttttgagacaggctgtcatgtagcccaggctggcctcaagttctctatattgttaagaatgatcctcctgcctcctgatctccagtgctgggattccaggtgtggaccactctctacctgggtacacaggtgacacaggtggtgtgggctatggatcccagcactgaaagcagtgctcagcaatatatctcttgtacgaaagaacaaagaaatgacaccagcctttggtcttgttggtgaagccttaatggtccagaccaagattcaggttccagctccccaccgaggcagctgcatgactctgggtctttgcccctcatcttatcttgaaatagagatacttgtctttgtgtgctctagcacggtggtgccttcctggaactctctaaactagacaggcctgcatatattatgtacattctagctttattattattattattattattattattattattattattaagacagcatctcacatagcctgggctgactgcaaacatgctctgtacctgatgctgactttgaactgctctttctgcctccacctctcaagtgtagagattactggtattaaccacccaactatactgagtaagtgggaagtgaaaaagattattttaggacccttctccccaagggtatgcaaagcagaagaattttgaagttcagaggagtggggccttgaactcctgtgtgagagttggggcagcaggacagtcagaaatgggcagaggagagccataccaggcttttgaaatatgatattagaaatgttctggtacattcttgggaagaggacaccttgaagccaagctctcccactatagaaaacttgggtggctcttagcaatataagcagaactgggagctgggtactcattaacctccagctttaactactctactgggtatttggtttagggcatgaaggagaggcattggatgggttgggcgtgggttccaggctggtagaagggtcagaccacaaagtagagaggctcgcccagctatgagctaatgcctttatgagcaggcaattacagcaagtcgcttcgtggcaggagacagaatagcaaccaagccagcgagtgaacgtgaagatgctcctcatgacacaagcaaggtggaagacagtccagtctgcccccaacgcatccctatgctcacttcccttcctgacatgcagaggtggatagcttcttattgctcccaccctgcacttggtggtggctttttatcaacctcacttgctgtttcacaaaaagttgctaagcaattttgtatttttttttaaaaaagcaaatacccagaaagattcaggcaatgacaaaaacctttcagctgaaacaaacttcagggaggtagtagttgaatgcgcatgcccagcgtcacaaacgcatggggatcctcattaggtgaattgtgacgcgtggctgagctacctcgagttcttgctcagttcagatgttaaagggcaaggctgctggtttctgtccggatcacacccaggcaagctatggagctagagctagactgttcacgctgttagcaactcagtttgcctcagcctgagaaggtggcatgggagcctcagctgtgctctgatttgattggaaagtcatcctctgcagggagaactctgcagggaagactgggcagggaggactgggcagggaggactgggcagggaggactgagcagggaggactgggcagggaggactgagcagggaggactgggcagggaggactgggcagggaggattgggcagggaggactgcgcagggaggactgcgcagggaggactgcgcagggaggactgggcagggaggactgcgcagggaggatcaagcaaggaagacagggcagagaggaacgggcacagaggatactggttgatgtcttcaggacatcaatattcctggttgaaaaaaaaattaaaatgctactggctcatctcactgactagagagcaaatgagatcattcttaatcactctgagaccctgggataaaaagtgtttataaacactactgagttcaccccagacagtactgctgcagtctcaaaaactgaagacagccagtaacgttcaactccgaggatgcaggcaagaaccgtacgccttacctgattgatggactgtgaaatcacagggagcttacaaatcattgttaatggcatggaaattaagtgaaaaatacaagatgaaaaaaaaaaaccctatctaataaaaaactctgcctaatgtgatcacacttgtttaaaataacattaagacaggaataatccagggtgggaatgtacttaatatgacaagcttgaagagttggagagatggtggagtggttaagagcattgtctctctctgtctctctgtctttctgtctctttctgtctctgtgtctctgtctgtatgtctctgtctctctctgtctctttctgtctctctctctgtctgtctctgtctctctctgtctctgtctctctctctctgtgcatgcatgtgcccttggagcctagaagagggtgtcatatgcctcagagctggaacttcaggcagttgtaaattctagtctaacatgggtcctctgcaagtgacacatacccactcttaactactgagccagctctccagcccttcagcttgcttttgtgacattttgattgatacctttctttatgtctgtgttctagatttataagaaatttataacaatattatcgtcttacacccaactccttctcttcctatctcttatgcaaggtctcgtgtaattaaggcttgcctctagctcattgtgtcgccaaggatgaacccttcctgtctccagccctaactgcaggaattccaggcctgggtctctgcttgccttcttctatttcctttagcctctgatttaaacatctttaacctcaattttaaaagccaaatgcattacgctttttatattttgtagacccagattcttggttaataatgaccatttcaggtatatttcattgataattaagtctggtcactaagcttgttcacctgcttcatctctctttttcttttttgagacagtgtcttgctttgtagctctggctgaactggggttcactagataggtcaggttggtatcaaaatcctagaaactgggctgaggatatggatctgtatgtatgagctcttattatacaagcatgaagacctaagttcaaatcccaagaacccatgtaagaagctaggtgtggtcaaacgtctgcctgtgcccctagtgttgtgggaactggaagagactggaggggaggggtgctggacatgctggctgccacggcgtggttccaggtgcgatggcagcccatctcaaataagtaaggtgcacactgatggagcaggacaccagatgtctcacgctggcctcacaaagacgttttataagatcagggcaaccctcctgcctcttgagagttggtgcacaggcaccacaagacaccatacctggcagcttttgctttctgtaactttcttgttgctagaaatcctccctgaatctttttgtaaaggctcattttattttattgtgctctctctctctgtatgtttatgtttgcgtatgtgagtatatgtgtgtatgtatatgtatgtatgtgtgtgtgtgtgtgtgtgtgtgtctgtgtgtctgtgtgtgtaaaagtgctcagcagaagccagaaaaggatatcagaccccctggtgctggaggtctttgtgagtgactagtgtatgtgctgggggctgaacataggccctggaagagcagtccatgccactgacctctgagccatctctccagcacactatctggatttttaaaaaatcatatcagtttggtcatatcttagatggtcttactctttgtgacatattagtcctctatttccttaaatagtgtaaatgtaagattttatgcttttttaagaaacagaaaaaaaatttggtgtggatctgattctgttattttgcttgtttgtgtttacaacaagaagtccttatttctttgtactgtgttctgtgatgtctgagtgtgtacacacactcctcagaactctgcgctgtcttctagaacagggcttgagcagactcctctattgaggagttgacttttctgggtgtcagaggagacagtgttaaattgacttcttagtttgaggtccttggatttgggggagggtggcatccaactatatgaactctagcaatgtactggctcgtatttatagtcccagcatttaggaggctgaggcagtaggatcataagttcaaggccaaccctgctacagaggaagatgctgtctcacctacatagaaccagaacaccaagtgccaactccctgaggactgccacaaggttataaaattccaggggcagttggaatttcctcccccttcccagcatcctactacagaaaggattcttcttgtgcttacgcaccgaagaagggcgtgtgcagcatgtgtacacttccctgaccctgaatttcaggtcctttagggtccaggctccccctgaatggcatattaaactctatacttgggtcgggcatggtggcgcacgcctttaatcccagcgcttgggaagcagaggcaggcgaatttctgagtttgaggccagcctggtccacagagtgagttccaggacagccagggctacataaagaaaccctgtctcgaaaacaaacaaacaaacaaacaaacaaaaaccaacacccccccccaaaaaaaaaccaaaaccaaccaaccaaacaaacaataaaaccaaacctctatactttgctagtccttggtgtgacctctattcctgtcattgtacaaacttgagacccagaaggcgaaactttactctgccttttgctctttgcgcttttttttcttttttcttttaataaaccacagttttacccagcctcaaactcactgtgtttctgtctttgcttctggccccatgcccaggctagagttcgggtttctttagtcctttgtggttttttcctccccctcttacttttaagctctagtcagcatgggcaatgtgctcagttggagtgagtaggtagtgtgccacacagctgaagcatgcttgatccttcagaacacatacacaaagccagacgctggaggaggctgagctaggaaggtctctctctgggcttgctagttagctggcctagcttaactgagaatccccagcacagcccattgagaggccaggtgtcaaaacataaagtggagcgggctggagagagagttcagtggatgaagaaattgatgtgtaactgtgaggacaggaggtcaaccccttagaacccacagttaaaaaaaaaaaagctgggttcagtggtcagtgcctgttaccccaatgctttaacagtgaaatgggtgcagagccgggagtctccagagtctcctagtctggcatatggagtggtcaaaaaagagagacactgtcttctgatcttctgattccatatggaagtgtgcacgaaaatggtgtgtgcacacacatacacacatgcttgtatacacacacacacacacacacacacgcacacacacacagagacatacacagacacacagacacacagacacacacatacacacacaccccagttcaagaaattaaaaattcactgggcagtggtggcacatgcctttaatcgcagcacttgggaggcagaggcaggtggatctctgagtttgaggccagcctggtctacagagtgagttccaggacagccagggctacacagagtaaccctgtcttgaacaccaccaccccccaaaaaaaggaaaaaaaaagaaattaaaaattcctgtgaaggactggcaaaattgctcaatgggaaaggaagcttagcaccatatccaataacttgagttcagttcccagaagccacatgggggaaggaaagaactgatccttgcaaggtgtcctgtatgacttccatacaggagccatagtgtgtatacaaaccgatcctcattacccagaataaataaatgcacagccccgcccccaagtattcttttcaagcaagacttgctgggttcccatcagccatagagatgtagtttcccttctcagtactgccttcatggacagggaagattctccaccaccacagcttgagatgccagaggacagaaggcagaagatgagatcaagtatggcggatgcttttggaaagcaaagcaaaacaaaatgcaactggccattcctgtgtctgggcttgtgctccgctcagctctgaatttcataagcgttctcagcggactgacctgagtttccacacttggagctgcgtttctaagcctcttaaaatgaaagggctgctggaaataaatagctgccgacctcgggaggcagaggaacggaggcaatcggaaaacacagacctgaccaatgggaagccagcatgacttgggcagcttgtccacaagtgggaacgtgggtcttgtgatggcttcaaagggcagaaatgagcatttaaatgagaactgtcatgattttaaagtgctagcaaaggataccaccttagaaaaaacatggagagcagtgtggctggatgctgcccacagtgccatggtgtgtggcggtgatggccttcaccactgagtagataaacaccccagtgaatgaactcctcacagctcctgggagaggagagatgacaggaagcaaggtagctagatgggagacactggtttgtttgcagatggacggatgtggggggaaggagagggaccttaaacctgtgagcagtaggccaggccaagggtctgctgtctcagtcaagtgatagagaggtgggggaggggatgacaacaaagagcaacctcctgtcccaggacgtcatcactcattctaattgtggcttctccagttgtgctttccatacacaattcatgagcatatggagaaatcacgttcagaaaggctgtaggaaccactgaagggtgaacaggcccagaatatgaaccacatatgacaaatgagagccatacccaggcaattctgtcctagccatggataggcatcctgagatgtcaccagggacagcagtcccaacttggtacagtctctcctttcctccctccctttcttctcttgttggttttggttttttgagacaggatttctctgcgtaggtccggggccaccctgaaactctttctctagaccaggctagccctcactcagtgatttccctacctctgtctcctgagtgatggggttaaaggcatgtgctaccactgcccacatatctttattttaaaagagaaattaagaatgttagtgtgtcacttttaatcccagcactcgggaggcagaggcaggcagatttctgagttcgaggccagcctggtctacaaagtgacttccaggacagccagggctacacagagaaaccctgtctcgaaaaaacaaaaaacaaaacaaaacaaaatgtttgtgtgcatgagtacctgtttgtctatatgtgcacctatgcatgcagttgtctgtggagtctagaagaaggtgttgggttctctgactgtagagttttaggcagttgtgagcctcctgatatgggtgccaggagctgacactgccccctacaagagcatatgtactcttaacagctgaccagtccccccatccctcctcttttttttttttttttttttttttttgttacagggtctcatgtagccaaggttggcctcaaaactcactctgaagcctaggctggccttgaacttctaatccccctgcctctatttcctgagtgctgggatcacagacacacaccatcgtgtgttctgcaaggagaataatctaagctagctatgctttccgttcaatacgcatgaagtaggcaaaggtaaaagaacgacactaagcaacaggtagactgaacacaccatcctcttggaggcttgtgatatccaggagaggggacacaggaagcctgctcaagctggacgttgagcctgagaggttccaggtagagcagtattctccccatggacgagccgtccagcgtctggttcccatcaagcattttaatgtcatggacaaacgacagtaaccttgggaacttgggaaggttttacctttcaactgctcagggatacaatgggcttttgtttgtttttatcttcctgtgtatgtgtggtataagtgtgtgtgtgtatgtgtgtttgcacatatatgggtgcatatgtatgtagaggtagaggcactagagtgatgttctgaatcattctgcgtgtgttcttccatagtattcattgaggcagggtcactcaaccaaaccccaagcttactgatacggctactcctatggacagcttgcactggagccgccaccaccaccaccaccaccaccactaccaccaccaccaccaccactcctgccccagcctggaattataggcaactgccatgatgggaacttgagttctttaactctttatttactacatttccccagacccaagctgtgctctgtttttttttttttttttttttttttttttttttgctctgttttttatagactttttttttttttttttttttttttttggaggaggggagttcgagacaaggtttctctgtatagccctggctgtcctggaactcactttgtagatcaggctggcttcaaactcagaaattcgcctacctctgcctcccgagtactgggattaaaggtgtgcaccaccactgcccggctggtttttatagtcttaactgtctaccacttgcctttctctctggcacagacttagggaccagcctgacccagaatacggagtcttggagtgtatttgataaaaaaaccaaaccaaatcaaatcaaaccaaaccaaaacaacaacaaacacctggagtctgggagaagggaatggtccttgctctcagagtccattttcatatcttaaaaaaacacacgatgattagacattataatataaattatgccacactcagctttttatatcttaaaaaaaaattgacaatgtatcattttagtttattttagtagcgtccattcttggctctgagcgtggtatttggggcactgctgggaacctgtgtatgcctctcagtgaaccagactcaggtttgccatgagctaaacactagagctctcttgagctcacacaacatcctttctggcttcccccaaaggacagcacttccggcctcgggcaaaatcaatggagatcccctgaaggtgcacccaaagcttccatcaagcgctggtgaggaccgggccatgctgctgggcgtggccatgatggcttcctctgtactgatgttcttcctgttggggaccactgtgttgaagcccttcatgctcaggtgagacacgggctaagacccagagctcccagatgggtccagccccgcactgaagtccattcccctgagcacaccctggagagcttgcctgttcgtgctggagacagtggtagaggaggtgtgaaatagtcctctgctcccagatggtcacagtccacgcgtgcttctgcacacggctgctgtgccagttgagatgggcatggttggtagcagaaaagcaccgctgctaggaaatgccagctagcttttgtagtacaaccaatttatgcttatccctgactagtttacagataaaagagactccgactatgtatattttgtttggctttgacaattactgggtggatgggtaggtcactctttttttgttttttcgagacagggtttctctgtgtagccctggctgtcctggaactcactttgtagaccaggctggccttgaactcagaaatccgcctgtctctgcctcccgagttctgggattaaaggtgtgcaccaccatgcccggctcattttgatattcttaaaaattatgttagacttttgttttgaatcctgtgtgtatgtgtgtgtgtgtggggtggggggagggccatgcccacatgcttactattggatgccagaggtttcagctccccagtagctggagttacaggaggtttggggctcactaatgagtactgggattcaaacatggatcttctgcacagagcagtgtgtgatctgaactgctgagccatctctccagcacccagactgcctgcttaaacatgtgatgtgtcagggataagggtgcaggatctctgttgtaagctgatcaatctctgaccctctatttttttttttttctttttaactttctacgtatttctggaaatttcttaacgggagcggtgagtgctcatttctgcctcagcattctttgcaatctcagggagtagttacggtttcaaggggacacagcctttctctccacccttcatctcttctttccgtcaaggggacagagaattgcgggagatcaagccagcaaaaccccagcgtgaacagggagacgacagtgaggagtttcacctttatcagaggaactattggtgtcagtttctttagagatttcatcatgagtttcaaatcatgcacctcagtcgaattcatctccaaatcccatcatatccatccttcatctttgcaacctacacccaaaataacacacacacacacacaccaaacaaaaatcaaagcgtagacaacgtctcatcgtggaagctgtagtgtgtcagtgtgttccactgtatgtccctctctccacacatcttcacttgcaaatgttcatgtcgatgagtcactggtctggtttgagagctctggcttctgtgacatcatcaatactggatcctcagcatgactcctggtttttctggtgtcaccctgtgtcatggagagcctgctgctttggatcagcaggacctgtcatttcatgcatctcaaaagtttacagatgatacatattttggggtgggccaattcagagtcttagatctgggcctgggtagtagctgagctgattggcccaccagctctcccttatccacttctccagggcaagctctccagtactgccctggctaggccaccaaatagtgccattggcaggtggcagggtcagctcttctgctcaccgcctacaggtttggctcatccatacccacccctccagagccatttccactgtgctgcccagtcaaggtttgggggcccactcttccaagtgctgcagcctgtgagggtcaacactatggctctcacaccctctggctggctcacccatgcctttgccatcagggcaagtgccactgtattgctcagtgccctgcctcacaagtgctgcagccagtgagggcggggacaggactagctatccccagctctcatgaactcaggatcgctctgctggctaccacaggtagcaagggtggcagggggagggcatcaaccctgcatcaataccacctcactccatgccagtggaggggtagttctgtactcttgccctcagggtcggctcaccagggccagctcttctgtgctgcccagtagctctttggctcatgaccctgtggacagcttttctgactgctggaagtggcgagaagcaagtggcggtggtggtggggatcacctctgcatctctgctatcccatggcagatgagtggcagggttggctctcccatagtcactccttaggcgctggctcacccgcatccccggctgccaggaccagctccactgtgccgcctgggtaaggcactgggtatgttctccctggtgttcccactggtaaaagatgggcccagctctccagagcacagcatctagtgagggacaggggcagttatgtacagctccaggacatccacgtggatacctggcagtggccctggccagaggtagccccatgtgccatgtgctctctttctctttttttttactgtattttttttacacatataagaaataaatgtaataaaccaaatacatggacaagaaaaatacaagaatatgatcatctcaatgaaataaaaaaaaagaaaagaaaaagaaagaaaaaaaaaaagaaaaagtctttgataagattcaatgtgccttcttaataaaagccctatagactaatatccaatatatacaaggagctcaagaagctggactccagaaattcaaataaccccattaaaaatggggtacagagctaaacaaagaattctcaactgaggaatactgaagggctgagaagcacttgaaaaaatgttcaacattcttaatcatcagggaaatgcaaatcaaaacaaccatgagattccacctcacaccagtcagaatgactaaggtcaaaaattcatgtgacagcagatgctgtgaagatgtggagaaagagaaacactcctccattgctggtgggattgcaagcttgtacaaccactctggaaatcagtctggcggtttctcagaaaattggacatagtactaccagaagatccagcaatacctctcctgggcatatacccagaagatgttccaacaggtaataaggacacatgctccactatgttcatagcagccttatttataatagccagaagctggaaagaacccagatgtccctcaacagagaaatggatacagaaaatgtggtacatttacacaatggagtattactcagctattaaaaacaatgaatttatgaaatttttgggaaaatggatgtatttggaggatatcatcctgagtgaggtaacccaatcacaaaagaagtcacttgatgtgcactcattgataagtggatattagcccagaaacttagaatacccaagatacaatttgcaaaacacaagaaaatcaagaagaaggaagaccaatgtgtggatactttattcctccttagaatatggaacaaaatacccatggaaggagttacagagacaaagtttggagctaagacgaaagggtggaccatccagagactaccccacctggggatccatcccattatcagccaccaaacccagacactattgcatatgccagcaagattttgctgaaaggaccctgatatagctgtcttgtctgagggtatgccagtgcctggcaaatacagaagtggatgctcacagtcagctattggatggaacacagggcccccaatggaggagctagagaaagtactcaaggagctaaagggttctgcaaccctataggtggaacaacaatatgaactaaccagtacccccagagcttgtgtctctagctgcatatgcagcagaagatggcctagttggccatcattgggaagagagtccccttggtcttgcaaactttatatgccccaatacaggggaatgccagggccaagaagtgagattgggtgggtaagggaacagggtggggggagggtataggggactttcggtatagcatttgaaatgtaaatgaagaaaatatctaataaaaaattggaaaaaaaagccctagtacaagtaggactgtaggaaacatcttcctacataataaaggttatgtatgacaaacccatggccaatatcatcctaaatgataaaaccattaataagccccattaaagtcaggaatgggagaagagtgcccactctccctactgctcatctataatgtgattgaagcattagctggaacagtaaggcaagagaagggatacaatcaggagaatattaagtcaaattattttcaatggaagattatattatcctatacccaatgttcccaaaatttgactaaaaatttgtagaaattatcaataatttcagcaaagtgttatgatgcataattgatttacaaaatttaccagtcttaatacatatgagtaacaagcatgctgagaaagagatcatggacacactcctcttcccagtttctcaaataaaataaagtatttaggatatagataacaaaagtggtaaaaatcctctacaatgaaaactttaaatgtgtgaagaaagagactaagaaacataccagaatttgaagacctcccaagcatatagcttggtagaattaacattgtgaaaaaaggctttcctaccaaaacaatttactgattcagtgaaatcacaatcaatatcctcatctcattcttcacataaacagtaagaaaaccctctatttgatatggagcaacaaaagacatagaatagccaattagtcctagataagtgtttgtttctatgcattctgctaagtgtatctgtttaagacccccaacttttatacatctgtttttattaagtcaattttgtttgatattagaatggttactccagcttgtttcttggaactatttgcttggagaattgttttctaatcttttactctgaggtagtgtctgtctttgtcactgaggtaggtttcctgtatgcaacaaaatgctgggtcctgattataaatccagtctcttagtccatgtctttttactggggagttgaatccattgattttaagagctgttaaggaaaagtgactgttacttcctgtcatttttgttgttagaggtggaattatgtttgtgtggctatcttcttttgggtttgttgaaagattactttcttgctttttctagggtatagtttctctctttgggttggtgttttccatctattatcctttgtagggctggatttgtggaaagatattgtgtaaatttggttttgtcatgaaatatcttggtgtctccatctatggtaattgagagtttcgctgggtatagtagcctgggctggcatttgtgttctcttagggtctgtatgagatcttcccaagatcttctagctttcatagtctctggtgagaagtctggtgtaattctgatagatctgcctttatacgttacttgacctttttcccttactgcttttaatattctttctttgtttagtgtatttggtgttttaattattatgtgatggaaggaatttcttttctggtccagtctatttggagttctgtaggcttcttgtatgttcatggacatctctttctttaggttaggaaagtttttttctatactttgttgaatatatttactggttctttcaagttggaaatcttcgctctcttctatacctattatccttaggttggtcttctcattgtgttctggatttcctggatgttttgggttagaaactttttgcattttgcacttttttggacttttgtgtgaatggtttctatagtatcttctgcatctgagattctctcttctatctcttgtattctgttggtgatgcttgcatctatgactcctgatctctttcctaggttttctaactccagggatgtctccctttgtgatttccttattgtttctcttccatttttagatcttggatggttttgttcgtttccttcgcctgtttgattgtgtttccctataattctttaagggatttttgtgtcttgtctttaagggcttctacctgtttacctgtgttctcctgtatttctttaagggagttacttatgtccttcttaaagtcctctatcataatcatgagaagtgattttagatctgaatctggcttttcaggtgtgatgtcttatctaggacttgctatgttgggagaattgggttctgaagatgccaagtagccttggtttctgttgcttatgttcttacgcttgccacccgtcatctggttatccctagtactacctgtccttgatatatctgactggagcccgtccttcctgtgatcctggttgtgccaaaactccttagagtctagctgtctctgtgatcctgtggctctgggatcctgtgatcctgagatcctgggagtaaagctgcctctggcaccctgagagtcttgtgtaaccaaactcctggaatcctgtgatcctgggcatgttagagcacctgggagtggagtttcctctgggtgttgtgggactggctgcagagttcaggcccaaggtctgctcagggtaccctcagaatggaaggaacccatgccactggtcaggtggggttcctgtgtccctggatcccacttgtcccagttactcccagtggtgttgggagagatattgtgccctcttcacctgtgattctgggtgcattagagagcctgggagtggagcttcctcagggtgttgtgggattggctgcagagttcgcacccaaggtctgctcgggactctggcccagtctggaaggatctccatgctctctaatggtaatatgagctgtagacccctgccactgcatagtcatggactcagacatgccctcagtggcagcttgggctgggccctcaccatggccctacatggataggctgtctactcacaacagaacaacagattactattctctgcagttccggccatcttttttgtttgtttttcaagacagagtttctctatgtagcactggctgtcctggaacttgtgctgtagaccaggctgaccttgaactcagatatctacctgcctctgcctcccaagtgctgggattaatggcatgagccacactattgcctttcatccatcttcttaatgttcaaactgctccacttttctttgaccaccacatattcacatattgtggtggctcctgctgcatgctggccctggccatccagctggagggtgcaggtctgtgggtggcatggtggtcagcaggtctctgtgttcctcccctggagctgtgctgcatggcctggatttgattcagtgtctttctctttttattcagtctacaatttcattccatggaatggcaccactcagcgtgtcttccctctcaatccagtctagaaacttccctacagacatgtctggtgcctgtttccaaggtgtccgtaatgtatgttctagttttcttcctgttgctgtgattcaacatccccgccctgcttccagcatcagaggcaagcatgctgggaggcacgtggagatgaggcatgattttgtctgtgaattcctcagggtgccaagctatatcctgttcatctctatgcgccaaggagtgcagccagatcacacgtgccacaaactctatcatggtggacttaagagcttgccctgtgtcatgtacagataatagcttgggtactgtagttactttcctattactatgataaaacaccatgaccaaaagcaatgtgtggaagattttggcttatggtttcacgaggataaatctaccgtagcaggcaggcatggtggtaatttggtgttgtggcaagactaggaatgagagatcacagccttaactgcaaggacagagcagagatcagactggaagttttgattcttaaattctcaaagctcactccagtgacatactttttccagcaaggccacacctatgaaatctcccctatacagcactcctaagcaagtactccttccaaaggcccaccttcaccaggaagctggtagatacatctaagagtgactacatgagagatggtgggttatccaatgtgactcttggtggctcagtatttagggtaatgatgcttagtgcacttctcctaatgcgtgcatcttaactactattacttagagactctcaggcctcagctcagacctgagctagaatctctggaacgcctggaatccacagtagccagtcttgacgctaacacacaactctaggttctgacagtattgtgtcagggctggcagagaggaaatacatccctaggagtagaactgaggcagttaccacctggctcttttcccatctgtgtccccccactttccctgatcaggatgtgatgtttgtgctagtgtatgtgacgggtcagtggcttagcatgcctcagaatgcagaaactgattttccagtagctgccttcagtacctcccatccctacttaggaaaaacatttttcttttttcttttttctttttttaatttcaaagatctcccagagaagaatcaaactgcaccactgtccacacacacattgtggatgacgggctggacttttccttcacctgtgagggtagctgccaggaccacgggagatccccatgcctgcaggtgttcgtaaacctgagccactcgggacagaaagtgcttctccactacgacgacgaggccatcaggaccaaccccaaggtaatgtgactttgacaattaaaggttctctgctgccccgtccatagtgctggcctgagcagagcacatggcatctgtgaagtcagttttcttcccgtgaacatttccttttgtggagggtgtcacgtaaccctggatgcttccaaacttactatgtacgaaaggacggcctcaaactgtgggatcatccatcgctacctcccacgtgctgggagtttccgtgctttgttgtgaggagctgagtgaggcctgacccagggatttgtgtatgttcagctctattaactgcctctgaatatgttcacagtattaccatcagggcagatgaagccgagagccgtctgggagaagacatggggcatgaagaagggagaggcacattctagtttcctcacttagtgtgaagtcctaagggggcaatgtcttcatactgtagccctggttagaatgaattcagtctccattcagccacgctggtaattcttaagacatttaaagaacttataaataacttgcaccactagtacatgtgatttacagctcatggttaaacttaactctaaaggttttcattggaggacgtgctctaacttagtgttgccggtcattacttaatctaatggtttctggttttcaattctggattcggccatttcatcacacattagaaaatgtgtgtttgcaggcacacacatcatggtgtgtctgtgtgtgtaggtaagcatgccgtggtacatctttgtgtgtatgtgagcatgctggccatagtatgtggagatcagaggataactcacaggcatttagttctcttccaccacgtggtcctggggctagaactaaggtggtaaggcttagttagcaggaagcaccttcgcctgctgagccatctccctgcctccatgtctcacaggagaagctatcagacacagtcatttcattctgtgtgctcctgccgacacttcccttcccccacgctacgagtgagcgtgtctgtatctggcctccccaccgcagctttagcctggagccttaatgctggccactgttaacagagcttttccctcctccactagtgcttttacacacccaagtgtcacggagaccgggatgatctgctcaacagcgtcctggacatcaaggaattcttcgatcacaacaatggaactttcccctgtttctacagtcccgatggccccttgggagttgttctgaggaagtctggccacaaggttgtctttcactgcttattttggcctttattgactttgctgggaggcgccctgattgttggcttggttaggctaacacaacatctgtcctttcagtgtgaacagtacagcacagtggtaagagcttaagcaggaggcagaacacattctgtgggccggtgcaggtctacactgtacagtgtggcagagtcagggaaggaagagagagagctgaagagggggccccagctctccagtcccaagatgaagacttggccactgcccgacatggtggagaagacttgagaccccagccagcccttgggaggcagaggcaggagaatcaggttcaaaggcagcttgggctatatacagatcttgtcttaaaaaaccaaaacaccaaaaaacattgcttattgtagagtacctgcctcacctgcacaaggccctgggcttgagccccagtactagaaacaatcctatctgcttacagacctgctgtgtgaggggcaaaggtacagctttccataaaagaacgtctttaaatgttgtctactttctattaagtctaaagaacgtgtaccatttcaacagtttttctttccccagtctccttccacaagcgatggaagcagtcttctcctcacaggcaaaaggaactcaaggcagtcagtccttaatgtaactacagctctctggtggacttgctggcatgtaacatgccactgctgggtctgtctgtccaacgctcagcagccagcttatgcggttcatatgaaagcatttctcatacaaaaaaaaatattaggagctgggagatggctcagttggtaaaatgtttgctgtgtaagcatgggcacctgagtttgacaaaacaaatgaacaacaaagacctacacatggagacacacacacacacacacacacacacacacacacagagctagtagttcgtttataagtagataaaagccgtaaaaaataatgaggtctgccacaggtactgttgctcgttctccaggcttcattccagggcccactgtttacagtcactcctatatgaccttgtcctgcaccagttctttttattttgtggcatttcctagttaatgatcctttccctgggctccttccagtctctgctgtgtgtgggaacacaagagatgaagtgtgaagcaagctgcaccaggatctaacactctcctcagataacccacgctctagaatggtcggtcccaggatgcagtcatctttctgctaacagcctgccagggcctggagatggctcagtacttaagagtactcgtttctcttgccaagggcttgagtttggtttctggcacccgcatgtcagttcacaaccatctgtaactagatccaggacatctaagcccctctctggccttgcagccactacatgcatgcagtgctcatacatacacgcaggcaaaaccgtcgcacatgtaaatgttttaaaaaaaaaaaagtcaacaaaggtgactactaattgtcacaagactgacaacacaagccttccagatcaagacgaatgtatgagcggaggggcttgctgttttcccagagtacctaaatgtacatttacagttccacacacaaaaatgaagacccttcactggagacaatgggatgagacttttgaaacaacttttgacatgctgttgtaatcaagccacacttgattctcagccatttaacattctaagactgtgagcaattaagttcaagtcaggaattcgtaaagtgagtggctcagcagggtagcaactctaggcaacggggtcttggcatctcaccttctgtgggtgggatgagcaggctttagatccgttcacaatttcccagtgtcagtccttggcaatgtctcctttgatgatctttcggcataaaaatgtgatgtgtggaacagtgagtttagtttttgataacttgaatcagtgatgcagacacaatggccgtgaagcccataacagcgagctgcagcagcccacttggtcatcttcggtggcagcagggcgcaggtaagttctgacggtgtctctctgctactccaccctctatctagtccccgggccaactgatctgctctgtaaaggttgtgaacattgctttgtacagaccttcctgtaataaaataataaaatcctaaaataaatgtaataaaatacacctgtgccaaaatgtactaaaaaaaaaaaaaaaagcccaccaaaatcctgcaaacagagattctgtcattttctcaaatgaaagataaatgttgagtcatttcctagtaaatctgagttccaacttaacatcctcagcactgaagctccaggtggggttccacatcacaaaggttttccaagcagacaagagactagtggttcacgccaggggagacagacatcaagttggagaacaaagacaatttgaagctcaaaccacttggcagcccagtaaaatgtaagtgcagcaggctgagttgtgaaagtaggaagcagcattgatgctcattcttaaagcaaacacttcccagactcacctgcaccgcttacaatggagggaaagcagcttgcttctaaactggtgccgtgtacatcctagttttcagtacacaaaaccagcccatttcctatccacttttacacatacactcacaccacaggtatgtatgcatgtgtgcttagaagacaagtgtctaaatctgtttatagtgttcaggcctctaatttttcttttatttttactactggaaattgatcctaaagtcttatgtattgtggtaggcacactaccactgatggatactgtgaatgcaagaaaattagctaaggaatgcactaataattccttatgctttagagaaattagcatgcatctctctattactcactgccagggcaggagaaaaaaatggttcagtttttcttgtctttctttttttttggttttttgagacaaggttcatctgtgtaggcctggctgtcctggaactcacagaggtccatctgcctctgcctctgcctcctgcatgctctgactcaagctgtgtgtgaccacacctggcttgattcagtttttcaatcaagtattctttttttttttaacggattatttattttgtgtatatgagcacactgtagctgtgatcaggcacaccagaagagggcgtcagattccattactgatggttgtgagccaccatgtggttgcttggaattgaattcaggacctctggaagagcagtgctcttaaccactgagccatctctgcatcccctcaattaagtattctcagtaattacaaaacaacctagagtttgcctgtcaagagaaacagcaaaagggattctcagagctcttggcttataccacacagtaaggacggtttagacacaaggtaagttttctttcttttggaatgaacagacaatggcagaggctgtgcagttggggacagcagacactgacagcggtaattaacactgacagtgagcgtagtagtctctggctgaactccttgctgggaccagtatgacagaagaggtatcccaacgttgtgggctatagtcatctatatttctaagtcagcggttctcaaccttcctaatgatgccaaccttcagcacagttcctcatgttatagtaatcataaaactagttcataactttgctactgttatgaaccctaatgtaaatatttgtgtttcccaatgggctgaaatccctgtgaaagggtcgtttgactcccaggctgaaaactgcacacgaagtgctgggctgagtacttctgggaccagggtgaacagaacactaagaatggttctaactaaagcctctgacacagcccctcaccctgctgagtaaacgaacagagagcagcagtctggctgagaggaggggggtgagctcactgtcttttcagagttctgcatttgccaacatattaaagtgttgtgttcaaaagcaatgtactttttttagattttattcagctaagaccaaatgacaatagaaccatcagctgcatttgaagcacggattcttggagcctggagtgagggtactgtaaactcagcaccccgaagctaagtccagaggatcttgaatttgaggccagcctgggctacactgagaccttgtaccaacaataaaatgacaaaaccctaagaaatccaccatcatcaccacaacaaatttgtttgggtttcataatcaaaaacatttccagaaaaatcacatttcttagctactcttaggaacatacattaaatctatttaagtatttctttcttatgaaccaacagaaataattacacttgtgaatttgtactagaacaagtttagtggggatgttttggagccagagtaccccaagcatgcattacattatgttagtaatgtaggctgaggatggccctgaacttctgttctctacctcctgaggtggggaattacaggcatatgtcatcagaccccgtttatgatgtgctgggctcaagcccagagctccactccacacacatttgttgggctaacaactgacccaaattcccatgctttaattggaaacaccaaaggttcttccttcagctaacctagaagatcaacaaaaacagtatttaaaaatatatacttccggccgggcaggtgttggcacacgcctttaatcccggtacttgggaggcagaggcaggcagatttctgagtttgaggccagcctggtctacagagtgagttccaggacagacagggctatacagagaaaccatgtctcaaaaaaaaaaaaaaatatatatatatatacacatacatacatatagtatgtatatgtgtatgtatatttctgccacaagcttgtgacacaagatgaggttatataaagtccacgtggcctataaagtattttccttttggtacttattaccacgagaaatggcatctactgctggtagtgagttaaaaatcagccaacagcacacaggatggagcctcatttcagtcctgcccaccaacactctttgtgacacctgagaagtgtgataactgctctgttcccattccctttgctgtaattagcacacggctgataccctaccatacccaaaagccaagcaaaggaaaaggcaccgcataataaaatggatggaggtgcacaatcccacaaaaactcacccaggattgccaatgcaatctgggtgactcctaacaacaagtcctttctgcattttagaaccttggtatctgtttacacctttcgttacagagccttggccagtgctagcaaagcaacacaggagagcatgctatgagcgccgcactcaagaactggcaccttgaattgctttaacaataaagctttcccaagtggctggagcaatagattttagccccattccttgacccatcctgtctcctggtccatgaacagcagcgcatgcccaatcttgacttgaaaacctacaatgagattctctttgctgtcctgtgagagcactgagtggtaacatggccatttcccttacaaacctttggagacagctaccagggctatcaggaatgcaattcttttgagctggagcccaacatctttccagagagtaaaaacaatatttttataaggaaaaaaaaaaaggctttccaggccacgacatgatctgtttacagttttaataactgaaatgcttttgtttgtctgtttaaaacagctcagctggactcctctgtcatcaagagttactaattaaagatgatgtcaagactgagttcagccttcaaaattccaacctggaactgattcctttctagtacgtggacagcatccctgtaacttccatgcccctttgtgcttctccctgctcaggcccttccaccacacccccatctccccaaacatctgaagcagacataccacaatctatgacgccacaaaatgcctttgaatttggtattttagcaatgttgtagacatcaaaagtaattcattaatattctgtagtgtgggggtccagcccaggtctgcagtttccagagaaacaggaaaaaagtggaaactgtaatattcagaaaagattaacataatgctggaaataaatttcttcaaagagctggaaagcatggacatcaagcttacaaaaattatgttaagaaacacagcgaagtccacgtgctgtgaggtttctactgtaccattaaaacaggttcgtcttttctgtgacgccacatcagctggctcctgacgagcagagaacacagatggatcgtgctctgtctctgtgataattaccaatctctttcagataaaagtcaagagggcacacatctaatcacgtaatcatttcctgattaataagaactacactttacacaaaatactttatgagcagctgttttcatcaaaaaaaaaaaaaaccaatagtcagtttcacagttgaaaaagttacacatttaaaatattttacaattcattatatattcaccaggttcccatttcctgatgggcagtaatataaagcagaacagaagggacaacctcagagttgatgactcttgacaccaaattttacagaggacatgaagaaccacaaaaagtctcaggttctaccttaaaatagcaaccagattccattcttcttcttctttcttttttttaaaaaatctatttagaaacatcttaaaaaaaaaaaaaaaaaccaacagaaagcaaacaaacgaacaaatcaaactccacagtaagaacaacagatttcaaattaacagcaatgtaaaatcttcaaactaaagttttttgtatagctgagactatggtaaaaagttaaagcatgattgaagagttatttcttgctacagtgtatttagtttctttctttagatttgctttctttccttcctgaaataattgctgatgagacatcctcaagtgacttagtgaaactatggagcccaagtcatttccacaatagtcattcactgacaaggacggtcatctacagaggtgaccgagtcccacagcactttctggtactgaagcacctgggagtaagtggcacattattgctctctggaagcagatattgatcaccccagctgcaattcaagtttggcttttgcctttttgaatacaaccagttctcctttctttacttatacccttcacagactatagactttctttcaaataaaatcaatgtggttgtaaatgacaaaataagctatgtggctgtgttttaattgtgcagagacctgggaggtgatactacggcaactgatggactaatgttaaacatacacacacacaaacacacacatacacacaaaaaaaaacctatcaattttgtgcaaggaggctcgcggcttttttttttttttcttttttttgtggggtttgtttgttttgttttgtttttgtttcttttggcactcgggaaaacacagttctctgtaattcttcagttcccaccatcaaagttgtagatttgtaccatgtcactgagtttgactgtaataatccctgatatagagaagaatgggatgttagtacctagcaactgtatatctaagtaacacaaagtgttaaatgccaagtttaaataagttaggaagttttctatatctgcaaaagaatctatctggttttctgcataaaacagagcttaaattctgcttaactattccaagacagtttacagaaccaagttcccctaatcttcaggtttatttttcttgttggcaataatatatacatgctttagtgaagtacctaaatcttcaataattatgccctttaagggttctaaaaataggcagatattaagagtatttctattagagtcccctgttcactattcaaaacgtctatataggtgtctggcctcaaggtgagcactgtattacagggattctgttttctagcgtgtacagcgtgcgctcttcataacgatgctccccaggaacgcctgagctaggaactgtcaggagattattgcacagtttttcttttttttttcctttttatttattcttttttttttctttttttcttctttttttggtgtggcatctgagtatctgctaaagctattttctaggacatgaatcattcaaacactgagtagaaatctagagcgaccactaacattagccctacatcttagatggatgcatttcagaatgctcactaatgcaccgtgcctgaatgggatttaatgacactggagtgagacctcaccacttggaattgggacatgatagtaaaatgggttaatgtcctacttttatcattgaagtacggatacgtagcttacgaaggtaaaaaattcatggtttccagtctctcataatgtaaagagtcactcatgactagacctctgcagaaggattaagagtcaggatgatagtcggttttgtattcattttagtaacgggtttcatgtgattgtgctgtctcaactacggaggaatggatgagggcgtcgtgtaaaaaacggccagcagcggcaggaaagcgtgtgcgattcaatctgttccttaaggagtcatacacgggtattggataaatggaatagtgcctgagcctcatctacagaccgagagaaaagctaaccatgctgttaccaacgataaaaaatttggggtgcaaaacaatgcatgactatgggacagattatgtaaataaagaatatatattaatgatagtttctataatataaatagcctttaataaaaaaaaataatctttttaataacattaatactcacttctattttctggaaaacatgcatgaaaaaaaagtattcagttcaattgcaaaaggagaaacaatcagctgaaagtgaacactgtacaggtcaggaacaggggctccctgcggcctctcctctgcccttactgctatacttgatgccagcccagaatttccctaggaaataagtcagatccttgtaaatactgtccagagaaaaaaacaacaaaaaacaacacccaacaaaaacgcagctgtctgcaagtattgtgactgctttcaaaaccgcaggtgagaccccaagtccatcaaagtgttgtttgttcaaagcaaaaagcgagtcccttcaccccaagtgttgttcctcattaagcagggatcaaaatccccacttcaaatcgttaagtctgaacagcaatgggaaaatcagaattttccttcttctccaattcatgtaacttaatataagctttagcttactcagacctatagcagtcacagccttgggcgtgtccacgtgttagacagaacactggcagacaaacaacagcattctagttttgtctccatcatttgtatgtattttggggatttttgttttgttttgtttttttaaaaaaagatacaaacaatcttcaaagtttaccttttttggacttaaggcataacatgaaattgctcgttattctaaagctggattttgaaataaactagtttagtgctatcaaaccctgcttgcgtgtacagtgtttcaattatagagcacgttgtttatgttcttgctcaagtcctaatgttgttcctgactgtgccatcccatgccactgcctgcctgctgccactcactgccatgcagtggagaagccgggagccagctcgcagtcccagctcccatctcagttcaaagcatgctgcttgatggtgtggaagatccaatccatttttgtcgtccatccaccatgatgtgcatcattcatttgctttgtgaaatattccaaagcttcttgctcagttttgtccaaggctagagtctttcggatatatgcaatgtcatcaaaagattgtagttctggcattccagagccaagcatcattgaaaaaaggttgatgaagagattggcatgctgccgaattgctaggtaagccttgtaacacatctcctgaaacctgtaagagggaagaacatctggtcagtgagctgctagtacattggctttacagaattagcacagctgtcctgggtaagggtctaacaattaccattcctctcccttggctcacactattctagaatgtgcactctgcaaatgagtacattgttgcctctcaagcagctgaaacagtgcttgaacattggaggtcagtatttattacatgtctaaccggtttatactaaagtaaggctttaagggcttaggcgcctaaaatcagaggactgacttatacacaaaacagaattttatagaagacctttgaaatctaagatagactaacaatgtaccaaggtggtcagaacaaacagatgtgctaagaattattgtctgctggctttattcaggctggaaccaaaaaaacgtgtcgtaagcactatacattacttgacaaaataaagtagggtctagttatttaacagcagctaataattagggtgtttaaaggttacttcttttgtaggttgcacttagctcaatgaaagaagtcatctccacgtgccccaaccccgacatcggacagaagagacaataaagaccgcatccctgccccacatgcaggcagcagccctgcagtgcacagtggtcacgcacacacggtcttggagcagtgcacagtgggcacgcacgcacgcatgcacgcacacacgcacggccttggagcttacctctcaaactctctggtcttggtgtactcttgtgctcccttactaatcacaatcaagaaatcctgtgtcaacacaaatggcacacgttcccgcttatagccaaattttttcttcttgtgatccaaaaagtgcccaaaatctatatgaaacagctttcaaaataagaaattacattttagttcaacatgcagacataaaagatcttgagttaatatatctgaagacccagaaggcactttaaacgccactacctgtccgtcatctttcaccatgatgttgctgttgtgccggtctccaattcccaagataaaggttgccacgcagtacccagcgcaggaccgagtgaacaggtcaatggctgcatcatatctacagcaaggaaatacacacctcatatgtgctatggaaacggagtggctgcggccaaactggggaaatacggctgacatttctcattaatatcaggaaaaaaagtatgtctgaagagccgagaagttcggagactcttagtctcaaaggacttttcagatgttccttggaatctaagcgtaattcttatcagaataaaagaaacatccatcatggtctctttctccatgggatatgtagctgcagtgtgtgaaggccaggagttagcactcgctgtcttctagcattctcttattcctttaaggatttgtttttacttatgtgttttttttgtgtgtgaatggaaacacacctgtggaggcccaagagcgtgtgtggccccatggagctagagacaggcagttaaaactctcagatatggtgccaggaagcaaatctaagtcctctggaagaacagcaagtgtttttaacaactaagccaattcctcagcatctcactgtgtaatttttgagacaaggtctctcactgacctggggctcaccactgactgtactgtgggcaagccagcccctaagatggaactgttcaggctccttgctttgagcatacaccatgaggcttttaagggtgtcagagattgagctttggtcttcacatgtgtgcagtagtacttccatcagccaaattatctgtatagctctatagtccccagtgtttcttacaatacatcccaggcaacctgaaactcacagaaaccctcctgggttagccacttgagtgctggaataagccaaatacccaggagaaaatgattaaaaaaaaatataaagataaggtctcactacatatagcccctgctagcctggaaaccactatgtatactaggctggcttcaaactcaagaaacatctgcctgcctctgcctctgtttttctatgtagcttaggctggtctggaactgaaaacccacttgctaagtaatgggattaaaggcatatgccaccactgatagctttgaaaattaatttctaaaatatcattttgaaaaacaaactaggagtaaagattcgaatgtataatgttactttagaaagagatttctttttccttctaatgatatagctatgtatgggcatgtgcggctgagtacaggcactg

SEQ ID NO: 64 - DNA, 43649 bp, Mus musculus
cagtgcctgtactcagccgcacatgcccatacatagctatatcattagaaggaaaaagaaatctctttctaaagtaacattatacattcgaatctttactcctagtttgtttttcaaaatgatattttagaaattaattttcaaagctatcagtggtggcatatgcctttaatcccattacttagcaagtgggttttcagttccagaccagcctaagctacatagaaaaacagaggcagaggcaggcagatgtttcttgagtttgaagccagcctagtatacatagtggtttccaggctagcaggggctatatgtagtgagaccttatctttatatttttttttaatcattttctcctgggtatttggcttattccagcactcaagtggctaacccaggagggtttctgtgagtttcaggttgcctgggatgtattgtaagaaacactggggactatagagctatacagataatttggctgatggaagtactactgcacacatgtgaagaccaaagctcaatctctgacacccttaaaagcctcatggtgtatgctcaaagcaaggagcctgaacagttccatcttaggggctggcttgcccacagtacagtcagtggtgagccccaggtcagtgagagaccttgtctcaaaaattacacagtgagatgctgaggaattggcttagttgttaaaaacacttgctgttcttccagaggacttagatttgcttcctggcaccatatctgagagttttaactgcctgtctctagctccatggggccacacacgctcttgggcctccacaggtgtgtttccattcacacacaaaaaaaacacataagtaaaaacaaatccttaaaggaataagagaatgctagaagacagcgagtgctaactcctggccttcacacactgcagctacatatcccatggagaaagagaccatgatggatgtttcttttattctgataagaattacgcttagattccaaggaacatctgaaaagtcctttgagactaagagtctccgaacttctcggctcttcagacatactttttttcctgatattaatgagaaatgtcagccgtatttccccagtttggccgcagccactccgtttccatagcacatatgaggtgtgtatttccttgctgtagatatgatgcagccattgacctgttcactcggtcctgcgctgggtactgcgtggcaacctttatcttgggaattggagaccggcacaacagcaacatcatggtgaaagatgacggacaggtagtggcgtttaaagtgccttctgggtcttcagatatattaactcaagatcttttatgtctgcatgttgaactaaaatgtaatttcttattttgaaagctgtttcatatagattttgggcactttttggatcacaagaagaaaaaatttggctataagcgggaacgtgtgccatttgtgttgacacaggatttcttgattgtgattagtaagggagcacaagagtacaccaagaccagagagtttgagaggtaagctccaaggccgtgcgtgtgtgcgtgcatgcgtgcgtgcgtgcccactgtgcactgctccaagaccgtgtgtgcgtgaccactgtgcactgcagggctgctgcctgcatgtggggcagggatgcggtctttattgtctcttctgtccgatgtcggggttggggcacgtggagatgacttctttcattgagctaagtgcaacctacaaaagaagtaacctttaaacaccctaattattagctgctgttaaataactagaccctactttattttgtcaagtaatgtatagtgcttacgacacgtttttttggttccagcctgaataaagccagcagacaataattcttagcacatctgtttgttctgaccaccttggtacattgttagtctatcttagatttcaaaggtcttctataaaattctgttttgtgtataagtcagtcctctgattttaggcgcctaagcccttaaagccttactttagtataaaccggttagacatgtaataaatactgacctccaatgttcaagcactgtttcagctgcttgagaggcaacaatgtactcatttgcagagtgcacattctagaatagtgtgagccaagggagaggaatggtaattgttagacccttacccaggacagctgtgctaattctgtaaagccaatgtactagcagctcactgaccagatgttcttccctcttacaggtttcaggagatgtgttacaaggcttacctagcaattcggcagcatgccaatctcttcatcaaccttttttcaatgatgcttggctctggaatgccagaactacaatcttttgatgacattgcatatatccgaaagactctagccttggacaaaactgagcaagaagctttggaatatttcacaaagcaaatgaatgatgcacatcatggtggatggacgacaaaaatggattggatcttccacaccatcaagcagcatgctttgaactgagatgggagctgggactgcgagctggctcccggcttctccactgcatggcagtgagtggcagcaggcaggcagtggcatgggatggcacagtcaggaacaacattaggacttgagcaagaacataaacaacgtgctctataattgaaacactgtacacgcaagcagggtttgatagcactaaactagtttatttcaaaatccagctttagaataacgagcaatttcatgttatgccttaagtccaaaaaaggtaaactttgaagattgtttgtatctttttttaaaaaaacaaaacaaaacaaaaatccccaaaatacatacaaatgatggagacaaaactagaatgctgttgtttgtctgccagtgttctgtctaacacgtggacacgcccaaggctgtgactgctataggtctgagtaagctaaagcttatattaagttacatgaattggagaagaaggaaaattctgattttcccattgctgttcagacttaacgatttgaagtggggattttgatccctgcttaatgaggaacaacacttggggtgaagggactcgctttttgctttgaacaaacaacactttgatggacttggggtctcacctgcggttttgaaagcagtcacaatacttgcagacagctgcgtttttgttgggtgttgttttttgttgtttttttctctggacagtatttacaaggatctgacttatttcctagggaaattctgggctggcatcaagtatagcagtaagggcagaggagaggccgcagggagcccctgttcctgacctgtacagtgttcactttcagctgattgtttctccttttgcaattgaactgaatacttttttttcatgcatgttttccagaaaatagaagtgagtattaatgttattaaaaagattatttttttttattaaaggctatttatattatagaaactatcattaatatatattctttatttacataatctgtcccatagtcatgcattgttttgcaccccaaattttttatcgttggtaacagcatggttagcttttctctcggtctgtagatgaggctcaggcactattccatttatccaatacccgtgtatgactccttaaggaacagattgaatcgcacacgctttcctgccgctgctggccgttttttacacgacgccctcatccattcctccgtagttgagacagcacaatcacatgaaacccgttactaaaatgaatacaaaaccgactatcatcctgactcttaatccttctgcagaggtctagtcatgagtgactctttacattatgagagactggaaaccatgaattttttaccttcgtaagctacgtatccgtacttcaatgataaaagtaggacattaacccattttactatcatgtcccaattccaagtggtgaggtctcactccagtgtcattaaatcccattcaggcacggtgcattagtgagcattctgaaatgcatccatctaagatgtagggctaatgttagtggtcgctctagatttctactcagtgtttgaatgattcatgtcctagaaaatagctttagcagatactcagatgccacaccaaaaaaagaagaaaaaaagaaaaaaaaaagaataaataaaaaggaaaaaaaaaagaaaaactgtgcaataatctcctgacagttcctagctcaggcgttcctggggagcatcgttatgaagagcgcacgctgtacacgctagaaaacagaatccctgtaatacagtgctcaccttgaggccagacacctatatagacgttttgaatagtgaacaggggactctaatagaaatactcttaatatctgcctatttttagaacccttaaagggcataattattgaagatttaggtacttcactaaagcatgtatatattattgccaacaagaaaaataaacctgaagattaggggaacttggttctgtaaactgtcttggaatagttaagcagaatttaagctctgttttatgcagaaaaccagatagattcttttgcagatatagaaaacttcctaacttatttaaacttggcatttaacactttgtgttacttagatatacagttgctaggtactaacatcccattcttctctatatcagggattattacagtcaaactcagtgacatggtacaaatctacaactttgatggtgggaactgaagaattacagagaactgtgttttcccgagtgccaaaagaaacaaaaacaaaacaaaacaaacaaaccccacaaaaaaaagaaaaaaaaaaaaaagccgcgagcctccttgcacaaaattgataggtttttttttgtgtgtatgtgtgtgtttgtgtgtgtgtatgtttaacattagtccatcagttgccgtagtatcacctcccaggtctctgcacaattaaaacacagccacatagcttattttgtcatttacaaccacattgattttatttgaaagaaagtctatagtctgtgaagggtataagtaaagaaaggagaactggttgtattcaaaaaggcaaaagccaaacttgaattgcagctggggtgatcaatatctgcttccagagagcaataatgtgccacttactcccaggtgcttcagtaccagaaagtgctgtgggactcggtcacctctgtagatgaccgtccttgtcagtgaatgactattgtggaaatgacttgggctccatagtttcactaagtcacttgaggatgtctcatcagcaattatttcaggaaggaaagaaagcaaatctaaagaaagaaactaaatacactgtagcaagaaataactcttcaatcatgctttaactttttaccatagtctcagctatacaaaaaactttagtttgaagattttacattgctgttaatttgaaatctgttgttcttactgtggagtttgatttgttcgtttgtttgctttctgttggtttttttttttttttttaagatgtttctaaatagattttttaaaaaaaagaaagaagaagaagaatggaatctggttgctattttaaggtagaacctgagactttttgtggttcttcatgtcctctgtaaaatttggtgtcaagagtcatcaactctgaggttgtcccttctgttctgctttatattactgcccatcaggaaatgggaacctggtgaatatataatgaattgtaaaatattttaaatgtgtaactttttcaactgtgaaactgactattggttttttttttttttgatgaaaacagctgctcataaagtattttgtgtaaagtgtagttcttattaatcaggaaatgattacgtgattagatgtgtgccctcttgacttttatctgaaagagattggtaattatcacagagacagagcacgatccatctgtgttctctgctcgtcaggagccagctgatgtggcgtcacagaaaagacgaacctgttttaatggtacagtagaaacctcacagcacgtggacttcgctgtgtttcttaacataatttttgtaagcttgatgtccatgctttccagctctttgaagaaatttatttccagcattatgttaatcttttctgaatattacagtttccacttttttcctgtttctctggaaactgcagacctgggctggacccccacactacagaatattaatgaattacttttgatgtctacaacattgctaaaataccaaattcaaaggcattttgtggcgtcatagattgtggtatgtctgcttcagatgtttggggagatgggggtgtggtggaagggcctgagcagggagaagcacaaaggggcatggaagttacagggatgctgtccacgtactagaaaggaatcagttccaggttggaattttgaaggctgaactcagtcttgacatcatctttaattagtaactcttgatgacagaggagtccagctgagctgttttaaacagacaaacaaaagcatttcagttattaaaactgtaaacagatcatgtcgtggcctggaaagcctttttttttttccttataaaaatattgtttttactctctggaaagatgttgggctccagctcaaaagaattgcattcctgatagccctggtagctgtctccaaaggtttgtaagggaaatggccatgttaccactcagtgctctcacaggacagcaaagagaatctcattgtaggttttcaagtcaagattgggcatgcgctgctgttcatggaccaggagacaggatgggtcaaggaatggggctaaaatctattgctccagccacttgggaaagctttattgttaaagcaattcaaggtgccagttcttgagtgcggcgctcatagcatgctctcctgtgttgctttgctagcactggccaaggctctgtaacgaaaggtgtaaacagataccaaggttctaaaatgcagaaaggacttgttgttaggagtcacccagattgcattggcaatcctgggtgagtttttgtgggattgtgcacctccatccattttattatgcggtgccttttcctttgcttggcttttgggtatggtagggtatcagccgtgtgctaattacagcaaagggaatgggaacagagcagttatcacacttctcaggtgtcacaaagagtgttggtgggcaggactgaaatgaggctccatcctgtgtgctgttggctgatttttaactcactaccagcagtagatgccatttctcgtggtaataagtaccaaaaggaaaatactttataggccacgtggactttatataacctcatcttgtgtcacaagcttgtggcagaaatatacatacacatatacatactatatgtatgtatgtgtatatatatatatatttttttttttttttgagacatggtttctctgtatagccctgtctgtcctggaactcactctgtagaccaggctggcctcaaactcagaaatctgcctgcctctgcctcccaagtaccgggattaaaggcgtgtgccaacacctgcccggccggaagtatatatttttaaatactgtttttgttgatcttctaggttagctgaaggaagaacctttggtgtttccaattaaagcatgggaatttgggtcagttgttagcccaacaaatgtgtgtggagtggagctctgggcttgagcccagcacatcataaacggggtctgatgacatatgcctgtaattccccacctcaggaggtagagaacagaagttcagggccatcctcagcctacattactaacataatgtaatgcatgcttggggtactctggctccaaaacatccccactaaacttgttctagtacaaattcacaagtgtaattatttctgttggttcataagaaagaaatacttaaatagatttaatgtatgttcctaagagtagctaagaaatgtgatttttctggaaatgtttttgattatgaaacccaaacaaatttgttgtggtgatgatggtggatttcttagggttttgtcattttattgttggtacaaggtctcagtgtagcccaggctggcctcaaattcaagatcctctggacttagcttcggggtgctgagtttacagtaccctcactccaggctccaagaatccgtgcttcaaatgcagctgatggttctattgtcatttggtcttagctgaataaaatctaaaaaaagtacattgcttttgaacacaacactttaatatgttggcaaatgcagaactctgaaaagacagtgagctcacccccctcctctcagccagactgctgctctctgttcgtttactcagcagggtgaggggctgtgtcagaggctttagttagaaccattcttagtgttctgttcaccctggtcccagaagtactcagcccagcacttcgtgtgcagttttcagcctgggagtcaaacgaccctttcacagggatttcagcccattgggaaacacaaatatttacattagggttcataacagtagcaaagttatgaactagttttatgattactataacatgaggaactgtgctgaaggttggcatcattaggaaggttgagaaccgctgacttagaaatatagatgactatagcccacaacgttgggatacctcttctgtcatactggtcccagcaaggagttcagccagagactactacgctcactgtcagtgttaattaccgctgtcagtgtctgctgtccccaactgcacagcctctgccattgtctgttcattccaaaagaaagaaaacttaccttgtgtctaaaccgtccttactgtgtggtataagccaagagctctgagaatcccttttgctgtttctcttgacaggcaaactctaggttgttttgtaattactgagaatacttaattgaggggatgcagagatggctcagtggttaagagcactgctcttccagaggtcctgaattcaattccaagcaaccacatggtggctcacaaccatcagtaatggaatctgacgccctcttctggtgtgcctgatcacagctacagtgtgctcatatacacaaaataaataatccgttaaaaaaaaaaagaatacttgattgaaaaactgaatcaagccaggtgtggtcacacacagcttgagtcagagcatgcaggaggcagaggcagaggcagatggacctctgtgagttccaggacagccaggcctacacagatgaaccttgtctcaaaaaaccaaaaaaaaagaaagacaagaaaaactgaaccatttttttctcctgccctggcagtgagtaatagagagatgcatgctaatttctctaaagcataaggaattattagtgcattccttagctaattttcttgcattcacagtatccatcagtggtagtgtgcctaccacaatacataagactttaggatcaatttccagtagtaaaaataaaagaaaaattagaggcctgaacactataaacagatttagacacttgtcttctaagcacacatgcatacatacctgtggtgtgagtgtatgtgtaaaagtggataggaaatgggctggttttgtgtactgaaaactaggatgtacacggcaccagtttagaagcaagctgctttccctccattgtaagcggtgcaggtgagtctgggaagtgtttgctttaagaatgagcatcaatgctgcttcctactttcacaactcagcctgctgcacttacattttactgggctgccaagtggtttgagcttcaaattgtctttgttctccaacttgatgtctgtctcccctggcgtgaaccactagtctcttgtctgcttggaaaacctttgtgatgtggaaccccacctggagcttcagtgctgaggatgttaagttggaactcagatttactaggaaatgactcaacatttatctttcatttgagaaaatgacagaatctctgtttgcaggattttggtgggcttttttttttttttttagtacattttggcacaggtgtattttattacatttattttaggattttattattttattacaggaaggtctgtacaaagcaatgttcacaacctttacagagcagatcagttggcccggggactagatagagggtggagtagcagagagacaccgtcagaacttacctgcgccctgctgccaccgaagatgaccaagtgggctgctgcagctcgctgttatgggcttcacggccattgtgtctgcatcactgattcaagttatcaaaaactaaactcactgttccacacatcacatttttatgccgaaagatcatcaaaggagacattgccaaggactgacactgggaaattgtgaacggatctaaagcctgctcatcccacccacagaaggtgagatgccaagaccccgttgcctagagttgctaccctgctgagccactcactttacgaattcctgacttgaacttaattgctcacagtcttagaatgttaaatggctgagaatcaagtgtggcttgattacaacagcatgtcaaaagttgtttcaaaagtctcatcccattgtctccagtgaagggtcttcatttttgtgtgtggaactgtaaatgtacatttaggtactctgggaaaacagcaagcccctccgctcatacattcgtcttgatctggaaggcttgtgttgtcagtcttgtgacaattagtagtcacctttgttgacttttttttttttaaaacatttacatgtgcgacggttttgcctgcgtgtatgtatgagcactgcatgcatgtagtggctgcaaggccagagaggggcttagatgtcctggatctagttacagatggttgtgaactgacatgcgggtgccagaaaccaaactcaagcccttggcaagagaaacgagtactcttaagtactgagccatctccaggccctggcaggctgttagcagaaagatgactgcatcctgggaccgaccattctagagcgtgggttatctgaggagagtgttagatcctggtgcagcttgcttcacacttcatctcttgtgttcccacacacagcagagactggaaggagcccagggaaaggatcattaactaggaaatgccacaaaataaaaagaactggtgcaggacaaggtcatataggagtgactgtaaacagtgggccctggaatgaagcctggagaacgagcaacagtacctgtggcagacctcattattttttacggcttttatctacttataaacgaactactagctctgtgtgtgtgtgtgtgtgtgtgtgtgtgtgtgtgtctccatgtgtaggtctttgttgttcatttgttttgtcaaactcaggtgcccatgcttacacagcaaacattttaccaactgagccatctcccagctcctaatatttttttttgtatgagaaatgctttcatatgaaccgcataagctggctgctgagcgttggacagacagacccagcagtggcatgttacatgccagcaagtccaccagagagctgtagttacattaaggactgactgccttgagttccttttgcctgtgaggagaagactgcttccatcgcttgtggaaggagactggggaaagaaaaactgttgaaatggtacacgttctttagacttaatagaaagtagacaacatttaaagacgttcttttatggaaagctgtacctttgcccctcacacagcaggtctgtaagcagataggattgtttctagtactggggctcaagcccagggccttgtgcaggtgaggcaggtactctacaataagcaatgttttttggtgttttggttttttaagacaagatctgtatatagcccaagctgcctttgaacctgattctcctgcctctgcctcccaagggctggctggggtctcaagtcttctccaccatgtcgggcagtggccaagtcttcatcttgggactggagagctggggccccctcttcagctctctctcttccttccctgactctgccacactgtacagtgtagacctgcaccggcccacagaatgtgttctgcctcctgcttaagctcttaccactgtgctgtactgttcacactgaaaggacagatgttgtgttagcctaaccaagccaacaatcagggcgcctcccagcaaagtcaataaaggccaaaataagcagtgaaagacaaccttgtggccagacttcctcagaacaactcccaaggggccatcgggactgtagaaacaggggaaagttccattgttgtgatcgaagaattccttgatgtccaggacgctgttgagcagatcatcccggtctccgtgacacttgggtgtgtaaaagcactagtggaggagggaaaagctctgttaacagtggccagcattaaggctccaggctaaagctgcggtggggaggccagatacagacacgctcactcgtagcgtgggggaagggaagtgtcggcaggagcacacagaatgaaatgactgtgtctgatagcttctcctgtgagacatggaggcagggagatggctcagcaggcgaaggtgcttcctgctaactaagccttaccaccttagttctagccccaggaccacgtggtggaagagaactaaatgcctgtgagttatcctctgatctccacatactatggccagcatgctcacatacacacaaagatgtaccacggcatgcttacctacacacacagacacaccatgatgtgtgtgcctgcaaacacacattttctaatgtgtgatgaaatggccgaatccagaattgaaaaccagaaaccattagattaagtaatgaccggcaacactaagttagagcacgtcctccaatgaaaacctttagagttaagtttaaccatgagctgtaaatcacatgtactagtggtgcaagttatttataagttctttaaatgtcttaagaattaccagcgtggctgaatggagactgaattcattctaaccagggctacagtatgaagacattgcccccttaggacttcacactaagtgaggaaactagaatgtgcctctcccttcttcatgccccatgtcttctcccagacggctctcggcttcatctgccctgatggtaatactgtgaacatattcagaggcagttaatagagctgaacatacacaaatccctgggtcaggcctcactcagctcctcacaacaaagcacggaaactcccagcacgtgggaggtagcgatggatgatcccacagtttgaggccgtcctttcgtacatagtaagtttggaagcatccagggttacgtgacaccctccacaaaaggaaatgttcacgggaagaaaactgacttcacagatgccatgtgctctgctcaggccagcactatggacggggcagcagagaacctttaattgtcaaagtcacattaccttggggttggtcctgatggcctcgtcgtcgtagtggagaagcactttctgtcccgagtggctcaggtttacgaacacctgcaggcatggggatctcccgtggtcctggcagctaccctcacaggtgaaggaaaagtccagcccgtcatccacaatgtgtgtgtggacagtggtgcagtttgattcttctctgggagatctttgaaattaaaaaaagaaaaaagaaaaaagaaaaatgtttttcctaagtagggatgggaggtactgaaggcagctactggaaaatcagtttctgcattctgaggcatgctaagccactgacccgtcacatacactagcacaaacatcacatcctgatcagggaaagtggggggacacagatgggaaaagagccaggtggtaactgcctcagttctactcctagggatgtatttcctctctgccagccctgacacaatactgtcagaacctagagttgtgtgttagcgtcaagactggctactgtggattccaggcgttccagagattctagctcaggtctgagctgaggcctgagagtctctaagtaatagtagttaagatgcacgcattaggagaagtgcactaagcatcattaccctaaatactgagccaccaagagtcacattggataacccaccatctctcatgtagtcactcttagatgtatctaccagcttcctggtgaaggtgggcctttggaaggagtacttgcttaggagtgctgtataggggagatttcataggtgtggccttgctggaaaaagtatgtcactggagtgagctttgagaatttaagaatcaaaacttccagtctgatctctgctctgtccttgcagttaaggctgtgatctctcattcctagtcttgccacaacaccaaattaccaccatgcctgcctgctacggtagatttatcctcgtgaaaccataagccaaaatcttccacacattgcttttggtcatggtgttttatcatagtaataggaaagtaactacagtacccaagctattatctgtacatgacacagggcaagctcttaagtccaccatgatagagtttgtggcacgtgtgatctggctgcactccttggcgcatagagatgaacaggatatagcttggcaccctgaggaattcacagacaaaatcatgcctcatctccacgtgcctcccagcatgcttgcctctgatgctggaagcagggcggggatgttgaatcacagcaacaggaagaaaactagaacatacattacggacaccttggaaacaggcaccagacatgtctgtagggaagtttctagactggattgagagggaagacacgctgagtggtgccattccatggaatgaaattgtagactgaataaaaagagaaagacactgaatcaaatccaggccatgcagcacagctccaggggaggaacacagagacctgctgaccaccatgccacccacagacctgcaccctccagctggatggccagggccagcatgcagcaggagccaccacaatatgtgaatatgtggtggtcaaagaaaagtggagcagtttgaacattaagaagatggatgaaaggcaatagtgtggctcatgccattaatcccagcacttgggaggcagaggcaggtagatatctgagttcaaggtcagcctggtctacagcacaagttccaggacagccagtgctacatagagaaactctgtcttgaaaaacaaacaaaaaagatggccggaactgcagagaatagtaatctgttgttctgttgtgagtagacagcctatccatgtagggccatggtgagggcccagcccaagctgccactgagggcatgtctgagtccatgactatgcagtggcaggggtctacagctcatattaccattagagagcatggagatccttccagactgggccagagtcccgagcagaccttgggtgcgaactctgcagccaatcccacaacaccctgaggaagctccactcccaggctctctaatgcacccagaatcacaggtgaagagggcacaatatctctcccaacaccactgggagtaactgggacaagtgggatccagggacacaggaaccccacctgaccagtggcatgggttccttccattctgagggtaccctgagcagaccttgggcctgaactctgcagccagtcccacaacacccagaggaaactccactcccaggtgctctaacatgcccaggatcacaggattccaggagtttggttacacaagactctcagggtgccagaggcagctttactcccaggatctcaggatcacaggatcccagagccacaggatcacagagacagctagactctaaggagttttggcacaaccaggatcacaggaaggacgggctccagtcagatatatcaaggacaggtagtactagggataaccagatgacgggtggcaagcgtaagaacataagcaacagaaaccaaggctacttggcatcttcagaacccaattctcccaacatagcaagtcctagataagacatcacacctgaaaagccagattcagatctaaaatcacttctcatgattatgatagaggactttaagaaggacataagtaactcccttaaagaaatacaggagaacacaggtaaacaggtagaagcccttaaagacaagacacaaaaatcccttaaagaattatagggaaacacaatcaaacaggcgaaggaaacgaacaaaaccatccaagatctaaaaatggaagagaaacaataaggaaatcacaaagggagacatccctggagttagaaaacctaggaaagagatcaggagtcatagatgcaagcatcaccaacagaatacaagagatagaagagagaatctcagatgcagaagatactatagaaaccattcacacaaaagtccaaaaaagtgcaaaatgcaaaaagtttctaacccaaaacatccaggaaatccagaacacaatgagaagaccaacctaaggataataggtatagaagagagcgaagatttccaacttgaaagaaccagtaaatatattcaacaaagtatagaaaaaaactttcctaacctaaagaaagagatgtccatgaacatacaagaagcctacagaactccaaatagactggaccagaaaagaaattccttccatcacataataattaaaacaccaaatacactaaacaaagaaagaatattaaaagcagtaagggaaaaaggtcaagtaacgtataaaggcagatctatcagaattacaccagacttctcaccagagactatgaaagctagaagatcttgggaagatctcatacagaccctaagagaacacaaatgccagcccaggctactatacccagcgaaactctcaattaccatagatggagacaccaagatatttcatgacaaaaccaaatttacacaatatctttccacaaatccagccctacaaaggataatagatggaaaacaccaacccaaagagagaaactataccctagaaaaagcaagaaagtaatctttcaacaaacccaaaagaagatagccacacaaacataattccacctctaacaacaaaaatgacaggaagtaacagtcacttttccttaacagctcttaaaatcaatggattcaactccccagtaaaaagacatggactaagagactggatttataatcaggacccagcattttgttgcatacaggaaacctacctcagtgacaaagacagacactacctcagagtaaaagattagaaaacaattctccaagcaaatagttccaagaaacaagctggagtaaccattctaatatcaaacaaaattgacttaataaaaacagatgtataaaagttgggggtcttaaacagatacacttagcagaatgcatagaaacaaacacttatctaggactaattggctattctatgtcttttgttgctccatatcaaatagagggttttcttactgtttatgtgaagaatgagatgaggatattgattgtgatttcactgaatcagtaaattgttttggtaggaaagccttttttcacaatgttaattctaccaagctatatgcttgggaggtcttcaaattctggtatgtttcttagtctctttcttcacacatttaaagttttcattgtagaggatttttaccacttttgttatctatatcctaaatactttattttatttgagaaactgggaagaggagtgtgtccatgatctctttctcagcatgcttgttactcatatgtattaagactggtaaattttgtaaatcaattatgcatcataacactttgctgaaattattgataatttctacaaatttttagtcaaattttgggaacattgggtataggataatataatcttccattgaaaataatttgacttaatattctcctgattgtatcccttctcttgccttactgttccagctaatgcttcaatcacattatagatgagcagtagggagagtgggcactcttctcccattcctgactttaatggggcttattaatggttttatcatttaggatgatattggccatgggtttgtcatacataacctttattatgtaggaagatgtttcctacagtcctacttgtactagggcttttttttccaattttttattagatattttcttcatttacatttcaaatgctataccgaaagtcccctataccctccccccaccctgttcccttacccacccaatctcacttcttggccctggcattcccctgtattggggcatataaagtttgcaagaccaaggggactctcttcccaatgatggccaactaggccatcttctgctgcatatgcagctagagacacaagctctgggggtactggttagttcatattgttgttccacctatagggttgcagaaccctttagctccttgagtactttctctagctcctccattgggggccctgtgttccatccaatagctgactgtgagcatccacttctgtatttgccaggcactggcataccctcagacaagacagctatatcagggtcctttcagcaaaatcttgctggcatatgcaatagtgtctgggtttggtggctgataatgggatggatccccaggtggggtagtctctggatggtccaccctttcgtcttagctccaaactttgtctctgtaactccttccatgggtattttgttccatattctaaggaggaataaagtatccacacattggtcttccttcttcttgattttcttgtgttttgcaaattgtatcttgggtattctaagtttctgggctaatatccacttatcaatgagtgcacatcaagtgacttcttttgtgattgggttacctcactcaggatgatatcctccaaatacatccattttcccaaaaatttcataaattcattgtttttaatagctgagtaatactccattgtgtaaatgtaccacattttctgtatccatttctctgttgagggacatctgggttctttccagcttctggctattataaataaggctgctatgaacatagtggagcatgtgtccttattacctgttggaacatcttctgggtatatgcccaggagaggtattgctggatcttctggtagtactatgtccaattttctgagaaaccgccagactgatttccagagtggttgtacaagcttgcaatcccaccagcaatggaggagtgtttctctttctccacatcttcacagcatctgctgtcacatgaatttttgaccttagtcattctgactggtgtgaggtggaatctcatggttgttttgatttgcatttccctgatgattaagaatgttgaacattttttcaagtgcttctcagcccttcagtattcctcagttgagaattctttgtttagctctgtaccccatttttaatggggttatttgaatttctggagtccagcttcttgagctccttgtatatattggatattagtctatagggcttttattaagaaggcacattgaatcttatcaaagactttttctttttttttttctttctttttcttttctttttttttatttcattgagatgatcatattcttgtatttttcttgtccatgtatttggtttattacatttatttcttatatgtgtaaaaaaaatacagtaaaaaaaaagagaaagagagcacatggcacatggggctacctctggccagggccactgccaggtatccacgtggatgtcctggagctgtacataactgcccctgtccctcactagatgctgtgctctggagagctgggcccatcttttaccagtgggaacaccagggagaacatacccagtgccttacccaggcggcacagtggagctggtcctggcagccggggatgcgggtgagccagcgcctaaggagtgactatgggagagccaaccctgccactcatctgccatgggatagcagagatgcagaggtgatccccaccaccaccgccacttgcttctcgccacttccagcagtcagaaaagctgtccacagggtcatgagccaaagagctactgggcagcacagaagagctggccctggtgagccgaccctgagggcaagagtacagaactacccctccactggcatggagtgaggtggtattgatgcagggttgatgccctccccctgccacccttgctacctgtggtagccagcagagcgatcctgagttcatgagagctggggatagctagtcctgtccccgccctcactggctgcagcacttgtgaggcagggcactgagcaatacagtggcacttgccctgatggcaaaggcatgggtgagccagccagagggtgtgagagccatagtgttgaccctcacaggctgcagcacttggaagagtgggcccccaaaccttgactgggcagcacagtggaaatggctctggaggggtgggtatggatgagccaaacctgtaggcggtgagcagaagagctgaccctgccacctgccaatggcactatttggtggcctagccagggcagtactggagagcttgccctggagaagtggataagggagagctggtgggccaatcagctcagctactacccaggcccagatctaagactctgaattggcccaccccaaaatatgtatcatctgtaaacttttgagatgcatgaaatgacaggtcctgctgatccaaagcagcaggctctccatgacacagggtgacaccagaaaaaccaggagtcatgctgaggatccagtattgatgatgtcacagaagccagagctctcaaaccagaccagtgactcatcgacatgaacatttgcaagtgaagatgtgtggagagagggacatacagtggaacacactgacacactacagcttccacgatgagacgttgtctacgctttgatttttgtttggtgtgtgtgtgtgtgtgttattttgggtgtaggttgcaaagatgaaggatggatatgatgggatttggagatgaattcgactgaggtgcatgatttgaaactcatgatgaaatctctaaagaaactgacaccaatagttcctctgataaaggtgaaactcctcactgtcgtctccctgttcacgctggggttttgctggcttgatctcccgcaattctctgtccccttgacggaaagaagagatgaagggtggagagaaaggctgtgtccccttgaaaccgtaactactccctgagattgcaaagaatgctgaggcagaaatgagcactcaccgctcccgttaagaaatttccagaaatacgtagaaagttaaaaagaaaaaaaaaaaaatagagggtcagagattgatcagcttacaacagagatcctgcacccttatccctgacacatcacatgtttaagcaggcagtctgggtgctggagagatggctcagcagttcagatcacacactgctctgtgcagaagatccatgtttgaatcccagtactcattagtgagccccaaacctcctgtaactccagctactggggagctgaaacctctggcatccaatagtaagcatgtgggcatggccctccccccaccccacacacacacacatacacacaggattcaaaacaaaagtctaacataatttttaagaatatcaaaatgagccgggcatggtggtgcacacctttaatcccagaactcgggaggcagagacaggcggatttctgagttcaaggccagcctggtctacaaagtgagttccaggacagccagggctacacagagaaaccctgtctcgaaaaaacaaaaaaagagtgacctacccatccacccagtaattgtcaaagccaaacaaaatatacatagtcggagtctcttttatctgtaaactagtcagggataagcataaattggttgtactacaaaagctagctggcatttcctagcagcggtgcttttctgctaccaaccatgcccatctcaactggcacagcagccgtgtgcagaagcacgcgtggactgtgaccatctgggagcagaggactatttcacacctcctctaccactgtctccagcacgaacaggcaagctctccagggtgtgctcaggggaatggacttcagtgcggggctggacccatctgggagctctgggtcttagcccgtgtctcacctgagcatgaagggcttcaacacagtggtccccaacaggaagaacatcagtacagaggaagccatcatggccacgcccagcagcatggcccggtcctcaccagcgcttgatggaagctttgggtgcaccttcaggggatctccattgattttgcccgaggccggaagtgctgtcctttgggggaagccagaaaggatgttgtgtgagctcaagagagctctagtgtttagctcatggcaaacctgagtctggttcactgagaggcatacacaggttcccagcagtgccccaaataccacgctcagagccaagaatggacgctactaaaataaactaaaatgatacattgtcaatttttttttaagatataaaaagctgagtgtggcataatttatattataatgtctaatcatcgtgtgtttttttaagatatgaaaatggactctgagagcaaggaccattcccttctcccagactccaggtgtttgttgttgttttggtttggtttgatttgatttggtttggtttttttatcaaatacactccaagactccgtattctgggtcaggctggtccctaagtctgtgccagagagaaaggcaagtggtagacagttaagactataaaaaccagccgggcagtggtggtgcacacctttaatcccagtactcgggaggcagaggtaggcgaatttctgagtttgaagccagcctgatctacaaagtgagttccaggacagccagggctatacagagaaaccttgtctcgaactcccctcctccaaaaaaaaaaaaaaaaaaaaaaaaaaagtctataaaaaacagagcaaaaaaaaaaaaaaaaaaaaaaaaaaaaaaaaacagagcacagcttgggtctggggaaatgtagtaaataaagagttaaagaactcaagttcccatcatggcagttgcctataattccaggctggggcaggagtggtggtggtggtggtggtagtggtggtggtggtggtggtggtggcggctccagtgcaagctgtccataggagtagccgtatcagtaagcttggggtttggttgagtgaccctgcctcaatgaatactatggaagaacacacgcagaatgattcagaacatcactctagtgcctctacctctacatacatatgcacccatatatgtgcaaacacacatacacacacacacttataccacacatacacaggaagataaaaacaaacaaaagcccattgtatccctgagcagttgaaaggtaaaaccttcccaagttcccaaggttactgtcgtttgtccatgacattaaaatgcttgatgggaaccagacgctggacggctcgtccatggggagaatactgctctacctggaacctctcaggctcaacgtccagcttgagcaggcttcctgtgtcccctctcctggatatcacaagcctccaagaggatggtgtgttcagtctacctgttgcttagtgtcgttcttttacctttgcctacttcatgcgtattgaacggaaagcatagctagcttagattattctccttgcagaacacacgatggtgtgtgtctgtgatcccagcactcaggaaatagaggcagggggattagaagttcaaggccagcctaggcttcagagtgagttttgaggccaaccttggctacatgagaccctgtaacaaaaaaaaaaaaaaaaaaaaaaaaaagaggagggatggggggactggtcagctgttaagagtacatatgctcttgtagggggcagtgtcagctcctggcacccatatcaggaggctcacaactgcctaaaactctacagtcagagaacccaacaccttcttctagactccacagacaactgcatgcataggtgcacatatagacaaacaggtactcatgcacacaaacattttgttttgttttgttttttgttttttcgagacagggtttctctgtgtagccctggctgtcctggaagtcactttgtagaccaggctggcctcgaactcagaaatctgcctgcctctgcctcccgagtgctgggattaaaagtgacacactaacattcttaatttctcttttaaaataaagatatgtgggcagtggtagcacatgcctttaaccccatcactcaggagacagaggtagggaaatcactgagtgagggctagcctggtctagagaaagagtttcagggtggccccggacctacgcagagaaatcctgtctcaaaaaaccaaaaccaacaagagaagaaagggagggaggaaaggagagactgtaccaagttgggactgctgtccctggtgacatctcaggatgcctatccatggctaggacagaattgcctgggtatggctctcatttgtcatatgtggttcatattctgggcctgttcacccttcagtggttcctacagcctttctgaacgtgatttctccatatgctcatgaattgtgtatggaaagcacaactggagaagccacaattagaatgagtgatgacgtcctgggacaggaggttgctctttgttgtcatcccctcccccacctctctatcacttgactgagacagcagacccttggcctggcctactgctcacaggtttaaggtccctctccttccccccacatccgtccatctgcaaacaaaccagtgtctcccatctagctaccttgcttcctgtcatctctcctctcccaggagctgtgaggagttcattcactggggtgtttatctactcagtggtgaaggccatcaccgccacacaccatggcactgtgggcagcatccagccacactgctctccatgttttttctaaggtggtatcctttgctagcactttaaaatcatgacagttctcatttaaatgctcatttctgccctttgaagccatcacaagacccacgttcccacttgtggacaagctgcccaagtcatgctggcttcccattggtcaggtctgtgttttccgattgcctccgttcctctgcctcccgaggtcggcagctatttatttccagcagccctttcattttaagaggcttagaaacgcagctccaagtgtggaaactcaggtcagtccgctgagaacgcttatgaaattcagagctgagcggagcacaagcccagacacaggaatggccagttgcattttgttttgctttgctttccaaaagcatccgccatacttgatctcatcttctgccttctgtcctctggcatctcaagctgtggtggtggagaatcttccctgtccatgaaggcagtactgagaagggaaactacatctctatggctgatgggaacccagcaagtcttgcttgaaaagaatacttgggggcggggctgtgcatttatttattctgggtaatgaggatcggtttgtatacacactatggctcctgtatggaagtcatacaggacaccttgcaaggatcagttctttccttcccccatgtggcttctgggaactgaactcaagttattggatatggtgctaagcttcctttcccattgagcaattttgccagtccttcacaggaatttttaatttctttttttttcctttttttggggggtggtggtgttcaagacagggttactctgtgtagccctggctgtcctggaactcactctgtagaccaggctggcctcaaactcagagatccacctgcctctgcctcccaagtgctgcgattaaaggcatgtgccaccactgcccagtgaatttttaatttcttgaactggggtgtgtgtgtatgtgtgtgtctgtgtgtctgtgtgtctgtgtatgtctctgtgtgtgtgtgcgtgtgtgtgtgtgtgtgtgtgtgtatacaagcatgtgtgtatgtgtgtgcacacaccattttcgtgcacacttccatatggaatcagaagatcagaagacagtgtctctcttttttgaccactccatatgccagactaggagactctggagactcccggctctgcacccatttcactgttaaagcattggggtaacaggcactgaccactgaacccagcttttttttttttaactgtgggttctaaggggttgacctcctgtcctcacagttacacatcaatttcttcatccactgaactctctctccagcccgctccactttatgttttgacacctggcctctcaatgggctgtgctggggattctcagttaagctaggccagctaactagcaagcccagagagagaccttcctagctcagcctcctccagcgtctggctttgtgtatgtgttctgaaggatcaagcatgcttcagctgtgtggcacactacctactcactccaactgagcacattgcccatgctgactagagcttaaaagtaagagggggaggaaaaaaccacaaaggactaaagaaacccgaactctagcctgggcatggggccagaagcaaagacagaaacacagtgagtttgaggctgggtaaaactgtggtttattaaaagaaaaaagaaaaaaaagcgcaaagagcaaaaggcagagtaaagtttcgccttctgggtctcaagtttgtacaatgacaggaatagaggtcacaccaaggactagcaaagtatagaggtttggttttattgtttgtttggttggttggttttggtttttttttgggggggggtgttggtttttgtttgtttgtttgtttgtttgttttcgagacagggtttctttatgtagccctggctgtcctggaactcactctgtggaccaggctggcctcaaactcagaaattcgcctgcctctgcttcccaagcgctgggattaaaggcgtgcgccaccatgcccgacccaagtatagagtttaatatgccattcagggggagcctggaccctaaaggacctgaaattcagggtcagggaagtgtacacatgctgcacacgcccttcttcggtgcgtaagcacaagaagaatcctttctgtagtaggatgctgggaagggggaggaaattccaactgcccctggaattttataaccttgtggcagtcctcagggagttggcacttggtgttctggttctatgtaggtgagacagcatcttcctctgtagcagggttggccttgaacttatgatcctactgcctcagcctcctaaatgctgggactataaatacgagccagtacattgctagagttcatatagttggatgccaccctcccccaaatccaaggacctcaaactaagaagtcaatttaacactgtctcctctgacacccagaaaagtcaactcctcaatagaggagtctgctcaagccctgttctagaagacagcgcagagttctgaggagtgtgtgtacacactcagacatcacagaacacagtacaaagaaataaggacttcttgttgtaaacacaaacaagcaaaataacagaatcagatccacaccaaattttttttctgtttcttaaaaaagcataaaatcttacatttacactatttaaggaaatagaggactaatatgtcacaaagagtaagaccatctaagatatgaccaaactgatatgattttttaaaaatccagatagtgtgctggagagatggctcagaggtcagtggcatggactgctcttccagggcctatgttcagcccccagcacatacactagtcactcacaaagacctccagcaccagggggtctgatatccttttctggcttctgctgagcacttttacacacacagacacacagacacacacacacacacacacacacatacatacatatacatacacacatatactcacatacgcaaacataaacatacagagagagagagcacaataaaataaaatgagcctttacaaaaagattcagggaggatttctagcaacaagaaagttacagaaagcaaaagctgccaggtatggtgtcttgtggtgcctgtgcaccaactctcaagaggcaggagggttgccctgatcttataaaacgtctttgtgaggccagcgtgagacatctggtgtcctgctccatcagtgtgcaccttacttatttgagatgggctgccatcgcacctggaaccacgccgtggcagccagcatgtccagcacccctcccctccagtctcttccagttcccacaacactaggggcacaggcagacgtttgaccacacctagcttcttacatgggttcttgggatttgaacttaggtcttcatgcttgtataataagagctcatacatacagatccatatcctcagcccagtttctaggattttgataccaacctgacctatctagtgaaccccagttcagccagagctacaaagcaagacactgtctcaaaaaagaaaaagagagatgaagcaggtgaacaagcttagtgaccagacttaattatcaatgaaatatacctgaaatggtcattattaaccaagaatctgggtctacaaaatataaaaagcgtaatgcatttggcttttaaaattgaggttaaagatgtttaaatcagaggctaaaggaaatagaagaaggcaagcagagacccaggcctggaattcctgcagttagggctggagacaggaagggttcatccttggcgacacaatgagctagaggcaagccttaattacacgagaccttgcataagagataggaagagaaggagttgggtgtaagacgataatattgttataaatttcttataaatctagaacacagacataaagaaaggtatcaatcaaaatgtcacaaaagcaagctgaagggctggagagctggctcagtagttaagagtgggtatgtgtcacttgcagaggacccatgttagactagaatttacaactgcctgaagttccagctctgaggcatatgacaccctcttctaggctccaagggcacatgcatgcacagagagagagagacagagacagagagagacagagacagacagagagagagacagaaagagacagagagagacagagacatacagacagagacacagagacagaaagagacagaaagacagagagacagagagagacaatgctcttaaccactccaccatctctccaactcttcaagcttgtcatattaagtacattcccaccctggattattcctgtcttaatgttattttaaacaagtgtgatcacattaggcagagttttttattagatagggtttttttttttcatcttgtatttttcacttaatttccatgccattaacaatgatttgtaagctccctgtgatttcacagtccatcaatcaggtaaggcgtacggttcttgcctgcatcctcggagttgaacgttactggctgtcttcagtttttgagactgcagcagtactgtctggggtgaactcagtagtgtttataaacactttttatcccagggtctcagagtgattaagaatgatctcatttgctctctagtcagtgagatgagccagtagcattttaatttttttttcaaccaggaatattgatgtcctgaagacatcaaccagtatcctctgtgcccgttcctctctgccctgtcttccttgcttgatcctccctgcgcagtcctccctgcccagtcctccctgcgcagtcctccctgcgcagtcctccctgcgcagtcctccctgcccaatcctccctgcccagtcctccctgcccagtcctccctgctcagtcctccctgcccagtcctccctgctcagtcctccctgcccagtcctccctgcccagtcctccctgcccagtcttccctgcagagttctccctgcagaggatgactttccaatcaaatcagagcacagctgaggctcccatgccaccttctcaggctgaggcaaactgagttgctaacagcgtgaacagtctagctctagctccatagcttgcctgggtgtgatccggacagaaaccagcagccttgccctttaacatctgaactgagcaagaactcgaggtagctcagccacgcgtcacaattcacctaatgaggatccccatgcgtttgtgacgctgggcatgcgcattcaactactacctccctgaagtttgtttcagctgaaaggtttttgtcattgcctgaatctttctgggtatttgcttttttaaaaaaaaatacaaaattgcttagcaactttttgtgaaacagcaagtgaggttgataaaaagccaccaccaagtgcagggtgggagcaataagaagctatccacctctgcatgtcaggaagggaagtgagcatagggatgcgttgggggcagactggactgtcttccaccttgcttgtgtcatgaggagcatcttcacgttcactcgctggcttggttgctattctgtctcctgccacgaagcgacttgctgtaattgcctgctcataaaggcattagctcatagctgggcgagcctctctactttgtggtctgacccttctaccagcctggaacccacgcccaacccatccaatgcctctccttcatgccctaaaccaaatacccagtagagtagttaaagctggaggttaatgagtacccagctcccagttctgcttatattgctaagagccacccaagttttctatagtgggagagcttggcttcaaggtgtcctcttcccaagaatgtaccagaacatttctaatatcatatttcaaaagcctggtatggctctcctctgcccatttctgactgtcctgctgccccaactctcacacaggagttcaaggccccactcctctgaacttcaaaattcttctgctttgcatacccttggggagaagggtcctaaaataatctttttcacttcccacttactcagtatagttgggtggttaataccagtaatctctacacttgagaggtggaggcagaaagagcagttcaaagtcagcatcaggtacagagcatgtttgcagtcagcccaggctatgtgagatgctgtcttaataataataataataataataataataataataataataaagctagaatgtacataatatatgcaggcctgtctagtttagagagttccaggaaggcaccaccgtgctagagcacacaaagacaagtatctctatttcaagataagatgaggggcaaagacccagagtcatgcagctgcctcggtggggagctggaacctgaatcttggtctggaccattaaggcttcaccaacaagaccaaaggctggtgtcatttctttgttctttcgtacaagagatatattgctgagcactgctttcagtgctgggatccatagcccacaccacctgtgtcacctgtgtacccaggtagagagtggtccacacctggaatcccagcactggagatcaggaggcaggaggatcattcttaacaatatagagaacttgaggccagcctgggctacatgacagcctgtctcaaaacagcaaccaaaggtgggggtggggtagaggtgggtggtaggggtacctgggaggcattgcaagctggcctcctcaaagcacctaccaaactcagctttcagcatgccgcattgtagccacactggccttgattagcaggaggcacactgatgggagattcaggtggggaacttacctcccttggcgcctccggccaccctgtagcgtgatttggacagggatgctgaagggctgcatgaggccaggagatgtctggatcggatgctccccgcctgagttgtgcccttttagagcgcaggaggcttaagcatcatcggaagtggagtcccagagggagttgccaattccctgcctagccacagacaccaggacccctgctgcatccagagctggcggggtcctctagaagtttcctagagaggtgggaactcaggcagcctggctgcaaagcaacgttcaggtatagttgctcatggagtacctaggtggttctgtagccaacaacactcccccagcattgcctggcgcctgttccacctgacacctgtgtttcctctgaattcaccaggtgcattgtcatagagaccaataggactgtggaaagttctgaggccccagggactctgtaattggggacagacatacccaatacacaacgtgtaagaagaggaaatgttctgtcccagacacattcccttcttttttcaaaatattatgtttgggtacaggcttaatatagtagccttttctgaataaaattgttctgaataaaagaatagctttacaaacctgtgaggtgactcagtgggtaaaaggtcatctggccaagcctggtgacctgagctccatgcccagacaccagtgaaggtggaaggtgaaagagccaagtctaccaaactgtccttcgaattccacacaagcgcacaaacaggtcatgcacacacacacctggcaatcataatattaattcgtttaatttttaaaattagatttacagctggcacaatagtttccactcagaaggcaaaggcaagagggtcagagctcagggaggtagcactaggtgctaaaaaaaaaagcaggtcggctaagccatggaggcgaacaagtaagccacactccgccaaggccccttcctgtgtccaggtccctgtcctgtttgagttcctgccctggcttccctcggtgatgaactgtggtgtccaagtgtatacagtacaaataagccctttctccccaggttgttttgggtcatgttgatttatcacagtatatttgttagatttctgaagcagattaaagacacaggaggcagcaaatgtccagactgacctcaacagaaaatggatactacttctttcaaaacatcgaagggtgaaccctctcctgtggggaagaggtgctcgcaaggacgggaggaacctacggactttctatagggagtgtggcagttggagaataggacagaagtgaggggctacgtgtgaacctttcggtttgccctttcctagttttgcctgctgcgtccagacaggctacaggagaccagctgacccagtgaaagcagcttgagcagggccagctgtataacctcctatgaattctattcttacaactgaagaattctaactgtatgcatttcttttctgctgccgtgataaagcaccatgaccaaggcaacttctacaaggaagtgtttaactgggcttgcagcttcagagagttagagtccatgataacacagtgaaggaacaattgagcactcgcatcttgagccatatccaccagggagagagagagagagagaaagagcatatctcatcatttgtaatgaattaatttgttcatttaatgtgtatgactgttttgcctacatgtttacaggcatgaatagtgcccgcagaggccagaaaagagaatcagatccagaactaactggcatgtcagatggtgtggctatgggtagtgggaagtgaaccttggttctcttaaacacagagccatttctccagcccctctcatacttttgtctcaggcagcctttttctccggtctcctgttcttgcagctccactctgccttgctcctcctcagttattaactagtttgtagtcaaccttcccatctttaccatggtagccatggctaccggtggtgagtctgaaatcaccgatgcttgtcttctgttggcctgcagagtagtgtcgcttcaaagataaagacatttctcttattcatccttctcagctcctacaggatgcatggagtttaggacacaggaaaaatgataattggctccatggctgattttctttcccaattaaaatagaatcctagggatggtgttacatcagatcaccgagtgacctgcgtcctgcaatctcacgtgtctggtgtcatagctagtaaactgatgtgtagaggagaggtgacaagatgtgacgagaacgaggccatgtcactaagtcacacatagacaggaagaggtagatgccctccccagcaacgaggcaagtttaccaagctcaggactggagctgaaactaggtgagtatagagatgatcaggagctgagaccacaactctgcactcaccccaagtggcacaggacaccacactctttccatttttcaagtaaatgtgggcttaggtaggatgacacagatacacttaaggaaagggcccataagaatgctgggagtccctgtgccatgaccaactgtggtgacgaatcttggttgtcaacttgattgaatctggaattaactagaacacaacatgctgggatcccttgtaaggggttacttgaaggaggaagacacacccttaatgctggtagcgccttctggtggtggcccagatgaaaggacactgaagaaggaagctttgcttttaacctgcttgccttcactcatgatggcaagttcaccatcctaccgctgtggcattcctttgccgatatgagaaccaacttctttgagcttccagtgtatagactgaaaaccagctagcgccagactgggactgctgatacttccagccctgtggatcgagcaactactggattttcaaccttgccggtgtgagatagtctttgttggacttcttaggtggcatggaaatccttgtgctcacagataaatgccagcagaaccaggaatgttaaacatgcgggttctctcttcaaagggagccatgtaacctgttttctgaccagaagactaggagcagatgtggttaatagccttgtgaccttttcattccctgtgtgacagagaccacaccagatcctccccagggctcttaacttgagtttatttcctcagttaatctataggatccatttttatggaagctgtcacttgtcctttacagaaagttttgacatagtcatgtcttaagcttttgtggtacacatgggattgagttaattatcaccaggaaactctttgccaaactgtgctgtgtttaaatgtgcctaaaataaactcttccaggttggacttttgaagtttgaagcatcactggctactgagtcgggctgaactaaattgccttttttgcctctcttggatcatgacatctgctggataaggtgttcgcagagaccccttcagacaccctggaagtcaacctaacaaagcccacgttttctaccagctctgttcctttcaagaaccgtgactaatgagtgtaccaaccacaatcgcaaaggctccattcttcagtcacttgcattttttaaatttggtttttaacatatgaatggctttgaaatccacgagtttggccatagtcaacaagcctgagctttgatgcctgtatgtcagtcacatattcagattcctgatgaactcaactggcacagccccacacaagtaaatttggaacagagttggggaagtgactcaggtggcagtgtgcttgcctagcatgcagaaatcctgtgctccagtcctacatatatcaggtgtggtaacgtatgcctgtaatcccagggtttagaaggaggaagtctggggggggggaaggaaggcggggttcaaggccagccttgactatttagtaaattggaggccagtgtgggatacataaagtcttaaaatacacacaaatcaaaggctcactagcaaaaaactatagctctgtatcagagactcacagacagactcactaaattcctgctaactaaagctcctggtgcaggatgggaggaagcaggcaagcagaaagtgcacagtgctttgtgacgagaggaaaattaaaagcttaaaagtgttaggagagcactggatgttgtagcacatgccttttatgccagcacttggcaggagcgggggtggagggtggcggggggggggggggacacttctgaattcaaggccagagtagtctacataacaagttccaggacattcagggctatgtagagaactcgcccctgccccccccccaaaaaaaaagatgttaggacagcaagaagagaggtctggacagaagtctgccccacagacaaagcagagagtgctaaagaaggagcctccagttcagtcagcataactaattcattacattccctagggatgtggtcagctcagcatgctgtggccccagcaacacagaccaaacagtaacattctagaaaggatttagtgaatacacactttggccagaatgttttcaggccctcagcgtaactgtgagcataagcagagaagttcctgcccaccaggaacttccattctggtgtggagacataaagaaatcgagacccaagcacagttaatccagatgcttgggcgtggtgaagaaaggaaagcaaacaagcttggggaaagccatgggaagccgtaggccctgcatagtgagctgagagcctcacagcaaggagcagccaatggaacagatagcaagacaccataaccaggcagacacaagagcctggttggcaagaagacacaacaccatggcttctggattcccagcactggggaggcagaggaaggaggctcaggagtccaaggcgcaacagctaatgagtgctccatcactagaagggagtgacatttagctgggctcagtcctactgcactctgtcttaatgagttgcttcagtgtttcactacattcagctgaaggctgagtcacacatctttttattcactgccccagacccacagttgtgaatcaccatagccacctggtaatcctttagatatgccaacctttctcccacagggccagaacaggggcaagacagtcatcagttggctttctttggctgatcacaggtttaggggctatgtggagtgtgcagaaggttctctgcattggaagttcctgtgagtaagccaagtaactgccatcttgggacatttacctgtgaccccttgcaaaacattgtcccaacttgacttgtgtctgtctacaccctctcatggcggggtgggaagggtgactagactgtcatctgagttcctctctagcacctgctgtctacaactccgctttcattgtacatgatctcagagagaggctaagtatattggccagggaagactgggggaagggaggactccatctatggctgtggggaccctcagccctgctgggtaaggtttatcaggtgcctgctgggaaagcagcacccatacgcctgtagatgacccctcatctgggctctgtaaggaagcccagtaaactcattggttctctggcatggacttcagtttgtctttgggaccttagaagagtaaacagtgcttctgtctccccctgggaaggcattttagcagcaaaagttcacaatctcagcactcagacatgagcctaacaagaggccttgcaaggaatttagatagtagctccttacaattcagtaaaagatagtgtggaatatatatttaacttaatatttgctggtagccactatcttagttgacaatattttgagacagggtttcacatagctcacccagccttatctcaaactgtgtgcaagaatagcctgacctgttgatcttccacctccacctttgaagtaatgagattacaggtgtgcacatgtcttcaaaacattgaaagaggaggaggaagaggaggaggaggaggaagaggaggaggaggaagaggaggaggaggaggaggaggaggaagaggaggaggaggaagaggaggaggaagaggaggaggaggaagaggaggaggaagaggaggaagatgaggaggaggaggaagatgaggaggaggaggaagaggaggaggaggaggaagaggaggaagaggaggaggaggagctgaattggcctgtggtggtggcacacacctttccaacacttaggaaagagataccataagttcaaggtcattcttggctacacaattagtttgagtttgagaccagtgtgggcaattaagactctctctctctctctctctctctctctctccaaatacatatgtgtgtatatgtatgtatatgtatacacacacacacatatatatatgtatatatatctatatatacatatatgactacacaagtcaaaggtgtgattttatataatacttcattaatacaaaacttagtgttatatcccaataactttaaatttaactccattttccaatagaaaggacacagctgatttccttttaaaagatgatagtataggtcaaacattgatatgctaagaaattagatgctatgattgcaaaagggttcagtatcacactcaaagtgagaacactttctatttggggtctttctctgccagccaatagctctttgcttcaattatttcatttgttagatggcagaaagtctggatttaaggttgaaaagagcggtgtgaggactagcttaatagttgagactgtcatcatttacgcaaagccaacatcaaatggatttcaactagattaaaatagatgtacccatccccttctctgcttcctgagtatagatgcatcgtgaccagagcctctgctgaagcaccttccttgcccaccaccttgtcctccctgtcctgagagactggattcctcttgaaatccaagctaaacaaactctgtccaaaaaaaaaaaaaaaaaacccaaaatccaaagtgggatggctcagcagttaagagcactgactgctcttccagaggtcctgagttcaattcccagcaaccacatgggcagctcaaaaccatctaaaatgagatctgatgccctcttctggtgtgtctgaagacagctacattgtactcatgtacattaaataaataataatcataataaatccaaggtaacatatatattaataacggcaactcacatgcccctgcatttagacattgagatttcacacgggtttgtgggtcatctcaggcactgacacccactagaagcagcactaggggtcttaggtatacaaatgcctcagctctttttttatgggtaaaagagaatagtgtgttacccttgaatggctaccaccatgacacccaaaccttgaaatgtaaatataatgatcagggaaaaacctcattcttgagactctagatggagctggcatgccaccctctccaactccaccctcactccacccccaccaatgtcctctgaacattaaacaatgtcctcatacaatgaaccctgagtgaagagagatgaggcgcccataagatgccttggaaaccattagcaggctcttcaccttcaatcagtgtttaggtcaagtcttctctgctgaaacacccgtggtgtcctccttctgctcacctcttgccagtttcatgctacaggtaccagagcacaatctgtgtcctttccaaagatgtccctgtctttagttcaatcccgttgggttggttcacacagtcagtggatgtgacccaggtctatgcatcacttgcagcgtaatgggctatgcaggtatggcacattggataactgtttggatctcaattggtagaatgtttaggaaaggagacatggccttgctggagtagacatggcttcaatggatgtcaacccaccccttgactagcaaagctaagtctcattttttttttttttttagctcaaggaatatgtgatggttcatatatgctcagtccagggagtggcactattagaagatgtggccctgttgaagtagttgtgtcactgtgagtgggagctctaagaccctcatcctagctgcctggaagtcagtattctgcttgcagccttcccatgaagatgtggaactctcagcaactcctgcaccatgtttgtctggatgttgccatgcttcatgccttgatgataatggactaaacctctgaacctgtaagccagctccaattaaatgttgtcctttataagacttgccttggtcatggtgtctgctcacagcagtaaaaccctaactaagatatagtacacagccaatcacttctcatttttattataaagcaggcaaaatgtgagttgaaatttactgtaagcttgggtaaatgcaagaactggaggaatgctcctggtgtgccacatcttatcatctttggtcatgtgaacaagccaagaatattcttcctgagcctttctttgcctttgcaacagggataatgtggacgtgccaggcatcccttcatgaccttgctctcaagtgcattaatttatcacagtttatgtaattctttctagaaggccacactgtgggaagaacattctgtactttgtcccagctttctttactcagactgccacacttgaaggaggtgtgtcactgagagtgggctttgaggtttcaaaagttcacatctagcccaatctccctctctctgcctgcagatctgaatgtaaagccctctgctgctactccatccccgtgcccgcttgtctgcctacctgcctctgcactccctcttatgatggtggtcatggcctcaccctctgaaactgtaagcaaggccatgattaaatgctttcttctctaaatggccttggtcatggtgtttcatcatagcagtagaacagtgactaagagcagcaggagtacataatgctgaatagagtaaaccatctcctccctacctacttctgcttagggattatttccaataggcaaaacccaatgttgcctctgggctgattttcccaggctggaattagaattcagaaaactgttcaaagacagtgcccatcctctgagtacttttcaggaccttgcatgtacatgatctgttttgacatttgtaaatgaaaagattttttttcaagagatagaacatttgaggactagagagattattctgtggcaacgagctcatgcttctcttgcagaggacctgggttcaggttccagcacccacaggggtctatgttatctgatgctgtaggcattgtactcatgtggtgcatacacacgcaaacagtcaaaacacatgtacatacataaaataaatctttttttaaagtagaatactggtactggagaggtagcctctgttgggaaagtgtttgccaagcatccatgaaaccctgggttgtgggaagccgttgcagagtggcagttgcagagtggcagttggctactgctggccaccacacatacataggcagtgaaggttcttttgccaagacaagttaaccaatcagatgtgagacatgcctctcctaggcctatgtaagcagcaccagttctgggctcagggtcttttcgcctctacaatcaagctctcccaataaacgtgtgcagaaggatcctgttgcagcgtcgttcttcctggccagtcgagcgcgcgcaagactgggttccatctccaacagcacataaactgacaacattgtgcacacttgaaatgccaggaaaatagctaagtttaaggcaagacttagcgtcttagttagggtgttaattgctactacagaacactataaccaaagagcaagttggagggtgtagggtttacttggcttattctccgacattgctgtggttgtggtgtctcctcacagcaatagaatgctcaccaagacaaacggcttcaaagtgggctagttcatcccacatcctacgtgctgtgggctccactcattctgctcttggtttcctaaaacccatttgtctgctcttggaacagtttcctatgttactggagttcttttcaagaagacattgcccatgcctatgtcctgtagtagtttcctgattcctaatattaatattctactcaaatattaaggcagctgagagctaccccacatgctgtcatcaagagactctgaagtagggccaggacatgcgcactaagaactaggtttagcagtgcatgcctataattctagcactaaggaggcagaagcagaagggtctttacaaattcaaggccagcctgctttacatagtgagttccagactaaccaaagacacacaaagagattctgaggagaaaaaaatatatacaagttaacagacacatatttctgagaagccaaatggaggtcccctatttagtctctcatgtgctgtgagcatcctgtagactcgtctttttagtattaaagtggatttaagatttgggtccattagttcacaaaggtcagatgagacttcttcatgcttccctgagggtggaaatgctaattacccaatatgttccatctactctcagtcggctgaggtgttcccttgtaattagtctcctgcttctgaaccgagagggagtgtccccacggacaaatcttcctctatgcctgaacttccaaattaaacttggttgtctcatcagatcaatttccatgaccaggtcccaggttgagagtcagaaagggcagagagatgcagtccagaggaccaaatgtctacaatagggacattttcaccagctacattaaatctgtgttctatggggagagtgcaggctcagggctggcctgttggtctgtgccacatgctcagtatgtcaaaggccacaggtccaacccccccccccccgcaccccctccctccagtgcttaaaaaccaacaacaaagacgatgagactcacacatagtcaggccactccctttctctgtctatccggggtcccacatagaccaggttgaccccaacggactttgtagctgagaatgatcttggactcgtgacccccttgcttctgcccacaggcatacaccgccatgcctgcctgaactactaaaatgtcggagccaacgctcgctcactccattcagagtattccaaaccttctctaagcagttccgctggtctattatttttcctgagagggcagtgagctagatcacagcaatgctcaaccacgggttctagaaagctcctcctgcctttgtcttcccttttcgttctaatgtaggagctggcagcacagccacctacccttccgctaccctggcctaagctcctgcctctgaggccgcctgtcccctctgccgcttctgttgtcaggcctgcacttctgcagcagcgctggccccttccgcttctactcagaccaaccatctttattgtgtacttgtgtcccgttaaaatgaagttgaactccctgatgagtttaaaggtttaaagtttaagctggaggtgatggcacatgcctttaatcccagcacccaagcacccaggatgcacagggaggtggatctctgtgagtttgaggccagcctggcctacagagctaattccagaacatccaaggctatacagagaacccaataagctacaataaacttggacgtgaactaaccacccagcagcacttcctgtaataagctgaccctgggatgcaccccgacataagacagacacctggaccaatataagaagctatttggaataagacttccattttgagtagagggttgagtaaagtttaagcttccaagacctccctgggagcctacatcctacttggcagaaacatgtacgtggggaacttacatccgggttggcaagttaagacatgaatgttgccgggtacggtggcgcacacctttaatcctagcactcaggaagcagaggcaggtggatttctgagttcgaggccagcctggtctacagagtgagttccaggacagccagtgctacacagagaaaccctgtctcgaaaaaaaccaaaaaaaaaaaaaaaaaagacatgaatgttaggtaaggcaaatgccctgccacagttgaataccccaaccaatgggaacaggataaatgtacaaaaaagacctgttccttaggaaacccctatccctaaat

SEQ ID NO: 65 - DNA, 92011 bp, Homo sapiens
gaccacaaattttgcattgttcattgtagcactattggtaataaaataacaaatgtttgtgcatttttatgtgaagatccttctcgtatttcatttggaaagatgagcaagaggtctgcttccttcattttacttccccttctgtttttgaaaggcagtttcgccaagcttaatgcaagaatatctgactgtttagaagaaagatattgccacaatctctggatggttttccagggttgtgttattactgagcttcatctttccagaatgagcaaaacactgtccagtctttgttacgattttgtaataaatgtgtacattttttttaaatttttggacatcacatgaataaaggtatgtatgtacgaatgtgtatatattatatatatgacatctattttggaaaatgtttgccctgctgtacctcatttttaggaggtgtgcatggatgcaatatatgaaaatgggacattctggaactgctggtcaggggactttgtcgccctgtgcactaaaagggccagattttcagcagccaaggacatccatacccaagtgaatgtgatgggacttaaaagaagtgaactgagacaattcactctggctgtttgaacagcagcgtttcataggaagagaaaaaaagatcaatcttgtattttctgaccacataaaggcttcttctctttgtaataaagtagaaaagctctcctcactgcagtgttggctttgatttgaaattgcgaaattatttcttcaacatgaaaaatagaggaaacaaactgaagttttacagatatcaaactgaatggtgtgactcaaatgtctttttcagcttccaacaagtaatttaatggaaatatagtgaaccgtttcacttgtaggttaaaaatgtagacagtattaatcagagaaaacttttttaaatgggttgtggcagcattagaaataaaacattctgaatactcttggaacccaaccaaagtacttctgtgaaaaatttatgagaaatttcttgatagacctttaaatttatctttaagaagtaatgtgcaaatgaaggtaagccataaggtgggaatgggtagactttaccttcagtttgctggcctagatatctcatatttacaagttagtggattcttttcccatctaaatacaaatactgtattttaaaaatcagaagattgaagcttccaaagcagaactagagagtagaaaaaaggcaatgagttttgatcctttaaattttcatttttaacctatttttctatgaagagtaaaagtctgttggcattaaccaaatcttttgaaaatgaaacatttatgacattgctgtgtttgtgtaccaggaatataaagtggcttaaaatttacctttttctatgcattttgagatatgagaaacactataaaaaacaggattttctatctttcataattaaaccaaagcatctcctcagtaagaaagatagcactatataaatcattttatctattgtgcacaaaccttcacagaacactataccttatttgacataaaccagagtcaaagcatagaaatcaatctagaaaaaaaaagattacatttttcctagtaattcactttgtaaaataaaatgtaatttttcctacataaccacaaaaaacaagtaggaagaaaaatgtggaaggggatctttattctcatgaatataaacaacaatatagattgaagtctcagctgaagcgtgatcatgactggtactgatgaatgactccgaaaaataagatagctcataccaagtggtttgttgtcttggctgtaatctttttttctctttttttgttaactgccatatacagagttttaaatgcacacttttccatttttttgagttctttttatcctgaatcatcaaaatgaagaaactcttgcatgttagccaactttttataacttgttaatatcagaaattaccatgctatggacttcaaaatacaaattactctatttgaaatatttaaaacactactttgaactttttaaatgtaacagttataatacgccttgattttataacgtggttatacatgtaaagaggctgaatccaactaattatatttcacattttctttcaaagctttaattctgttaatttccccctatatagctagtgaaatagatgtgtacactatgttaaataaattttttagattaaactatgattggctttctgggaataaaagctatttaattgcaaagggaaatcctttatttggtttcaaatataattatttaggtggtattataatttatatgctaaagctctattttcagagacttaactacacaaatagttttccttagatataatacattttaagaactgaaagtttatgttaattcttaaagtatatataactagtctgtttctttttgacactgaaattgggacaaagcaggtgcttgatagttgttgactgataaaagttgatatttcaatttgaaaataaagtataaagcattgggctttgagatagcttactcaattatcatttgctataatttcattttcacaataatctttttaagcattttcaataacttttaaatatttcaaatttttccagtctatagcttctctaattgataaatcctcttctattcacaagccatagatcttccactttgttatatccattgctcataaaatatgtggcatctgagcatggctgtacagtaggactcatttcatttaacttagatttaatagctcaattttgcaaaaagttgctgaaaacctatacgtgtgtggaaacaggattgtataatacattaaccatggtttgtctatgtagttaataagatctagaaatatctactaactaggttccattgagatagtctctggagaatgaactaagccagacattgagatgcctttactttctaaaagttggatcctaatggcaggtcacaaggctgtctccttgccactggcattaccagtgactttgattataccatgaatacatgacagatctggaagatgaagcaaataaactcactgaaggttaaaattgggatctaaatctaaccaagtagtttggtgtgtagagttgaatcaaataggatacattcaatcaagaaaattacttagttttgcactttgattgttaataaagaatggtggaatataacatgatttgagtggttcatatatagatcagtaagaattgtgatcctgttgccaaaaatactaatgtaatcttcagctacattaagaaaaatatagcactcagaaaaagataggaagcccactctactggaagtaatcactcatctgaaatgtcatcttctgtttgaatgctgtattagaagagctgccatgcctggggaaggcagaaggggatggagaagtagcatgccttctagctgcctggcaaatgctgtgtgtttttatatacattgttgtctgaagaatagcatcatgaggtgaaatttagtgttcccattttagagtaaattttaaaaacaaataggaatacaattttggaaacatggtatttgtcttcaggtatcaaattcaagagctgtcaatgaaaggcaattaagctcattcttgtgactggaagagcagaactaggacaaataagggatttcagtgcaatattaaaaagtaactgagttaattcagatttttaaatcagttgctttgtaaggcgttagatttaacttcataggacataacctaggagagactggctggatagtgttctgtgcataaggtaaggagttgaatgtcttaatgttcctgtggctcattgaaaaagtgttaaagtaagtgagataattactgtatttcagcaaatctaattgccatcaattgtaagggacaccattttatgtaccactaagacaagctgccaattacagaatgtatctattatgtgaagaaagaacgtgcatcttagaattgatgagatgtaggtcttggagacaactaaagaatactaaggggaggcatgacagttgtcatcaaacacaggaagaactggaatagggcaagtctcaaaccaataaggagaagttgaatgaaacagactttttctatattaaggtgctacacagtactagctgcttcatgaagtaaaggttcagtcaatgtgcaaacaaactgaatgactctcaattagttgacaggactgcctttttaaataaaaagttgaatgtgattacttccagacctcttttcagctctttaaggtactgatacccttttcttgatttgaagttggagactatgatgtcatcagggctaaaaggtatatacttaaagcattgacctttaagtacataagaatatgctgttctgtgaatcatggataaggtatacttaaaatcactgctatatctttggaaagaaatttaaatcaaaaaagaattacaaaaggcaactttattgaacttacatgtagagttgttttgatgttaggagtaggaatgtgaaacattaataaagcacaacaaatagtaatcatatgtatgtgtgtattcaccagatttatttatgtgtatatttctacatttgaaagaggaaaaagacaatttttaagttttgacgtaaatgtttagtctgaaattgtacgttgcattagtgtgcaatctcctgggtacaagtactaagtagaataaaatcttgtttcttaaaatcccactaaatattataatccctgtgtatcaggggcattcatttactttttcctataacatccaatgttctagggcagaaaccatgttactacaatagtatttgttagcagaacaggaggaaagctgaatccatatataaatataaaacagcaaaagtgcttttatctcagttatttcctgggaatatttctgctgatcttaagatttcctcttcagtttgtatgtataaaaactgataatgtaatgggaattacattatcagttatgtatgcattaattgaaggttttttaatccaattaaacagttgtgtaaatactgtgacaagattttagtgacatgtctctttatcataagaactcaagatttatagggctttttaaaaagctagtcatttccatgtttattgtacagttttctctcagttatttaaatgacttcttgaaagtgtcaaaattcacaaggtcctaattgtcataattctctatcttgaaaatccaaattattgcatagtcaaatagcatatgataaccagttgacatgtgctaaaatacttaaactatcttctacatagcaaagccaatttttcattctttttgaaatttatcttagttttcatttctaggcctgaaaggccataccataccaccaaaatgttttgacatctttcttagagaagattaaataaaactggctttatgccaaaagtgttagttcttttagacaataattgaaggcactagctgaggaaaacaaatctttactatgaatcagagctggtctctaatttgtatgtgtttcctgaaatgtaatgtttttgtgatttgcatttatttttggcctaagtgacattttgaccatataatttacttttaaaacttacaatacatgcttttttcttccaggccaaactatttcctagtgcataatgaagataattttgatgataatacatgaattcttcaaacattttggaagaatacttcaaatttcaagggtggtatgatgtccacaaatcgctgagtctgcttgattctttttagaatcaggcctcttgatactaatttataatgagaaaactattttaaattaaacatttattcttcaaaattatacatctgaatgagaaaacattacatgagggaatgatataaatagtttcatcttcttatgtataaaaataaagatttggggcagccagaatgtttcaaagctacctttaaatctgttacatactgaacatttattttaagatggagttttaattaccatatgtaacagtgcatgaaaaatgggctgtctttgagttaaatatttcccctcttaagagaaagatatgtttgtttttttattttgaatgttttaacttattgtcttcaagtggttaatattcttcaaatataacatgctgtctattgcatgagttatatctcagttttaaaaaatgcaagtcatgttactcctctgctcaaaaagttatttccagatttccctttttttatctaaagttttgtataatttttttcagttcactctaaatgacttaatataggtctaaaatttgaatattagttgacttgtatatcactattaggaatccaaattccctacatttgcaatgacactgtcattgaacaacaaaatccattatcctagaagtgtttgtaaattggaatatcatggaaaagaaaagctcagactttcgaatgttaaagtggggcatcctttccaactttgacttattattcttagcattttggactaagggtaaaaccttagtttcctacatcatatcaaaagagaatactgaagaaactggaagttgtgcataacaaaaggcctaggagagacataatggctgtcttctcacctctgaggtagagtcatttgtaaggcttaatccttttttttttttttttttttcttgagacggagtcttgctctgtcgcccaggctggagtgcagtggtgcgatctcggctcactgcaagctccacctcccaggttcacgccattctgcctcatgtaaggctttattcttaaaaatatctttatcctacataacgccagaggacagaataaggaccattacatagctgttatggcaaggcaaatttcaatctacagtaataaagtaccagtttataatttttcaaaagttccagaaatcattaggagttatatctttccatcactggaagtgtccaagaaaaggcaaaaaaaaaaaaaagtattattagaaatattcgatgatgcttttcagtctgcagaggataggatttccttctgccttataactattgcacatctagttattccctgtatttacttctaccttgaattttagcttgaatttttagcaagccactagaaacctaacttaatctctctgttccacataaaacagtactactactatttgctaagcatctgaagaggctattttcaacacaaatgtgattcagagtaaaattaagcagggggaccagattaaattattagttccttcagcctctactcaccgtccccttcataatcgtttcacagtagagattttgattaagcctaactgtacttaaatataagtatagaaacacattttaaatccattcataaatgctttttgtattatctacacttcatttttgttaacaaatttcttagaagtggcatagtatagtagaaaaattgttttaggtaatttattatcttcgagtagttagtatttcttaaatataagatactatgtaaaatgcaaatataaaatcccctggccctgtcacaatatgtgtgcagtcttgcaaaaattacctaatctctgaatgtttttccctcttcttctcatgggaaggttaaattaaggcatttgtaaataacctagcttatattaggtgttgcatcgacgtaggtccatttctctaaagacaaacactcttcctgttagccatcatgctaggacaggctctccatgtttttggattctgttcaagaccttttaacttcactagatactgttatatagcaatacccaattttctaaagtgcatggcaaaacaaaaatgggaattagatactagaatactaaaactcttctagaccaacccttttgtacgacaaggaggaaactaatattgctatggtttaaaagtgtcccccaaatttaatgtgttagaacatattccccaaattcatatttttgatggcatttcgagatggggcctttgggagataattaggattaaataaggtcatcagggtgtggggcctgatgggactggtggctttatatgtacagtggcctgagttaataggcattcttgctttcttgctatggaactgccttctgccatgttagggtacacaaggacctgaccagatactactgtcatgctcttggacttcccagcatctagaattgtaagaaataagtttctttataaattacccagtctcaggtattcagttatagcaacagaaaatagactaagaggattatttaccttgtgtcaaattatttactactaaagctgggaccaaaacctcttggcctctatgtttcaagttccaaagctgatttcccttttactacatacctgtgtatatctctcccatacagattcactgcagttaacatgaaagactcaacagttggtgagattttaggaactctagagcactaccagtatggtattaaaaatttgctaatctatccagaatgtaaattttaatggaaaaaatgtgaattgattgtctgtgttttgctttcctcagttgcaaacataaaggctatacacaaacataaatttgagcttttaaaaaatattttaaataactacaattacaagcaaaatgcaaagtctgggagcttcttggttaatgttgaactaggcaatggttaaaatcccttcctgttctaatttactgtaattagagatagtaagtagtgttcttagtaataattatatgctcattttaataggtgaagtttatggccaggaaaaaacaatcagaaaaaatagtgaccacataggaaatgtattttgaatttaaaattctgaggctaataacaaatatttaacactcataatggagcatggcaaggaaattaatttggtatcagcaagctggaactcaatttcctatgacattaacaaaatctataattatagctgctgaatcaagaagaaaatataaaatggttttatatggttttctttgttggatcactcatactttcatcatgtgtaatatctagtaaaaaaggtctaaactctagaacgtaaattttaatagaaaaagtgattatacattattttcctatgtattttcgcttttcaagtgtttagtggcagttatcaaaaaacttcataatgtgccaatttttgaaaaaattttcccacctgctgtaaattcccttctattcctaggatacaaaagcctgccttaaaattatttttagaatcttttattaaaaagtatatatacatatgatattgtatactgcaactttagcatcagccacaggactttttgaatattgatcatgagaacaaattataagtaacatggctttgatgcccttgtttagacaggctttatttttcttttaaattgaactttatcaagacctggccatgatcctactggaaaaactactgcagacgatgtacatcaaataagtcagtctggttcttaatattacatttttaatcttaattggtggaacactattcaaagaaaggactagctgctttttctgtgctacttccacctttcacagggaacagagattttaagtgacctcagatcttagcatttctgagctttcctggagttcttactaccattctgacttagtaagtggtgacctgtattctgaaactgaggggctgacatatccaatcttccttgggaatgtgataaagcagctccgcttcaagtaagtaaaactaataaacacttccagtgtttcattaagaataaaatagaaattgatttaatttgtgaagtcttaatacgtttgactttcaataaagatgtgaagataaaagtgttcagagaaaagctaaattaaaaacaggaaacaggagaaaaaaatgtctagagaacagaagacacaagtttctttaaatactttaagaataattgccaagaaagaaattgactaaatgcagaactgaaagaaaatgaattttaaaacttcaagaatttcagttaaaataagatagaattttctgattttgttccctagacttagaccaccgtacttcagttttgaggcagaggtttcattcacagaagactttgagctctggaatcattgaaaaacgaaccatattcattaaattattggtagtcccccaactgctgtgcattaataggaattaattctgcctcatttcagttcctcaacatactgagctagaataattgtatcttgttatttgttcatcattgcttcagatcttagacatagcttttcctttcttggaaaagaagattataacaatagaaaaaaaagattatttcctatgttttttatttttcctgcaataggaaaaagattcagattgaagatttgtgattttcggttatgctatttcaattattaaactcacttttaagcaatgtaatcacaattgtctttatgctaacaggaaaagaatacaattcttacatttaaattaaaaaaagaaaatctcaaaacctgaaaggtattagagaacaaagcatcttcctaatttggacgtttttcaaactctacatcttcttaatttattgagaaaaagacacttaggatcttcctgtaattaatttgcccattgctgggaaatacttgttacctgtcataatgtagtgcttcaaaataacgttatcagaactgcagtcgaaaggtactcaataccagttaagtaacatttgaagtccaggaaagagaagtcaagaattccatgattccatgtttccgtattcatcaggaacataattaagagtttattcatttgagacttacaagcaaacaaaaaaagtttatgtagtttgcaaggaagttaatattctgattttattcttcgaaatgtacatataaatagttctcaagtttgattttatgataaaagtgtagtttgggaaaaggtcattctaactttaaaaaggtcgcgaaaacaatagaggctgaagcattgttagcgtaattgggggaggagggagcaacggcaagaattaagagcagaacacaggtctagaaacagtacctgtcccaaagtgggtctgcccggcgctgtcgctttaagcagcgctcctggaaacctcatctacaaatcctggggcgggtcaggggtggcaagactcctaaggagggaaacgacagaaatgattctgttcttgcgagccccaaagcaagagtacttttctgatgggtaaagtggtatttctttccaggctgcaaagctctccacctttttcctttggtctcagtcagccccagccatgggggcaaatcaagttggggtcaactcggctgccagagacctaagttgccacaagggtcaccgacgacctaagcagcaagtttccttcgtccagcctcctgcccccacgcacattgcctccacagcaaactccacctgactcagcttgtttaactccaatcctgcagccctcccggcctcagcagggtcagggggcgcgggtctgcgccaagacggttaggaggcccaagtcctgggactggacggttactgcgctcccttgggcgcagccgctggcggcgtgggcgcggctgggtcacgcctccggcaccaccgcgcgccagcccgcccgtggcatgggaacctgcgattcagtcgtccccggggacctcccagcgcacaccgctagcctggggctttcacctcgatccgcccggcctgggcggctcgtgtcctcccacaccgccacccgtgcccgcttcccggggtgcgcccggagcctggccgctctccctgcaggtgaccagtactcgtttggagttcaagattcccgccgctccacttgaactccaccctcccctcttattattattattattttaacttccctccggttaagctaaattgatcttaatctttcatctcggacgtccctctaaggggagtgagcgaagattccgattgcaagtcgccgctgtcgcttgtgcccgtcagcccctcgcccaaaggagacgcccccgggcggggcggggcggagcggggcggggcggaagggcccgggtctgctgcggacggggcggggcggagcctcctcctgcacgggggagcccccgggctcgccccagctcagacactcctagccttggggcagctgccgggcgagtcagcggagtagcggccagcgggcgatggagacagagagacacccgacgagaggaggcggggtgggggaggcggggagagtgcgggggcggaggctggcagggggcgctggaagctggagcggtccgtgcgctccccgcgcccgagggtgcaggaggctctgaagcggctgctgcaccgcggggcccaggcggcggctggggggctggggggcgctgccgccgccgccgccgggggcgtcgctggcctcggcccctttgttctcgcgcgctccccctcgccgcccactcccctgctgtcgcgcggcggcggcggtggcggcggcggctcctcccgcccgaggcagtcgggctcggcgccgggggcgggagggggcggggggagcacgccagccgccgagagtggggggcgatggcgaagctccgggtggcttacgagtacacggaagccgaggacaagagcatccggctcggcttgtttctcatcatctccggcgtcgtgtcgctcttcatcttcggcttctgctggctgagtcccgcgctgcaggatctgcaagccacggaggccaattgcacggtgctgtcggtgcagcagatcggcgaggtgttcgagtgcaccttcacctgtggcgccgactgcaggggcacctcgcagtacccctgcgtccaggtctacgtgaacaactctgagtccaactctagggcgctgctgcacagcgacgagcaccagctcctgaccaaccccaaggtaagaacgccccgcgcacccaggggctccccgcgagggaggtttggaggcagcgtcggtgttagactccgcgcggggagggttcggcgtgtgctcgcattgctaggaggagaccaggtggcgcaggctgtgctcaaaccaggaatgactacatcagggagccccagggctccggtcttttcaggtgggtttacgcgcggcgaccagtggtgcccagaggcttactttaaaacctgtcttgcctggtctcagattttgaggcctcgacccagtccgggtcctgcgcctaccggactgggtttggagaagtgcaaggagccaagaaagttaacttttcctccatttaaagccagtggttagcggggatccacctactccagctcacggtcaaggtccgagcttcagctggtctcatctagaactcagatggaatgaccttccttgaaaggtcgaggggactctcgaaagttgtgagagagttcctcaccttttcgctctacataggcattttcaacttggggttcaaagataagcttttgtggcttgacaaacgacccggaatcaaatgtggaatattgcgggtccattttgggaagtacagagggctcctagttttcatgaaatagattctcaaaagagtctacagggagcctagttaccctttgtgtttagggacagtcaggagtcgtctggagaacagtaaaacttgctgaaaatagaaaaccttcagtgaaatgtacctaatatgacttctctgacaacttctattggtctcgaaagcaagcaagaagaaaaagaaaaagaaaaaaaaaaaagataaaacctggttaggactcccgggatggagagcagagagaggaagtctcagaaaactgttcccaatggagaaaaataacttataaaaagcagtgtccttagcctgtgaactaattgagctttgtagtgcacctggttctggttccgtttctacttcccttgatcttttctgctctccttgttgcttaactatcaaaggtatgtatctttttaaaagttactgacatttttcctttttttgagggatcaagcagaaaaacagtccaaaagggaatgcatcttgtgttcacaggaaaactttctgttaactctaacaagatatatttatattaatccaaaagaaaaaaattctacattaatattataatagtatttaaaacagcttaccgtcactctgcaataaaacttgtggtcttacctcctgaacagtaaattcttgaatttgagacatttagaaaatatttctttttaaaaatatgaatgactcctctcaaaaaaaaaatgctcctgtcgacaaatgaatattgatttaccttaaaaaatatcaataatacataagcagtaaatataggactaagaatatagaatttggagtataatgttaaagatcttgaagaggtgataacgtctcaaagacaaatgttgtaacttgatcctcttaatgctcaggaatttaaaaagaaatctcagggttttagaaacatttttttttttagaattaaatcaataatgtcaaagatgagtgccaaccagtagtaatgatttagaaattatatggcagttcatcatttagaagttgttatagttggtgaaacgttgctaattattttaagatagtggttcaagcactaataaatttcatatctatatatacatatatatgcacacacacattaataaatggctaatatctaatcaagacaaggacaaattataatttattacaaaaagactgcttcacaattttcaggcagtttgaagtatctggcagaaaaagtaaattgaaatcattgggacgttgatttttaaattacctagaagcaatcccaatgctttatgtaatactaaaatttctcctctctcttttctttatctctctctcccctgaaaataatcattttttttccagtgccagttcagatcttggcaacagttgttttgaaaaagtacctgaacaaaatacattttataaagtaaagtattcaggaactgacagaactggagaagaatatatttatgttacagaagtcatggacaacatcctattcattttagtcaaggttttctcagccaaaccaatttatatctctttatccagattataattatgttgtatcatttatagactgtaagtttgttctttagcatcacctttctatttttgaccaataaattctcaatttggaaattcttataggcagtgtgatggaaaaattcaatgtaataaaaatattatgccagagtcatgtacataagcagagtgtttccacagtgtccctgcaattaggcaatacccattgtccattcctgttggctcttggctgcctagatcttttctttgccttactttacctctttattgaaggcctatgcttcccctctgtttctttgtagaatgtctagattcccaacagtgtcttgaatcccagccgcctccaggcttttcttcatgacccaccaacacaagaaaccacttaggaaatcacttcttagaaaaaatagaataaggagttttttcctctcccttgagtttcctgcattaattacagtaagaggcaggagagggaaagaatacattgcaaatacagaatttcttaagccataagctgctgaagaagatactgtgagtaaatttgatctttgactaataatttctttaaaataccttgagttcctactgaatttatttgtattttgaatcatatccttattgtctaaagcaatcactatatccagtcttgtaatagagtattcaaggcaacaaattgtccacagggagattatctctgtggattaaccatagcaaaatctaaattcggggtcaacttcctcttgctactattccagtcactgcactatctcttggtgactcacagttgtatatgctaggagctttggttctcacctatggctgtaccttagaatcaccaggggaactttaaaaagaagttcttatggctgggtccaactctccaagattctgatttggtcttgggtggggcctgggcattgatgttttttaaaagttctgtgatgattctaatgtgaagacaagattcaaaaaccactgtcttagaaaatgttctcatctgctgtgcaagaaaaacaacctgagaaccaaaaaggagtcattgtgattaatatttgtgttttcagattaaaagatattgttggtgctactgaattttttgtttttttttgtttttttgttttttttttgagacagagtctcgctctgtcgcccaggctggagtgcattggcatgatctcggctcactgcaagctccgcctccctggttcatgccattctcctgcctcagcctcccgagtagctgggactacaggcgcccaccaccacgcctggctaattttttctatttttagtgagatgaggtttcaccatgttagccaggatggtctcgatctcctgacctcgtgatccacccctgccttggcctcccaaagggctgggattacaggcatgagccaccgcgcccggccagtgctactgaatttagggagtcggtataaaaggaaattctgaaggaaagggagagtattatttaaaattattatgtaaataatagtttaaaaccaataagtttaaatgaaatgaacttgattccagacatttgcatttgcataattatatacattggatggccaaaaaaaaaaaaaggtgagtttttaaaactgccctcttgtatgtgagacaagacagagtgagtgattagagataatatggttatttcatttatttatttatttatttttgagtctcattctgttgtccaggctggagtgcagtggcatgatctcagctcactgcaacttccgcctcctgggttcaagcaattcccctgcatcagccacccaagtagctgggcttacgggcatgtgctaccacacccagctaatttttgtatatttagtagagacagggtttcactatgttggccaggcgggtctccaactcctggcctcaagtgatccccctgcctcagcctcccaaagtgctgggattacaggcgtgagccaacacgcccggtctatatgtttatttttattttgagtttttttttccccttcctctaataataaaaacctagaaacaaaggataaaaggctccttctaagaaaccagtactctagaagtgagagaaatgcattaaggagaagaaaaacttaggtgggactgaataaggcttcaggcattacgtttgctgaagttggatgtacctaactacagggcgtggtggctcacagtcacctaggccctctccacatccactcatgtaccctgtcccagtgcactgtaggagaggcagtgtggcctgcctggaattgtttctgaactccttcctggaacattcagtttgatacattttgcgctctagagacatccatcatatcagaactacatgataaaaggctaagcagaattgtgatgacttctttgtaacctttatttatcttgaaaaagtggcatttcttggttgtttttcctttggagatgatgttatataatgtttggtatatacataaaattcaatcaggaaatcctttttcagcatctattataatgatcaaagaactgggcaagaaactagagggcatacaaagatgaatatgttcacttaacaaatattcatgaaacacgtatcctgagctatgtgtgcattcaggtgctgagactagaatataggtcaaaacaaagttcctgcactcatggaacttatattctgctgggaagtaacagacaagaaataaatgtataatgccatgtcatgtaatgataggtggataaagaaaatttgggcaggataagagtatagacagtgacaaaatacgtgaagggctcttcttttggacagggtggtcagggaaggccgctctgatgaagtgacatttacacagagacccaaagaacatgaggggatgagcagagacagaagggatgtaagtaatgaatcatgtggctatctggagacaagagtgtccaccagctgaggaaatagcacatgcaaaggccctgtgacaagtgtctgtgtgaggaactatgagggcgaaagtgaggttggaccacagtgagcaaggtggacagtgggaaatgaggttagggtcctaaagaacacgatacggactttggattttattccaagcatgatgggaatctgtgacattaagcggggctgaaatatcatcagacttagacttttaaaaaatgcaaatgatccctctcgctgctgagttgaaaacagaatttatatgtatgtttacatgcacatgcacacattctgacttgtgcagtgagaggtgcagaggcaagacttgaaacaggaagtcctgtaggacaggcaaaagatggtggtggcttagatcagtgggtagcactggtaaaatttactaatgaattggatatgaggaatgagggaaagaggagttgagaatggctccaaagtttgtgtcaagtgcaactgggtgaacggaggtgcttttagtgatgggaaaaactaaaggaatagtaggtctggaggagtgtggatgaaaatcaagggttcagttttgcatatgcctaacagacattaaatatgaggatgaatccatgagcctctgtcctcaaggaaattattacctagcagaggagataaggacacaaataactgtcaaacaaggcagaatgtcaagttctacagagaggtacaaacattatgatatgaacatccagagggaaaaagttagggggaaagcttcatggagaaagaagcatttgctataagtccgaggatgaacagagtttcatcttggtggtgagtaaagggaggcagggtggaatgaagagaacatcaaagaagataaaatgcaagaaacaaagctatgagctgtgtgagtgtggggtgtgttgggggatctggatggactggtgtgtgtggaacacagggcacatagaatgaggtcttgggggtaaggctggagagtaaattcgagcccacagtgtagaagacccaggcagccaggatgggtttgctagatactgggaagccatggtaggaggaataatgtctcccttccacgatgtccacatcctaaccctcaaaaactgtaagtgtcttatgtcacatagcaaagagaaattagagttaaagagggagttaaggttgttaaacagttgatgttaaaataaggagattatcctgagttatccagacaatcccaatggaatcacaaggtacttaaaagtagaagacagaggcaggtcagagtgatagagtttgagaaagatccaaccagccattgctagctttgaatacagaagagggccatgcgccaaaaaaagcatgtagactccttctccaaggaagtggtaaaaggcaagaaaatgaattttccgctaggcattcagaagagaacgcagcctggcatcttggttttagcccagtgagacacattctagattctgacctccagaattgtaagataataaatttgtgccattttaagccactaagtttgtgttacagcagcaataggaaactaatacagaagtcaaggacggtttttgagtaggtgacttatgattagatatttaaaggcgtggtcagaatatctctttagaaacaatctaatttgggctgggtgtggtggctcttacctataatcccagctacttgggaggctgaggcctgtaccacgtagtaagatcccatctcttaaaaaaatatcaaggaaattggctggtcattgtggtgcacacctgtagtcccagctactctggaggctgaggagggaggattacttgagcctaagagtacaagactgcagtgagctaaatttaagtatgtgctttaggactttagcttgggtgacagagcaagactccatttctaaaacaaaagcaatctaatctgcaggatgctatgatctatctgtctgagattatcgtaatgtatctccagcccccatttgtggatgtcatttatgaagatctcaattatatctgtaaggtccccaaaacttatgcataaaaaagaatcagaaactaaaaatcaaaagagatttgtgacattacaatacatatcagttataatttgcttacaaaatacatttatttgatcacaaacttgcctcgttatatagctttttataagttgacacattttgtttatttaaaatgttttgggcacttatttatgaatgaagatgtcaagttttatttcctttgggtttaaattttttttcagtccttagcagaatttcaattcagtttagttcctagatcagcagtacatttatattacaattaccataattactcacagtaaaatactgaacagaatagtttttaacattgcatatgtttccaaccattcctcatgctgagccttaggtattctctacaacacataaattaatgtgtaaaaaattgtacttgtgagttgtaatatcctcttctattcttttaaaataaccaatataatacttgtaaatcattgtgtttattaagttatttaattctgtggccatttttataaataaactaggatacatttattttaagtaagtgctttcttgagtactgtaatccaacagattaggttactagatggtctctttatactgaagcacatgtgaaaaaatatctagacttgctttgtcttcatgtaattgatgtagttgatcaaatggactttgaaacctcatctaatgtccagtttactggttttaatctaactatattgcagcagcatatattgatattatatttcactggagaaaactaaatcctagaaagtaaaaatttagtccattttgttctttgtaataaatatatttatgattgtctttatccaaacagttttattttaaaatagacctaaagaagggaaaaccagacaataatactctatagtgagtgctaaatttgtaattcttattttaattaccttttgttttctctgtttcaaggataaaaatggcaacaaaattcatcactatttctcccaaacccacttttattctggagttttttgtttctgttaattgtatcatcattctctggtattaatattttttataaatttcactgccactctcttgtttagtgctgtcttttgctttgattaccatatctgttcattgagtttatggctagtctatttcttcctccaaaccggtggttttcaaagtatggtcagtggacgggcagcatcagaattatctgtgaacttgttagagatgcacattctggctgagcgtggtggctcacacctgtaataccaatactctgggaggttgaggcaggaggattgcttgaggccaggagttcaagaccagcctgggcaacatagccaagaccacatctctacaaaaattaaaaaaaaaaaaaattagccagacatgatgacatacactggtagtcctagctactcaggaggctaaggctccttgcttgagctgaggaggtcaaggctgcagtaagttgtgatcataccactgtaatccagcctagggaacagagcaagaccccatctctaaaaagaaaagaaatgcacattctcaggtcccatcctcgacccaataaatcaaaagctctacctgagtttcagatttagtagttccgtgttggggttcaacaatgtgtaggggtcctatacgtattagctctcactccttattcctccaacttggtcatggtatataattctttttatagattcctggattttgtttgctaatattttattgaggatttttgcatttatatttatacaggatatatgtctgtccttttcttgtgatgtctttgtctgattttggtatcatagtaatagaatgagctgggaagtgttcccccttctgtttttttggaagagtttgtgattatataccatgatgaagtgggatttattccaggaatgcaagtttggttcaacgtgctaaaaccaatcaatgtaatagattactagcataaagaacaagaaaagcataattatctcagtatatggagaaaaaaacattgacaaaatttaacaatcctttcatgataaaaaaaaaaaaaaccaacaaattaggaatagaagggaacttctcaacctgaaaaaggacacctatgaaaaagcctcagctaatatcatacttaatgatgaaacattgaaagctttacccctaagatcaagaagaagacgaggatgtccactcttaccactcttgttcaacattgtagtggcagttctagccaggggcagttaagcaagaaaaagaaataaaaggcaaccagattggaaaggaaaaataaaactattttcagaaatcacatgatcttatatatagtaactcctaaagaacctcccctaaaatttattagagctaataaatgaattcagcaaagttgcaggatacaatatcaatatacaaaaattaattatatttttatacactaggaatgaacaatcctaaaatgaaattaagaacacaattctggctgggcatgatgtctcacgcctgtaatcccagcactttgggaggccaaagcaggaggaccgcttagcccgggagtttaagaccagcctaggcaacatggtgaaaccccacctctacaaaaattaaaaaaaaacaaaacgccagatgtcatggcacgtgcctgtagtcccagcaacttgggaggctgaagtgggaggatcacttgatcctgggagattaaggctgcagtgagctgtgatcatgccactgcactccagcctgggcaacagagtgagaccttgtctcaaaaaaaaaaaaagaaaaaagaatgtaattttataataacataaaaataaaatgtcttggaataaattttataaatttaacaaaagtacaagacctataacctgaagactacaaagcactgctgagaaaaattacagaagacttagataaatggaaagacatcctttgttcctggataggaagacccaatattgttaagatggcagtattcctcaggttgatctacagattcattacagtctctagcaaaaccccagctggattagttatttttttctttttgcataaattgacgagctgattctaaaattcacacggaaatgcaagagaaccataataaacaaaaccatcttgaaaaaagagaacaaaatggaaagattcacatttcctgagatacactggaaatattgcagatttggttccagaccacttcaacaaagccaatattacgataaaagagtcacacaaattttttagtttcccagtacatataaaaattacatttatactatattaatgtgcagtaccattatgtcttaaaaatgtacataccttaatttaaaaatattttattactgaaaaatgctagtaatgatctgagcatttagaaagtcataatcattttgcgggtggaggatcatgcctcgatgttgatggttgctgactaatcagggtggtggttgctgaaggttgaggtggctgtggaaattacttaagctaagacaacgaagtttcctgcatcaattgactcttccacaaaatgtttctctgttgcatgtgatgctatttaatagcattttacttacagtagaactcctttcaaaattggagtcagtcctctcaaatccctccactgctttatcaactcagtttaggtaatatctaggttaattgttgtcatttgtcatttcaacagtgttcacagcattttcaccagaagtggagtccatctcaagaaaccactttctttgctcatccaaatgaggatttgcaaatcctcacttgttcaaattttatcatgggattccagaaattcaagctatacttctaattctagtagaatctcttcaagctctacttctttttttttttttttgagatggagtcttgccctgttgcccaggctggagtgcagtggtgtaatctcgtctcactgcagcctccacctcgcgagttcaagtgactctcctgcgtcagcctcctgagtagctgagattacaggcatgcaccaccacacccagctaatttttttttctgtattggtagtagagacagggtttcatcatgttggtcaggctggtctcaaactcctgacctcaaatgatctgcctgccttggcctcccaaagtgctaagattacaagcatgagccaccgcgcccggccttcaagctctacttctaattctagttctttcctatttctaccacatctgtagttactttctccattgatgtcttgaacaccacaagtcatccatgagggttggaatcaacttcttccaaactcctataatgttattttaacctccgttcatgatttactaatgttcataatggcatcaaattgttgaatcccttccagaaagtttttcatttactttgcccagatccatcagaggaatcactatagctacagctttatgaagtgtattttttattttttattttatttatttactttttgagatggagtctcgctgtgccacccaggctcgagtacaatggtgtggtcttggctcgcttcaccctctgcctcctgggttcaagtgattctcctgcctcagcttcctgagtagctgggactacagttgcacgccaccatgcccggctaatttttgtatttttagtagagacaaggcttcaccatgttgatcaggctggtcttgaactcctgacctcaagtgattcacccatctcggcctcccaaaatgctgggattacaggtgtaagccaccacacccagcccaaagtgtattttttaaataataagacatgaaagtcgaacttactccctgatccatgggctgcagtatggatgtcatgttagcaggcatgaaaacaacattaatctcctcatacatctccatcagagctcttgggtgatgaggtacactgtcagttagcagtagtattttgaaaggaatctttttttctgaacagtaggtctcaacagtgggctttaaatattcagtaaaccatgctgtaaactgatgtgctatcatccaggctttcttgttccatttctaaagcacaggcagagtagacttagcacaatttttaagggccgtaggatctttgaaatggtaaatgagcactggcttcagcttaaagtcaccagctacactagcctctaacaagagtcagcctgttctttgaaactttgaagcctggactttatagctatgaaagtcctagatcttcttccaatagagggctgtttcatccatggtgaaaatctgttgtttagtgtagccacctttataaattatctaagctagatcttctagataacttgcagcttctacatgagcacttgctgcttcactttgcactttttttttctttttgagacaaggtctggctgtcacccaggctggagtgcagtggtgtgatctctgctcactacaacctccaccccaagctcaagccatcctcccacctcagcctcccaagtagctaggactacaggtgcactctaccacacctggctaatgtttgtattttttgtagagatggggtttggccatgtttcccaggctggtcttgaatttgctcaagtgatctgccttcttctcccttcagaatgctgggattacaggcatgagccaccatgcccagcccattttgcacttttatgttatgaagatggcttcttttcttaaacctcatgaatgaacctctgttagcttctgtagcttcctcacttctggcagccttcataaaattaaagagggtagagcattgctctggattaggctttggcttaaagaaatgttgtggctggtttgatcctctatccagaccactaaacctttctccatatcagcaataaggctgtttcactttcttatcattcgtgtgttcactagagtagcactttgaatttttttgcagaagcttttcctctgcattcacaacttggctgtttggcagaagaggcctacctttcagcctgtctcagcttttgatgtgctctcctcattaagcttagtcatttctagtttttaatttagagtgagagacaatgactcttcctttcacttgaacacttagaggctgttgtagaggtattaattggcctaatttcaatattgttttgtttcaggaatagagaggccccagaagaggtagagagacaggggaacaggtggttggtggagcacttagaacactcacacattcattgattaactttgtcctcatatgggcatggtttgtggcatccccaaagcaattataatagtaacatcaaagattactgatcacagatcaccataacagatataataatcatgaaaagtttgaaatactgtgaaaattaccaaaatgtggcacagagacatgaagtaagtgcatgctgttggaaaaaatggtgccaatggacttgttctcagggttgccacaaaccttccatctgtaaaagaatgcaatatctgcaaaacacaataaagcaagcaataaaacgaagtgtgcctgtacaacaaagctacagtactcaggactgtgtgatactgaataaggatggacctaccaacctatggaatagaactgagagtccaaaaaaaaaaaaaaacctatacatcatggacggttgatttttgacaagagtgtcaagagcattcaatagggaaagaacagtcttttcaatcagtggtgcttgaacagctgaatatccacatgccaaggaatgaagttgaactctgattgcacattaaaataatggatgggagacctaaatataagtgctaaaactttaatgcttgaatatgatactaaaagcacaagcaactaaaggacaaatagatatgttggacttaattaaaattaaaaacatttgtgcttcaaaggacaccatcaataaaatgaaaagacaagtgtaacagaaagaaaatatttgcaaataatgtatctgataagtgtctagtaccaagaaaataatgaagaatgcttacaacacaacaagacaaataatccaatttaaaagtgggcaaaggatgtgaatagtttttttttttccaaagaaggtatccaaatggccaatgagcacatgaaaaaatgtttgacatttttagtcatgagggaaatgaaaatcaaaaccccaatgaaataccacttcagatccattagaatggctgtaaaaaagacaataacaagtgttgtcaaaataaattggaatcttcatacaagaatgtaagaatgaaaaagataacagccactttggaaaacagtttgacagttcctcaaaacgctaaacagttgccatgtgaccaagcaactttttcctaattatatatccaagagaaacgaaaacatgtccatgcagaaactttgtacatgactcttcatagcagcattattcataatagctaaaaggtggaaacaaaccaaacatccatcaactgatgaatggataaatgaaatatgctaattcatacaatggaaaattacttggctgtaaaaagaatgaagtgttaatacaatatggatgaacttcaaaaatatggtaagtataggaagccagccacaaaaaaacacacgttatatgagtccatttacaggaaatgtccagaataaggaaggaaatctatagagactgaaagtagattagtggttgcctaaagctagaaggcatgggaagattgggaatgacagctaaagggtacaggggtctttttggtgtaatgaaaacattctaaaattgattgtgatgattgttgcacacctctgtgcaatctactaaaaaccattaaattgtacacttttaatgggtaaattggatggtatgtgaattatatttcaataaatctcttgcccaaaaaataataatgaatgattgctttgcaaatttcagcatttcaaataacttgtaaagcaatgtattattcagcaagtggtgttaaaactgcctattattttttggaaataaattttaaaaaactaattttctaaatttaaaaacttgtttggaaaatactaggaatcatcaaaatgttatttggaaaatatttacttagaaatatacatctaattaaaattaaaattttagttttgatggaataaaattttaaaggtggccgggcgcggtggctcacgcctgtaatcccagcactttgggaggccgaggcgggcggatcacgaggtcaggagatcgagaccacggtgaaaccctgtctctactaaaaatacaaaaaattagccgggcgcagtggcgggcgcctgtagtcccagctactctggaggctgaggcaggagaatggcgtgaacccggaaggcggagcttgcagtgagcggagatcgcgccacagcactcccgcctgggcgacagaacgagactccgtctcaaaaaaaaaaaaaaaaaaaaaaaaatttaaaggtacaaaaataaattatgaaagtactaaataaaatttgggtaaatatatattttatacattaatattgtatatatggggtgggcaaagcttttctaaacatgtagcaaggacagaaatcataaaggaatacactgattaatgatataataagggaaaacttacacatttttttgaacattaaaattgaaggaaaaatgataaatttggacaaatgtttgcaacatggtggggaaatgattaaaaagtcaacatatgaagtactcttagcaataaaagaccatctcttcagtaaaatactaggcatgaacatgcgtaggcagttcagtaaagaattacaaataaaaacatgaaaaatatgtggtatctcactaaaaatcaaagaaatacagtcgttcattgtttaaggtgattttgtcctgtgaacatcatagagtgtacttacacaaacctagatagtatagcctactacacacccaggctatatgatatagcctattgctcctaggctacaaacctgtactatgagtgtactgaatactataggcagttgtagcagaatggtaagtttttgtgtatttaaacatagaaaaggtacagtaaaaatacagtattataatctcatgagaccacagtcataaatgcagttcatcattgactgaaatgtcattattcagcacaggactgtactaatcagatcataactatgtaaggtgatggacgtgctaattagattgtggcagttatttcacaacgtacacatatatcaaaacatcacgttatataccttaaatatgtgcaatttttatttgtcaagtatatttcagtaaagctaaggggaaaaaagaaatattaattaatgcaatgttgagataccttttctgcctatcaagttggtacatattaaattggtggcaatatggggatgtgggcagtcttgtgcactgctggtggcaacatgttgcaggagcaattgcatgtcaacttggaaatacatatcaaaatcctgaaaaatacatgtcttagggtcttagggctgccataacaaagtactacaaacgaggttgcttaactcaacagagatttatttgtccacagttctgaagtctgtaagtccaaaatcaaacaggtccatgctcccctgaaggctctagaaaaacacccttccttgcctcttcctagcaatggttgtttcctgcaatccttgcattccttggcctgcagttgcatcactccagttgctgcctctgtcttcacatggcctttttccctctgtatgtgtctccgtatccctttcttctttctcttataaaaacaccagtacagccaggtgcggtggcttacgcctgtaatcccagcactttgggaggccaagttgggtggatcacttgaggccaggagtttgagaccagcctggccaacatggtgaaaccctgtctctcctaaaaacataaaaattagctgggcttgatgatgtgcacctataaccccagctactcaggaggctgaggcaggaaaatcacttgaacccagggggcagaagttgcagtgagccgagaccgtgccactgcattccagcctgagtgacagagcaagattccatctcaaaacaaacaaaaaacaccagtcattgaatttagggcctactctaatccactgtgacctcatcttaactaattccatctgcaagaccctattgtgttcatgtaaattgaacatttttatatgaaaaaagactatatacaaagatcaaagataaatgacaaaatggaaaaaatgcacaccataaatacgatttttgaccacctgtagcttctaaatttctccaataaagaaggcttatttttgtgagagaaaactgagaactgttactttaaaataaatgctctgtgaaacacaagagactaaatattacaatggagaggatcgatgtattaagataaaactaccttcttacaaaaccatgctgttttacttaaatacccctctcccatcccaacttgtcaccacgataatgaatgactgaaaaggcctctcacagtccccgttggggaaacacctcgggattcactaacagagtctaggacagagctgggcacatagacatttgagaagctacctggtataatggaaaacgccagtctaagtgtagtggctcatgcctgtaatcccaacactttcagaagtcaaggtgaaaagataatttgaggagaggagtttgaggccagcctagacaacatagtgaaactctgtttctaaaacaatttttttttaattagccaggcatggtggtacacacctgtagttctagcaagacggtaggatcgcttgagcccaggagtttaaggttacagtgagctatgactatgtcgctgtactccagcctgagcaacacagtgagaccctgtctcaaaaaaaaaaaaaaaaaaaaaaagaagaaaaagaaagaaaaggcccatgtgcctgaatctagatgctccctatttaaaggtgaacatctataggtcagtcacttaacctcttgatcaagaaacctttacaagctgaggactatagatgatatatataatgttccaagcagatattattgataaatacttctggaataaatacatcttggtatttgtatttgtagttactgaggtgtcaagcggggggaatttcacagatgaggacagagtttagggactttgtcacaaacttcagaattgttagttcaacaaatgtttattgggtatctgccatgttacaggccctatcctaactgctgtgaatgctgtctgattcacaaaacccctcctgggttggagctttctttctggcacagtctctggaggacatcacacagtgttgtggtggggtgcatttactcttggatttgagagcatctacctcctcaatctgttgagctttctttcatctagctttatctcccatgtccctgtgatgtactgaatattttcttcggttaatgtcaaacacctttcccttcaatgtttttaatgaacatttatttgattttgcataagagttggatagaaaattaatagcacaactttatagccttgaaatttttcagggcttcaaaattcccattgaagatatgctgagcatcttcaacgagtgcagaattgtctttatttttggaaagataaattcagttatgaatcctcagcaagtttaattgccaaagaaatgttcttcaaaaatacaaaattagaaacaaaaatgaggaaacaaccacaaatacaggaaaagttaaatgaacttcaagtgaatacttcgatcaattctatgccaataaatttgaactcataggatgagataatgattcttaggataatataaacttcccaaataaaacaatctatagagatttctaaaaaatagaccaattaccatagaggaaatggagaaagctgtcaacgaactacaactgtaaatgtttccaggtcaactctgtgaaaacaggtaactttaatcctactttgaactatgccagagaaacagaaataaggaaaacttccaaattcttttcatatatttatgattacattgaaacaaaaacctataataacatatatatacagatgaaagttacaggacagcttctcttcaagaatatttacttaaaatccaaaatgaaattagtaatctcagtgatgacggtatcagaggtttctaaattttatttttgcttatctctattttctaaaaacctttttcagacagtcacatacctcatcttgtaagtctgaggcattgtgatagtggagatcttgtttcagagattacaatatatgtttttatagataatgggtctgtcttcaaagtgggtctaattatataaattttcacagattgatttcataaaaattaatttttttatgtagtaaatgtaccacaaataaagacaagaaaaatcaggagggaaactgggattgtgagacaatttttttttaactatatgaagacttttaaacatcaatgagaaaatgaccaagataggcaaagatcatggatggtcagtttgcagaaaagaaatgttcatttaaaaatgtaaattaaaataagaagctccatgtttcaccatcagaaaagtttaattgtagcctttttgtttgtttgtttgttgttttttttttttttaaggagatggggaaaggtgctttcatgaactctcatgcaggttctttggaataccataattacagtttttgaaaatacatgccagcttttattcctgttctcacacatgtgtgcatagatgctggtacaaggaagtttgttgctcttttgtttgtaattgcaaaagactagaaacttctataatgtttttcattagaggaccaactgataaattttgacacagctatgcagtgagcattcaaaagaatgagacctctatctgtacacatgagagcactaagatattttggttagtgaaagaacaaagcaataaacagaagagtgtgctcacattcttgttaagatagagtatagagaatatctggaagaatgcacaatgactgttaagcataactgcctggggtaagggtcagtcagagggagacatttcattttgtaacctttcccactgtttgcatttttacgttgtgtgtctattatgctttatttttgttgttttttttttgaagggaaacaaagcttattgctttcttaagcttttatcatatatttccaaattatactaaataagtaataaaaatgtatcattccgacagctgtgtgtgaaagagcctattttttgcagatacttgtctgcacgggatattggctgtgattttcatttttagcagtttaattttgccagcacctttggtatctagtttgtttgaacatttcatcacatatttgtgggccattttatttcttcatttgtgactcactgattcgtcttttttaaattttttaatttttttttttttttttttgtgagatggagttttgctcttgttgcccaggctagagtgtggtggtacagtcttggctcactgcaacctccttctaccagtttcaagcaattctcctgcctcagcctcccaagtagctgggattacaggcgtgcaccaccatgcccagccaattttgtatttttagtacagacggggttttaccatgttggtaaggctggtgtcaaactcctgacctcaagtcagccaccatgcctggagtgttgtttttttttaattgttttaatttttgtggatacatagtaggtatatatatttaagaggtacatgagatgagttttgatgcaggcatgcaaagtgacataagcacatcatggagaatggggaatctatcccctcaagcatttatcctttgagttacaaacaatccagttatactctttaagttattttaaaatgtacaattaagttgttattgactagagtcaccctactgtgctatcaaataataggtcttattcattctttttatttttattttttgtactcattaaccatccccacctcccccacagccctccactacccttcctagcttctggtaaccatccttctactctctatccatgagttcaattgttttgatttttagatctctcaaataagtgagaacatgtaaccattgtctttctatgccttgcttatttcacttaacttaatgatctccagttccgtccatgatgttgcaaatgatgggatctcattcttttttatagctcaatagtactctattgtatatatgtaccccattttctttatccattcatctgttgatggacacttaggtcacttccaaatcttacctattgaaaacagtgctgcaacaaatacaggagtgcagacgtttctttgatatactgatttcttttcttttgggtatatacccagcagtgggattgctgaatcggatggtagctaaatttttagttttttgagtaactacattgttctccagtttagttactcaaaactgttctccaaactgttctccctagtggttgtactaatttacactcccaccaagagtgtacaaggattcccttttctctacatccttgccagcatttgttattgtctgtcttttgaataaaagccattttaactggggtgagatgatatctcattgtagttttgatttgcatttctctgatgatcagtgatattgagtaccttttcatatgcctgtttgccatttgtatgtcttgattattaatttttaattagaatagcagtgtgacttcagatgtgcctcagttccctcacctgtaaaatgagaattataatagagcctgtctccttgggttatgaggagtaatgagttaatatatggaaagctcctaggatagttccttgcatatggtaagccttcagtgaatgtttgctcttgttattatgaacatagttttgaaaatcaaattgcactgtacttttatttgagggtaaggagtagtactccactgctccaaacccttgtgccacccagagataactggttttaactatttttagggcttttttttttttctggtttttacctctgtgtttctaaacaataggttttctgatgtatgcagttgagatactgttgaccacctatgatggattatatggacttagctttcttgcaccacaccatcctaccccattttcctctctttattctttaaataaatatgattctatcataatttttggataaattaatattgagtgctcaacttactttaactatgtaaagtactgttcacttctataacttattttccttgaggtaagaatcatctcccttttttattttcttactttcctgtacctttcctgtgtacctttctcttatttttccaaaattctcctgcagaattgtaaaacccatttgtatactgtttgtcatatgaccattctcaataggtagtcatttagttccacatttctctcattctttttaaaaatttcttagccaggcatggtggctcacgcctgggatcccagcactttgggaggctgaggcaggcagatcccttgagcccaggagtttgggaccagcctgggcaacatattgagaatctgtctctacaaaaaatacaaaaattagctgggcatggtagcatgtgcctgtagtcccagctacttggggggctaaggcagaaggatcacttgagcctgggaggttgaggctgcagtgagccaagatcacaccactgcactttagcctgggtgacagagtgagaccctgtgtcaaaaaaataagatcaaataaaaatttcgtgggacacccttgctgggccccatctgcctacttctcatactgaactggatgcaccttaggcctgctgcatctttcttgtgttgagtaccttgtttccttgatcccatgccttcctctttcttaatttatttctttgttttgttggagtacatcctcaaatagctttccgagaatgggtgaatgggaaatagaatttgtaggcccatgtatagatcagagttctatttctgaggatttaacacactctaatcatgttacttgaaacaagtttactatttgttaaccagtgtccataaaatattgtaggactgtacctccatcatttctttcaagagaaataaacaatcagatgttctgcccagagttatgctcaatgagctcaaatttgctcatccatcaaaactgatcataggctttaagaacctcctggcacactgcagagtattccttggggtctgtatatcccagtatgaggaaaaccaacccagattaacaactgcattttagcacaagatggggcaggtggtggtataaaaagagaaggtgccttgggagtgtgagccatttgcttctgaaatttatttgccaacaagtcctgcttcagccctgtaaatcccaactttatgttttagtgagtcaaaatagcccagcatacagtgggtaaaatggtaaattgatgttgcatgttcaggcattcagaccctactgggacccagtaacaaaccacttgtttctcaaaaggagaatagtcacttgccaaagaaagcatgggtttgctttataccatcagggctctctctgggctccatatatccgctgatctgtcatagactcttgtttgttattgaagccactgagccatagagatgaattgagacagcttcctgctctgtagccttgagcaggttttcctgctctgattgctactgaaagctggcaggttctgggttactcagtatattgatcagagaagcaatcccaaatgtcagtatatgtttcctccaaaatgtgaagacgctatactttcaggatctgtaggaacaatcgtgaagagagttcatggactccctgggcctattgtgacactaacttggaccaaaacttcattttcccctgacccccatgagctctcattctaagcacaggtgtacttagagtccccagggattagcattagcgtagagccagtgttcaatactattctgaatatctgccctttctgctctatactactctgctacatgtcggcatgttctgctgggaaaggctagattttcagtaggtaggacttgaggttctaccacaagggctttaagtataaaccagccccctcacccttcctctaaggagctttgggcctgggattggctgaggagtcctaccttacatcacagtgactcatagacttcatttcatcaaacctcaagtgtttttatactttcaggtatgtaaataaagaagaaccttagaaggttatctatttattttaatcttagatgtcctgtgatctcagccactgtcaaagatccctgtggctcaagtcatttttcatatgttcacacattcttttattttttatttattattatttttttttagagaaagggtcttgctctgtcacccaggctggagtgcagtggcacaatcatagctcactgtaacctcaaactccagggctcaagctatcctcacctctcaatctcctgactaactatgactaaagacatataccagtacacccagctaattaaaaaaatatgttctgtagacagagggtcttgctatgttgccctggctagtctcgaactcctgggttcaagcagtccccctgccttggcctccgaaggctctaggattacaggtgtgagccactgcgcctggcctatgttcacaaattctgtgggtcagaaatttataaaggacacagagaagaatatagtctgaggtcctctccacataggcctttcatgtgatctctcattatgggccagtttgggtttccttgtagaatactgtctggagaccaaggatgagcattctcgagagagatgcaagcaggtgctttatcaccttttctgatctaaccttgaagtcacactgaatcattgctgtaatcaatggctcatttatgtgctaaggaagagaagctagacctccacctctcaattgaggagtgccaacatcacattgtaagagtatgtgaaatgggatgtatattaatgcagctctctttagaaaacatattctgctacaaataggaagcaccagttttttttatcatcaccatactggttctagaggacttacaatagacagggcttgttgatccccttcatgcagaaatgatggttgtaatatttcattgtatatatatccatacatacacacattgaatttgtgtaccttacagtacacaatatagctacaaataatgccatcaatgaagccatctgaatgtgtgcatgaacatttaagaaagttttatttcatttcagtgtcataagagtattgaccatctccattagagaaatgcaaatcaaaaccacaatgagataccatctcacaccagttagaatggcagtcattaaaaagtcaggaaataacagatgctggagaggatgtggagaaataggaatgcttttacactgttggtgggagtgtacattagttcaaccattgtggaagacaatgtggtgattcctcaaggatctagaaccagaaataccatttgacccagcaaatggtatactgggtatactgggtgtatacccaaaggattataaatcattctataaagacacatgcacacgtttgtttattgcagcactgttcacaatagcaaaaacttggaaccaacctaaatgcccatcaatgatagactggataaagaaaatgtggcacgtatacaccatggaatactaatgcagccataaaaaaagatgagttcatgtcctttgcagggacatggatgaagctggaaaccatcattctcagcaaactaacacaggaacagaaaaccaaacactgcatgttctcactcataagtggaagttgaaaaatgagaacatagggacatagggagggcaacatcacacactggggcctgttggggagtgggaaactcggggagaaatagcattaggagaaatacctactatagatgaggggttgatgggtgcagcaaaccaccatggcacatgtatgtctatgtaacaaacctgcatgttctgcacatgtatcccataaaatataataaaaaaataataaaatttaaagaaagagtattggccatctcctcaggattttaaattctgatcaggagttattaaacaaatgtttataggccctgtcatgtttgttataattattaataactattgaacttcttccagattaaaatttcttgttttggtgtgattgcttctatttggattcaacttctatttttggcaaagactgtgtgtttttattttattttatttattttattttatttttgagaaagagtctcactctgtcgcccagactggagtgcagtggcgcgatctcggctcactacaacctctgcctcccgggttcaagcgattctcctgcctcagcctcctaagtagctgggattacaggctcctgccaccatgcctagctaatttttgttgttttagtagagaaggagtttcaccatcttggccagcctgatcttgaactcctgaccttgtgacccacccgccttggccccccaaagtgctgggattacaggtgtgagccaccacgccccgccgtgtttttattttctaactctaaaactaaatgaactattttgaagatggaatgccatgccgaacttttcagtcttaataatataaccaaccttagcagtctgcctgaatgcagaagttaagtgaatattattaaattccaaaaatccagatatcatatcaacatatgatagtaaattctaactaaaaaaactatgcattggagcgtgggtgtattctctgggaggtagtgagcaactttttacagaaacatttaaggagagaggaacaattcttcagtgaatagtaggtcagataatttgggcattttccaacgccatctcctatgccccttgtcctccaaggcacattagatgactcagtctttctggaacatccatacacagcctctgtacattccatttcttcttgggatgtcaccttcccagcccattctctgacaagcaaattcctgttcagccttaaagacacaaatcaagtcatctcttctgtgaagccttctcttatactctggaggccaaaatattcatgtcttcttttgtagtcacaaagcactttgtaaatatgctactattactacactgcttgcttcgggggaggtggagagggagagagagggagaagggagtgagtaatagctaatctttgtttcctatgcagtactcagcaatcaagaatagtttattgcataaattatcaattctaaaaatctgtcattccaagggcaggagagctgttaataatgcagattcctagtcttaatcacactttgaggagggtggatctttttgacaagcagttcaagtgatctgtggaacagactttgaccatctctgctctaggctgggcactactctttctgcccagcctactcttgcctaagagctcattttagcttctcctgttcttagttaaccttgcttttcacattttctaagccatttatttaactctgaattcttccataagattactttcatttagctttcagatgtggataaacattctggactacctgccctagaatttagttttttagctgacatataatttcgtatatatttgttcaattaacctacattcataaggactctgtatgtgtgtatgtgtgtgtgtgtgcgcgcccatgcacatatgcacccacaacatttgaaacattatggagtttatttatttatttatttttgagataggatcttgctctgtttcccaggctggagtacagtgggacgatcacggctcactgcagccttgacttcctggtctcaagcagtcctcccacttcagctttctgagtagcggtgactacaggtgtgtactaccatgcctggctgattatttaatactttgtaaagatgagatctcactttgttgcccagtgtggtcttgaactcctgagctcaagtgatcctcctgcctcatcctcccaacatgttgggattacaggcttgagccactgcacctgactgttaatggagtttataaatggctcagttatactttttatttcacagtgttttctgattatatgctcatactgtcaaaagtatcactaaaattacaatgatagctgacagatatttcttataggagttcagaaaatgagggattatggtataaaatataattaaacatgtgttccagtagataatgttttaagaattcattttgtaaccaaatttatttggaaatcatttaatcagctgcatgcatgttttcagctgtattatgtctttcagtactaccctccctaaccaaatgaagtcaatggaaaactggagaaacaaatttcctcatttctgtttcttagataattcctaacatagaacccagtccctgatatttaactaagtagaccacaggatttatgcaataatctttaaatgattcagtaacagaagaaagttaattctgcctactctgcccaaatgattgaaatgcagtcctctcaagacacttatcacaaagaacctactcaaaaacgattctattaaaatataaatcccattgtggttggcagaaaaaaaaatgctgttataaatcttgacaaaccctaacatatgataatggaaaactaagtaataataagtacgtaatcaagcattccatgttgtgtgatgatactgtcttttcttaataaactcattggaagactttatgttattcttgtcaggatagcccactcggttccatgaactttgttcatgaatgcaaaagttcaaaaaatctttttcgaaaatattttttcaaagaagttatttcatccaagttcaggcagcaaacaatatgggctctagtgaaggttatttgtgcaataatgatattagaagcctggaaatgctgcctttgcaaatgaaaaacaaaataggtcagaactatatgaagaaatttctctaaggaaatgctattgtcctccatgaccaaaggcattatgtctataaattcacctaagtgaaattacatccatggcaccggaaaccaaccctgaagccaaattgaaacaggagggaacaagcaaagacttacagtgcatttctctgaggatgtaccaggaagacaaaggactgcaacagacttgcctcaacccatcagctctcaggaggactacatcaattccattccaataaaaatactacactggtgctccaagagagggatgcagagggcaggggatctccttgtcctaaatcaggagctccaaagagagaagactaggaatccctaaagatagagatatggaaagcagtagttaggaccactctgcagtctgaatcccagcttttccatttgccattgggaccttgagaaagttttcttcttcttttagacagagtcttgctctgtcaccgaagctggagtgcaagtggtataatctcagctcactgcagcctccgcctcctgggtttaagtgattctcttgtctcagcctcccaagtagctgggattatgggtgtgtgccaccacgccctgctaatttttgtattttcagtagagatggggttttaccctgctgtccaggctggtctcaaactcctgacctcaagtgatctgcccgcctcaacctcccaaagtgttggaattacaggcgtgagccatggtacctggccaagaaagttttcttaagtccctctgtccctcagtttcctcatccaaaaatggaagtaattataatatttgctcgtttgaattaatgcaacacttgacatatagtcaataaatgctggttgtgatgatgacgttaccatgtaggttgttatttgtggtcctccccaaatgagagacatccatggtggaactattatgaagcctcgaaaaccaccaggcttgaacaatctagaaataaaaggcatttgtgtgactggattctcgagttctttttccagcaccgtgctttggactttcatttctaatttatgtaaaaattctggcaatctacgatgatacactaagtgaattgagaaggaatctagggaggatctgagttaggcttcacggtaacttgagaataaagatttaaggaaatggagccataatgatttttaagaatttgatgtttgccttaaaatgtagcttttcagaccaggtgtgatggctcacacctgtaaccccagcactcttagaggccagggtgggacaattgagcccaggagttcgagaccagcctggacaaccaaaggagacagacaccttctctacaaaaaattagctgggtgtggtggagtagctgtagtcctagctactcaagaggctaggcagcaggattgcttgagccccaagagttcaaggctgcagttagctatgatctcaccacagcactccagcctgggtcacagagcaagtccttgactcttgaaaaaaaattctttccaggcaatgttagttttaaaaagttgctagagtattgttaagtatagatcacttaatctatgtcactctttggaaagaatgcagtgcataaaaagaatactcaaattttgatctcagattattttctccaatgtaaaaaagtactttccatccaaaaatccatccacacaacctcagactttccaaaaaagcaagaatttttttaaaaatctcacatgaaacttcagcatacctaatacagaactttacacactcagtgaaagtttttgaccttttcagaagcatgtcaatgtaattcttctggtcaaatcttaggttatcatttgagagagacatttcttttaaacccatttctccccaaaaaactaaatagcaaagaattcaaactgagttaacttagaaatatttaaaatctgttttgattacatgtggttatgaattgttctttcctaacgcacttagtatatctcttgtgtcaagtatttacccattgcaaaaagggctctgatgaatttttaggccttcacacttcacagcttctacctccaaattgggaaatttctccttcgtagaagagcacaataaattggcacttgctcacactttataaactaattgactataatgtagaaaaatatatattttaatagaaggaaacaaaatatccaacaccttagagaaagtaagcaataagaaaatcatggttctcttgtgaacatttttctaatgcaaagtgctggcccctaaggaaggacctaccacactcctcctctttgctggctggaatactggcttagtcagggttcccagccatctccccagtgggcaggatctcttctgggaaaaatactgtgacagtgtttgtagtcctgccttctgctgggttctttcttggtgtacctccaagaatagaatcatagaaatgtagagctagaaattattttggagattttgcatatttgaaaaaatgaagtccagaaaagggaagtaatttacccaaggcctaacacctaatagacaataggactggagccctatctaatggtctccattgcttccaaacccaactgctgctttggaagaactcagaatccataatttcacagacatttttagcttcgtattattgttattaatagatgtagaactatatgtgcagaagataaacattcagtgattcaatcattaaaataacatttgcataacatgttgtgaatgtattgtatataatagacaaccaaatttactaaaatttataatgtctatattttttaaaagtttaaacactgtgaaaataatgtcatcatcttgaataaaaatgtatccgtgttatcattaacgaattcaaccaacatttttgcagtttcaccattagcagacatagtcataagtgtgaaaatatagaaaagacagaaaacaggtcttgttctcacctcgccagcaaattgggaaggctgacataaaacaggcaagtatgatactgtgtgtttccagctgtgatatcacgtggcgtgagtcccatggcagcacaaatgaggggcacttaactgtggtagaagaaaaagaaggctccctcaagtaggtaacaccaaacttgaagcttaaaataaaggagatttaggaacaaagggcattaaaaggagagagaacagcctgtgccaagcaagtaggttgacagcacgtggcagatttggagagcaagtacatccatatggctgcatcccagaattaaatgagggtgaagacaggcagggaccagatcacaaagagctttgtgcatcatgctaaaacatttcagttttaccagaaaatagtgagaaggtgttgaataattgtatgctgtaaattaaacaatgtgactgaaattatactataaaactctatgttgtgttggtttggtttttccctgctccttaatatcagataccttggtagaacacctaagagtagaatgtggtaagaccaccagaatctagttgtggttgtagagctgacgaaaatctcaatgtctgcatctataaaatggaaattgttatagggttgtaaaaagtacacaagttaagtcctgttaagcatttgcgtctgctgtattgcaaacactcaataaatagaaactggcatcatcttcgtcatcgttgtaaaaagctgaattgcagaaaatggattagaatgccgagagttcattttaacatctggacttaagaacagttgtctgattctgcttaatctatattgcttacgataatagagctcctttaagagaactactttgtcagaggcatggctaggaaaagacatcagttagcaaaatacactgattatgtatttgaaaggaaattttccactgattttgttgtccaagagaatgtacgaaaagaaaacttgggtttcagcagttaggagcagtatcctgagaagagctatgtgcttgaatttattagttacaggtagaagacagaaatgccaaggttcatagatagcaattggggataaaaataaacttttttatgcctccctctgttgacggacaggtcaccaaaagagagagtatattatgcttttaatttgctattacatggtaactaatagtttataaaatacccttacaccataatgactgaagtttattttttgctgtgtttttgtatttggaatactttctgtccttgtgccaaattggaaatttggaatatagtttagtaatttcaatttggttgtatttaaaaattagggaggcctaaattagatttactgtctttataatgccatctttctataaaaaaagactgtatctcaatgttccataaaataataggtttactttctgtattctattttgttagtgctcctatatccctccctgtaagagagaaaatcagaagaatttggaaagtgtcatgaattggcaacagtactggaaagatgagattggttcccagccatttacttgctattttaatcaacatcaaaggtaagtcaatatttgcatgtgcgtgttaaaattgtttgtagactctgcagcttattacactgttatatcgtagattatgcccacttgacagcatggagatagcctcaactcttctttgcgtgtaattagggaaacccatataatgaatctgcaggacagagaaaaagacttgtgttgtacaccttaccctgtgaatatactacaaaatgatagtgactttaggtaggaacattactttgcatttcctaagaattgcagattgatgcacataagctaagcaatgtgcagatttgccagcacttttagactgcatcgaatcttacctttccttttcctttctattctgatgaagcgtcaataacgtgagttcacaccattaaaaccttacttgacttagtactcagtttataccatataaaccatgtaaagatggttccttggactagggcactttggtacccactcagattaatcagtaatttattcatcaaacatttattgagtattcacaattccttgctgtacatctccacttggatgttccagggttaccgcaaaccttcacttgctcccataatctctgtcttagaaaatggcatgaccattcactcatttaccaaatccagaaacctttgagtaatgcttagttcatttttctcctttgtactttgtaacctatgtcaccatcatgtatttttgtttgtttttagacagagtctcactctgtcacccaggctggagtgcagtgacgagatcttggctcactgcagcctgcacctcccaggtccaagtgattcttgtgcctcagcctcccgagtagctgggactacaggcacacaccaccacagctggctaattcgtgtatttttagtagagacagggtttcaccatgttgaccaggctggtatctaactcctgacctcaagtgatctgcctgcctcagcctcccaaagtgctgaaattacaggcgtgagccactgtgtccaacacatcatgttgatttttacctgtatcatgactcttctctgcctccccactatcactgtcttagtttacatccagatttctcagctccattaacgcaatagtcttgtaacaagtcttccgcctccaccgtggacccactccaagccactctccatagtactgccaaggtaatctttctaacacatgagtctaatcaggttactctgcatagttttcagaataaagctcaaacatcttggcatggcctatgtcagatacctattgctgcataacaaaccaccctaaacgtagtggcttactacagcaatgacactttttttttttttttttatgattctgtgggttggctgtgctcatttgtagtcggatgatggctgaaatagctgcatggttcaagatggcctcctccctcacatgcccagcagtcagtgctggctgtcagctggggcgcctcagtatccccaccacctggcctctcattcttcagtaggctagattgccttccttacaacgtggcagcctcagatagcatttcaagagaggtaggcctcggctctggaatttgaataatatcacttctgacaccttctattggtcaaagcaagtcatgaagccagccgtattcatgaggttctggagtaggctttgcctcttgataggaggagctgcaaaacatttgtcaccacatttaatctaccacaggatacaaggcttctcaagatcttgtcccagactgtcacttctccaacctcatttccttgctcaaactctttgcaatagccattctgaactatgtgcacttcccagaatattttatacttttatatgtatgcctttttatttgcttttcctgcttcttggcggccatactggaaattcctcagatatcaccttctctggggtgccttccttgatccccaattttgatttagttctgtatcagttgagatgtgatgtgttgcaggtaatcagaattttgactcaaagcatcataaagaaattaggaaatgtattattttatacatcaagaaatgcaaggccaggcatggtggttcacgcctgtaatcccaacaccgtggaagactgaggcgggaggatcacttgagcccaggagttcaaggccagcctgggcagcgtagggagaccctgtctctacaaaaaattttaaaaattagccaggcatgatgatgtgcacctgtagtcccagctactcaggaagctaacatgggaggatcgcttgggtcctactaagccttgggaggttgaggctgcaatgagccatgatcacaccactgcactttagcctgggtgacaaaatgagaccctgcctcaaaaaaaaaaaaaaaaaaaaaggaagaaagaaaaaaatgaaaatgaaggagaaatgcacaggtggacggatgtcagggttgtttgatgcaatgacttaatagtgttaccaaaacccagctccttttcaaatctggcctcaaggtggctcttttcacagttataatatagttgcttcagttccagatgtcccagccagatgcagcagtgtccaaagagagaaagagcctgtctttcttgatgcatttttcttgggatttggaaaacttttcccatcttcccacaggcaacctcccttcatgtatccttgttcacagtgagttcctttgcccacacctaaaccaatcacaagaaagaacaatcagaatcaacccctgacttggggctagtgttacatctcttaagtcacttggagacggggtatacccctgagtagatttgggaaggaagaagaaagggaacaaggtgttgtggaacaaccaaaaatgccaatgaaaaggttgtctcccatattccatagtcatcgtcttttattttattttattttattttattttattttattttttcaggaaatgtttctgagtcataatattccataggcttctatttacaactctctcccaggagcttgcaagggttgcttcacataactaggccagaggagctttttattttattttctttttgttttgtttgagtaggagtctcgctctgtcactcaggctggagtgcagtggcacgatcttggctcactgcaacctctgcctctcaggttcaagtgattctcctgcctcagcctcccaagtagctgggattacaggtgcatgccaccatgcccagctaatttttgtattatttagtagaaacggggtttcaccatgttagccaggctggtcttgaactcctgacctcaggcgatcctcccatcttgaagtactgggattacaggcgggagcctctgtgcccagctagaggaactttaaaaaaagaaaatttaccacagaccaattaattagaatctttggtggttgaaaccgggcattagcattttgtaaaatcgatgctagggattctaatctataaccagaaactacagtcactgttctgccctttcacttttcacccattactggaattgtttgtatgcccattttcctcaccaggctgcacacttgttaagggtatgggccagtcttctttgtttatgtatctctaatatctagcacaatgtctgggtttcaggtaataaatatttggtgagtgaatgaataagtgaatgcaatgtgtcaaattaaaaggagggttctttgcttccaaggaattaggacttattgctgaaagcatatgcatatgcacatataaatatgattacatcagctagaaatagaagggggaagactgaacattgaggtggcaacaataaagaaattaaggcttgacaatgtaagataccttaggtaaataagttatgtaatatggagtaatgagtttgtaagctagaaaggtagcttggggttagatttctaatgggtcattagtgtcaaactaaagagattctttgtcatataggcaataaaaatttgtcaaaagttttttttttttaattgaagactgacatgagtagaccttttgagttagaaagtaactggtgtgaatgttgaatgtatactggctgggaaagatgggttaaaggcagaaagaaaggagagtactgagtgaaaaacatttttgaatggttactgtgtgcctgccattgtgaatgacattttgtttagattactaaatctctaaatactagccccatttaacatatgaataaattgcatatttaaaaagttaaataacttctccagtgcacacaactgttaagtgcaaaaactggaatccagttagtctgattcccaaagttcccatcgactatctgctggtcctcgtaagagactttgagggcataaacgagaatagtggtggtgaaagtagcaacaaggattatagcagtaagattttttagttagaatcaacagaacttaatgacaatgtaagtgataaggaaaaaggtgtcaaacttgactgagtgttagaaaaggacagtctagctctgagtatgctgaatttgagagattcttaaaatatccagaagatgctttgaaagagttagaaacacagacttttaagttgaggagcaagaggtcagaagcagtgctattcagatgtgggaatcatggcgcacaagctgtagttgaagcgaagacaaagagtgcatattgtgaacatttagagtgaggagggaaatgttgacagaatcttaggatcatctacatttaagttataggcagaaggagatgaaggaagagtggccagagggtgaaaggaaaatcaaataagaacgtcttaaaaggagagtattttaaggagaagaagttagtcaagaagaagataatttaggtacagcctttgataagtacagactactcattcaagaagtttgccatggactacatcatactaaatagcaaagaaaacactcaacagagtgaaaaggcaacctacagaataggagaagatatttgcaaactatatatctgctaaagagttaatcccctgaatacataaggaactcctacaactcaatagtaaaagaaactaataatctgatttaaaaaaaggctaagggcttaaatagatatttctcaaaaatagacatctaaatggctgacaggtatatgaaacattgctgaacctcactaatcatcagagaaatgcaaatcaaagccacaatgtaatgtcacctcacgcctctcagaatgactattaacaaaaaaacaaaagacaggtattggtgaggatacggacaaattggaacccttgcataccgttggtgggaatgcaaaaggatgcagctgctatggaagacagtatggatgttcctcaaaaaattaaaagtagaactactgtatgatccagcaatcccactcctgggtatttctccaaaagacttgaaatcaggatcttgactcttcaagatcctgaagagcactcctccttttaccacagcagtattcacaatagccaagatgtggaaacaacctaaatgtccatcagcagatgaatggataaagaatatgtgaagccaggcgcaatggtgatacctggggtctcagctaggggaggctgaggcgggaggattgcttggggccaggagtccagcctgggccacatagcgagatccgatctcgaaaagaaatagaaagaaaatatggtatgtacatacaatggaagtgttcagcctttgaaaagaaggaaactctgcaacatgtgacgacatggatgaacctggaggacattataccaagtgaaagaagccagacacaaaaaggcaaatactgtatgattccacttatatgaagtatctaaaatagtcaaattcatagattaaaaaagtggaatggtggtagttatcaggggctgggaggagggggtaacggaagttactaatcaatggccataaagtttcagtcaagtaagatcaataggctctacagacttgtacagtacaagtcaacacttgtgtacaacaatactgtactatcaccaacagtaatgtattgtacacttaaaaattgaagagggtatatctcatcttaagtattcttaccacaataaaataaaattaaagtttcctatgactggaaaaaggcttggggaggaggtgagtaactgaggagtggatatagagaaataagcctcctgcagatgaaaactgttggagggagagagaaaaatggaatgtatatcgtaaagtaaaaatggaacgtgccctgaagaaaacgagacagaatgaaataaaatgctgaaggagtacgcagatttctttttctgtgaggtgggactctttgagcctgaacccactgctgtgtgaatcaggtgcttccttgaagcttcctgccctggactgggaactggtttcagaacgttcctgagcttgagcttgcagttggaggtgaacaaggcaccccttccatgtgctgtcctgactagctggtgaccatgttgatgaacgtcctctcactccccacttgggaactgcgtgttgtaagggctgcctccccctgacagggttgtctcctcctgtcagggcatgaattttgaatattctcaatacccagtcaagaaggactattcctccagaagtgtgaggtctacctaaaaagagctaaaccaaattatatactaaaagtataaaagtatttttttgtactctcgcaacaattctgacaccaaatgtgtggggtatttccacaccaagcagttcagttctctggtgacactagctggtgtcctacagttcagtttgtttctggagttggcatcagatcccacaaattaaagggtccagccccacaagatgacccccacttcagatgtcaagcgcatgtcccagctatctacctgtacttctggctgaccttctctaagtcaggggttcccacatcctccctccttgcattcaataatttgctagaatggctcacagaacactacttactattccagtttattataaaggacacaactcaggaactgccagatggaagagatgcattgagcaaggggccctctccaggcacaccaccttcccagcaccttgatgtatgcaccaacccaggagctctggagttgttagggtttttatggctattacataggcacgattgattacagcattggcccttggtggttgagttgatctctagccaactctcccttgcctggagaggtggctagagagaggtggtgctgaattctttttttttttttttttttttttttgagatggagtctcactctgtcgcccaggctggagtgcagtggcttgatctctgctcactgcaagctccgcctcccgggttcacaccattctcctgcctcagcctcccgagtagctgggactacaggcgcccgccaccacacccggctaattttttgtatttttagtagagacggggtttcaccgtgttagccaggatggtctcgatctcctgacctcgtgatccgcccgcctcagcctcccaaagtgctgggattacaggcgtgagccaccgcgcccagcctgaggtggtgctgaattctaatcctctattcacatggttggttcttctgacaaccggtccccatcctccaagagtcacctcactagtataaacttgggcatggttgaaaggggcttactatgaaaaaacgaagattctcctctcaccccgactactcaggaaattacaagggttttacaagttctgtgccaggaaccggggcagagaccaaatacaaatttcttattatgtcacctatagcagttgtgttaacttcagtacagtaaatttaagctcattatacctccttcagaacggatacacattccctatccatcatctcactgtcccattcccaaacggtgggggtgtagatagaagcgggggtggtctatcacagcccagcagcactcaagacaggatttttcagcgactctgggaaggcaggcgttcggagtttggctcttttaccatgacatatgtgagaggaaacaggagtgctgtttggaggtgtgaaaaatggcagctccctggtgccatctactcttagtacactttttactactgctaaatatgaaattaaaatagacttactgtagggactcccagatgctcttgaaaagatgaactttatatttaaagaaacctttcgatttcgctcaaatgcaggaaattagggagaatagtccagttttgactttcaagaaaagggtgttattttaaaaatctaagacaaagattagaggagtcttagctttccactggttaagtcctgttgaggcaagctgtattccagtgttgagtctgcagcggccgaagcagccccgaagcagctgtgcctgccgtgggcagtcagtctcggtgcggccatccctctctacacccaggaaggattctgcagaggcgtcactggggtgaattcatgccaagggttgagtccatttgtggccctcccatataacctttccactctttgcctcccttaacctcgaggctcagtctccttccaaaatgtgtagattttgtttttacacttttttattcaggtaagttcacaattctccctatatcatgttttcattttttttctcagtctttccctggcttattccttctcagcaaaacctaacttatacccccttaacgagtatactttgaaacccccttttcattgccagaaaacttctctgtattctcaatcttttcatacaatttcctttcttcatctttgccttaactggcttctccttgaagagggcttgtccctttgaaaataactattcattcttcaattccctttggatctaaaggccaaaaggagtgatcagtctttttatcttttcctcttgttggagagcatagagtttttctatacaggtttactttttagtactttgttttatacctctggatagtaggtcacagagtacacggagcaggcttacacaaacacacacgtcaaatgaacaaatccagccacaccacctgtgcagtctcttgaattcacttcctccaccactgcctggattcaggctctcacctggcttgttgaaggcatcctcaactagtctgtcagccttggtctttctcttgtctgtcatccacaccacgctaggttttgttttgctttgtttaagcctccttttgatcttgtcacagtccttgattaaatttttctgccttcttcttatctataggataaaggccatgctcttccaattccaacttaaacttctgccattgaattatgtgccagtcaaggaaaaccaaagacaaaacaacaagaaaacaacaacaaaatagcagacacggtccttgccttcatggagcctatagtctgtagtcacaacagtagtataattacaaagtagggtagtgctatgaaggggaagctgaggatgctgctatgagatattacggcatgatggggaatttcaaagacctttctgtgtaaattaaaattaggtcaagaccagaggatgttcaagaattagctaggtaaaaagctagggggagaatatttcagaatgagatactaccatgtgccaatgttctgcagcaaaaaagagcttggtggttttaggtactggaaggccagtgtgtcaggagaactgtgaatgagtgggagagtggagcaagaactatacagggcttagatttctcttaaaatgtagtgagcagccagtcgttggttttaagcagagtggtaatatggtctgctttacatattttaacttttattccagctgcatcagtcacctcgagtcattctgtttcccatacaccttgatgcctttgctcctgtctctttctcctcacctggggacaccttcaccttttttacttctgggaattagcacagcacagtagtcctagaatgaactctagaaccaaacgctttctagtggcgtggtcttagatatgttacttaaatctatctgtgcctcagtttcctttgcagaagtgggatataatatcaaggagatggcatgtgcctaacccacaataattcctacaaaagtgtttgctattattgtttttattactattattaagattcacctcaaatgttactgtgtaaccttctcccaccttttcaggtataattcattacttcctcttctgcagtcccacactgccatggttgcttttatcacactgttaagagagttgaatatgtacttttttgttgttatagattatgaattccttaagggcagcagtcatgtgacatcaagcatcgggatttacatttctcctctatcactgattaattgtacgaccttggataaattgtgcagcttctccatcttggtttcctcgcctgtaaaatgaggatagcattacccatcttaagagcttctgttttggttttgtaagaaacacatttgcaccatagctaatacttagtaaacacatatgcttttcttccctgcctctgtagatttctaacaactaagttagaaacaaagttgggcctggttatttactgattggaggctgaggtgttgaataaataaataatgagggttttatgaatgagtaaaacaacaacacaaaaaaaaggaagaaagaagaaattctgttgttaaatatgttgtactcctgatgctaacagatatatcctaatttctaagttcactcaaagtgtgtttatcctgtagcatatgtttttaaatccagtttacccttagcattttaaagaaagataaacataatggcctgagctcaaattgagtagtggtttcttcagaacacagttttaaagccattaaaatagaagatgaaaagcaactgattagaaaaagactgctcacttacttagggtttagttttcttaactataaaatttgatagactgatggatgaaatgatctctaaaattccttcaaactctcaaattctatggttttatgattccctggttctgaagacttgtacaaaattacaacaacttaagatgctagataaaatcctaatggtgaaagggagaggcaattagtaaagaaataaatggttaacagtctagagccatttaatggagagggagacagccctgctacctcaacggtaattgagtttcataatgatgacactgagtcatcaaaaaaggttaaatttggttcaacctactctccttaaaaggcaaagaaatgtgtaatgcatttttaggaagatttttaccaataatattttaatattttattagtttttattcaacttaaaatttaagctttaattatttggaaaattcacttttgtaaatgtctatttcctctccgtgaagcaagcccatttcaggggctacagagatcttcctgccgccacagaatagcttatcactctggtatcatggttgttactctttttgtaatttagtgtcctaaattttacacataaaaatgctaccatctcaagctgggaacagtggcatatacctgtagtccccactacttgggaggctgagatgggaggatcatttgagtccaggagtttaaggctagcctgggcagcatagggagaccctgtctaaaaaaagaaaaaagaaagtggtagatgaactgaagaggttgaaatagataatactgtgcgtgtatgtcatgctaaggggtttaaatttgtcttaagggcagtggaggagtgacagtcacatttaagttttagaaagatgagtctagtggcagcatggagggtagattgatagaagccaaagctggaggatccatgaacaatttggagactgttgtaccagtctagacaagggatggtaggagcttggacaaaggtagaattagtggaggaagaaaaggaggaatggacataggacttgaaggaagtggaatctgcagatttagagaagtacatgatgcttgataggggttgaggttaagaactggatggaattggatccagttctggctttctgtcctgggtaactgttttggaggcaccattaactggaatgttctgggaaagcctttgcttttctgatgtgagtgctgctgcctcctgctttctgatgccacaacagcaaaaggcatcatgcagctttgaggtgataaacaggagagtggacatctacacattagtaagagtggagcaaaaagagccagcttcctggcactcttgtggaatagctgcccctgccctggccatgctacctctggatttcttgttatgtgtgacagacaacacttacatgcttagaaataggcatctgaatatgtttataaccaatagagtgaaaaatgattggtcagttgtagtttattttccggacgtctttgcattctaaaaacagattgagctctaaaaacagatgcaagctcaaaaaaagatttattttaatatatttatatgttgaatttaattgtaccattggcttctaagtttttcttttggcttttttatagagcaaattactaaagaaaaaactttgtttttactagcagacctcttagtatacaaatggggaaaatgtgcatataaagatgggacctaagatttggaacaaattccagaggaaaattttgttgacattggaatgaattactaaatactgtgtttgatatttggtaaaaattacttatttttgtcttctactctgagaagtatttcttacagtcttatcattagagaatagactggttctaaggctattttttacaggaacatattggctttttctttagacattaaacccaatgatatatcctgtatcttaaaaaacaaaacagtaaatctggaatcttaccgaaaccaagtattttccatatacatttgtgtctgtctccatattaagagagattacatcagagttgaaggctttctttggtcccaaaatctgtactttttaaaaaaagcagtgattgctgtggcttctccagtatgctgtggaatatatatggaagttattccagtgttttttctcagtctgacatccaaatggctgtacattacttaaaatctacatttgagagtctgttttctaatggttaatcaaagtgttttcatgcttgcaaattcatcttctaacagcttttatcatcgtggcattaaagttaagaatttgatgttattaaatcacttttcatttaagatattttatgcagccttcaaacaaagccctgagggaatttgggaggaaaaatacaagaaccgtaggacaagtaggtcatagagtgcagcatcatcagatggtggaatgcagggcagggctgtgcgtcaggagactccactccatttctatccatggctctcttcgtgacttagtgattgaccttgggctacttatcaaagagctcttgcctcagtttcatcttagataaaatggggctagaagtcaccggaaacacatgtcaaatgtattgtggagttcacagactcatagactgtcaaatctgggagacacttttcattcatttgctgcaacccaaaatgaatccccaccacataattttttgaagtgttttctgttctctacttgaacgactcttgtgacagtggacatcacctcctcctgaagaaacccactccatttttaaacgtttttagttgtcaagaaattaatcctgggaaatacctaaaataggcaaattcatagagacagaaagtatattaagtttatcagggactgagggaagtggaaagtggggagctattgctcaatggctagagagtttctgtctggtgagatttaagttttgggctgggtgcggtggctcacacttgtaatcccagcactttgggaggctgaggcaggcagatcatgaggtcaagagttcgagaccagcctgaccaacatggtgaaaccccatctctaccaaaaatacaaaaattagccaggcgtggtggtgcatgcctgtaatcccagctactcaggaggctgaggcaggagaattgcttgaacccgggaggcagagattgcagtgagctgagatcgcaccactgcactctagcctgggtgacagagcgagactctgtctcaaaaaaaaagattttggaaataaattatgtgaatctaattaatgccactaaattgtgagtctaattaatgccactcagttgtatactttaccacaatttttaaagattcactgtggttagttctataatctcagtgtggaggtagaccatattgtccaagttttacagaagagacaacagaggctttaagatcacatggctagggaggagcagtgtcaggatctgcacctgagtacttgaccttcagactgtgggtgtcaccaagttcatattgccatcactgttgggaacagatttgttctcatcatttgggatgcttttcttactgtgccctgagctggccagtgcagaggaaggcagaacatttctaccacccttgataaatccagagactgaaactcagttaacgacatggcatgagcttttttggcagctacagcacactattgattcatatggagcttatacttaattaaatttgctctcccaacatttgatttatacatgctgctctttattaaagcaggttccctccattcttaaactgttgagatttgtgtagcatttaaatacgcaagaatttaaaatttattcctatatgtgactacatcttgttgcttttgaccgattgttccagtctcatgattattttgactcttgattatggtacccatcatatttgttatatcttccatcataattctatcttaattgtaagtcaaaatggctttgatttttctcatccaagttatcgataaaaatgctgaaaaggactaggacatagacctatttcactgctgatcttcctttggcctttcataatagccgatacctgtttaccatgctgcctctgtaccagaaactatttaaatgttttttacatattaactcattgaatctgcacaacacccctacaaggcattattaacacaatcctcattttatacatgagggaactggaacacagaggttaagcaatatgaccaaatcacatagctggcaagtgacagagccaggattcaaacctcttagttccagaagcctcttctgtaaaacttggacaatatggtctacctccacactgagattacagaactaaccatggtgaatctttaaaaattgtggtaaagtgcacaatttagtggcattaattagactcacaatttagtggcattaattagattcacagagtctgttctcttaagcattctgctctggtgctgctaacatcagccaggattctagtccatattgggttaggataacataagggactgtattaaatctaattaataagattgctattataacattttttaaagtgcgttgttggtggcaaaataatctgaaatgccagaccaaagcatttgtgctgtatcttctaccaagaaattctttccccattttttcaccaaactctaatctgttctttcatgtctgctgaaaagatacttcctttttattttcccaggcaaacttcagttctccttctttaatattacctctgcactttgtacaaatgtccattgcattttgaaatggatttcaacagtaagccaacaacaaacatttatgagcacctagagcacatgccaagcattattctgggtaatgggaatataaacatgggaaaatggtgctcctgccctcggatttacagctgactagtgagagccaacacacaaatatggccctggtccctgctacatcatagttgttctgcaaatatcacatggctgaatggaagagagctgagtaccaagaaagtcttttaaaatgcccaaataaacatctctaaacttttttgtgctttagattaagattatttttgaccatcatggctgtttccttagtgaaaccattggatcctcagcccttcctggtgtgtgtcaatgagcttaggctaaattaggctgtggtaacaacctgaaaatctcagaagcttgtaacaaccaatgtttatttcctgtctaggtctgtcttgggtcgtgtgcagctctgctccatgtcagtttcactatgggaccccagatgaaggaggggcacctatctgggacattaatgctagtatcaaggtgaaagagcagaaaacaggtttctgtaggaatacctgtggctatactttttagtgattttcaaattctttaccatgtttattccaccaatctgacagttatttacatgtgttttcttgaattttgaatatcacatgctaccaggataaagttaagctgctggcacatctaagagaaacttgaagactgatagggtctttttcattactcaagttttaaaattctattgttgaactgtaagtcaccactttaattgttatgcatatttctgtatagtatttttgttctccaaacatatttgtaatccttcatttaggaaaagagcctcaaaattaatttagctaattttactttgcaaaggcatttcaagatgtttaatgcattttaactgagagatattgcttgacagactacaacaaaattgaatgtaaaaattgaatgtatagtaaagtattctttactatataatttaggggttaggatgaatgattcattgctagccttgatagaaatgctagcctatttctgtcttcctacaagcaatagcaaaatatatataagctgctaattatttaatttaaaaaaaccggtgtgtaatacactttaatgaaataggctgttaacaattgggaatcttctagaatgatgatattataacagaaggtagcgctttcttcagaaagacatgcagctgactttcccttcacccaggatatatttttcaaatcctttctccagagctgccaaaataatggtacaatactgatgctggagctatagaaaagaaaataaattgtggtgatgggtagatttttcttcactgaggatctaattacagggaattggacttaacctaatcagactttaacgacaatttcctaagagtaaattagggaacaaattactgtgagatgagttgcagaatctttttcagaggtttggagaaagacagaatgtctgttcacctgtttggccccatttagtattggcttaaccaggcgctggcagcagttcctagcatgctgggtctgaaattgtgacatgtataggagcagcagcattggaggctcctcaaggaggacaaagcacctaaacagggatggggcaggtgagttgaaggaacaggaactgcttgtgacagttgttatgcacacattggggttggctgggctagatagagatcgattaaaagatgaagcaggaagaagaacagtaatgacagaatgagtagtaaatatgatcattcattcttggaaattatctgaaaatagttggcacagtctgtaaaaacacaagcaaatacacatgcctgtttatgcaaatacatccatgatatttgcaatttcaaacaaatatatgtggcctttggaaaaaacctccatgaaatctaagatcttgttccctgcccgctaccttaatttgcttaactgacactctatggcactggattttcactttcttctttgaagtcttttcttattccactaacatttactgagctctcactttgagcttagcagggtgtgatgctcttctaggagcgggaatactgggaaaaaaatccaggttattgggagttgaacaaactcactgagaccaccgaccattctttatgggggcatttgtggttgagccatgggagactcagctagcccgtgttgctatgccccacttcaattgtcctatctaagaagccatcttgattttatatcaaaattcatggggaaaatgtgccttgacttccttttaaatgccttattttgtctgtgcacatcatacccaggactgttgagatggtaagaagatacattggcatttggggggattccttacccacctcatttccttgagaaccaaattctaaagctcttgccagccttacagacacccaatggaatccctgctcatatgcatattttgggtgcatcagtatgtttgtcattttctccctggaaacggtttctcacacccacgttgcaagtgtgtgatctgtgattatatctcttttctgtgtcctctttgcctggagcgagggctgagaacatgattcagcttagggaaatgatacaaaatgtggttgttaaagtgatctttcaaaaagcagctttttatatgtgtgcagtcactatgcttggtgtagcctatgacttcattcacctgaagcaatgaagcagattccaggattttagaattatggtcttggacaaacctagaagacacctgcttttaggcccttggatataatcttatttcatttaaaagattttgaagattttgagacaaaggcgcgtgctaactttgctccgtgattaatccttccagagtttgttgccatcttgattttatatcaaaaatcatgaggaaaatgtttcttgacctccttttaaatgccatatttcatctgtgcacattgtacccaggattgttgagatggtaagaagatacattgacatttggggggattccttacccacctcatttccttgagaaccaaattctaaagctcttgccagccttatagatacccaatggaatccctgctcatatgcatactttgggttcatcggtgatttttgctcactgtgactaatccttccagtgtttgtagcctttcttataaggagaacttctatttcagctttgttaatttggcttcacaaagtaaaataaggggccccattgttttgtcttaatcagtgaagggaatatgggatgtcctgatataattagtcctttgatttttagtcctatccagcccgggcttgcttgagaagtcccttgtgtagccctatattatcagacatgctatatcacagcaagcaccttttgatgtttaagaattaattcctttaaggaattctaaaaaagaaagatattttcagcattaacatcctaaatcaacatttccattttctgaggatgtttctttagcactaggcatcgctgagatagaaaatgagttctgagagactttctttggaaacaaaatggctcacccttaaatttccccgtttctggatgaaatctgatttaataatacagtattgctcttcaaatatgagagaaatcattgtaaggaagaatgtgggttttaaagaatagaatgggttggataaatgtttttataaaatagaagtgaaaggatcagaaatcagcagtatcaaaacaacaagaagaactgattaaaccatgcacttgttacctctgaatttctctttgcagaaattctacttcaattttaaaattcagaattaaaaaaaaatattcaaaggatagttaatgaacaaaaactttaggaaagtcaaacatggtgtggcataggattggggctaaagtgaatatgcagtttagaattgctagtgacattgtatcataaaagaactgagtaaagaagaaccaagaatctttgggcacatttgataaaaaataaagttgaaaaggaaatatcaaagatgtattacaaagacaaaaaggatattctataaaaagtaaggaggcacttagggaggatggatattaaaattgcaaagtgttattaatgctgtggttaggaacagcagatagtggtggaaatagtggagatctacctaggcaaaggcacaatgtaggaaaaggatgaaggaaagagaagtatttcataacgtgtgctaatctttgggcaggtgtgtcttgtatgtaaatgcctgtcataaaaggcaaacactgaaaaaagaatgaaaaaagtaaatcttataactcagattgtagatctgagttataaaatagaattaatagaaaacagtttattccctaggttatttttaaatacttctgttgatgatttaattctgaatgactaactgggaaaggggatagaaaacttgtgctagtaaggaactgattacagtataggagagcggtttatggtactgtggctgtctgaatagtggcccccaaagatgtccacaccataatcccgatggatttatgttattttactttgctaccatgttaccttgtatgataaaaggaactttgcagatgtgattaaggattttgagatggggaaattatactggattgcctgagtgtgccccaaatgcaatcatgggatacttataagggggagatgagatcagagagagtagtaggggatgtgatcagggaaaggagattagagtgatgccagggagggggccatgagccaaagaatgcaggaaaggatgctgggaaaggcaaggaaacagattctctcctagaacctccagaaggaacacagccctgctgacaccttcattttagtccagtgaaacagattgcaaacctctgacctccagaactgtaagaaactacatctgtgttgctttaagctactagagcagcaataggaaatagatacaggcagtaatttgcagatagttctaagtgtaattgacttttacaatgaatatgagcttttcttcaactttgagctttgaaaatactacagattgccaggcgcagtggctcacacctgtaatcccagcactttgggaggccgaggcgggcggatcatgaggtcaagagatcgagaccatcctggctaacacggtgaaaccccgtctctactaaaaatacaaaaaattagccgggcgtggtggcaggcacctgtagtcccagcgggaggctgaggcaggagaatggtgtgaacctgggaggggagcttccagtgagctgagatagcgccactgcactccagcctgggcgacgtagcgagactccgtctcaaaaaaaaaaaaaaaaatactacaaattttaaaaggttctggttctgtatcatactcttggggttgtcaaattcatttcttcaaggttggaaaagttggacttggactagatttgaggtcacctatgctgtgtagggttttgtagaaaactgcttcccagctgagtatggtcgctcatatctgtaatcccagtgctttgggagcccaaagttggaggattgcttgagtccagagttcgagactggcctgggtaacataatgagatcctgtctctacaaaaaattgtaaaaattagctgagcgtgatggtgggcacctgtagtcccagctactagggaggctgaggtgagaggattgcttgagcccaggaggttaagcactccagcctgggcgacagagtgagaccttgtctcaaaaaagaaaaaaaaaaaaaaaaaaaaaaacttttcccatacataccctcatttgatcttcttaatgagggttttatttcccattttacaaatgaggaaactccaagggtttttatttatttatttatttatttttgagacagagtctcgctctgtcgcccaggctggagtgcagtggcgcaatcttggctcactgcaagctccacctcccaagttcacgccattctcctgcctcagcctcccgagtagctgggactacaggtggccgccaccacacccatctaattttttgtatttttagtagagacgaggtttcactatgttagccaggatggtcttgaccccctgacctcttgatccgcccgccttggcctcccaaagtgctgggattacaggcgtgagccagcatgcctggcctttttttttttttttttaacgaagttatttttctagagcattcatagtttgtttttatacagttaaggttctcatccatctggattttttggtaagtgtggggagaataaaatgaggagccgctgtttttttctccaaatggcatgtattgtcccaacacaatttattgaatcaataattcatctctcccatacgaatttaaactattgaactttcacatcaaatttggaactacaaagtaggttaacaaggtgagaactattataagaataatctgtctcaaatgaagaatgtaaatgtcttcttgtctccagtttatttctgcttaaaccttaagtttaaatgtttggacagaaaaacacttatagtcctctatgaaataaataacttggtaactcagagaaaccacagaccaaattactctgaagaacagcaattcttaaaggaaacctctcaggaatttctggaacaaggctgtcagctagttttcaaaatcctgcacttctgatgaaatcaatgaattgaaagtcctcctctctggtgtggagataacgttgaactgatccaggttcctgagcagctcaaggaggtcgatggaagaggaaaaggatttaatgtaaatttaatgcagtttcttagatctgatcttagagaatatctaactaggttgaaaattctctttctgttgtattttcaatggaagagcaacaaaggatttctaattaataaagcctttttgtgccaagctgactttagaataaaattcattcgttgatttgcctttttaaaaaagacagaaagtcataagcatccttctggtttgcaggtcttgatgattacccctctttatttctgagaactcaggaagcatctccggcaggggttatccttaataggcccccgatctcagggttttaagaatcacattgggaaaaccgacagatggataaaaaataattaccacacagtgtgagtaaaaccttttaaaaagtctattactctgggagcacagagtggcgacggtttccccaggcctctactttaggagacttggttgagacaattacttcactgggctgcatctgaagggacggtcatcttaatcagtaggaaaacatttgccaaacccagctaccgtaagaatttaatgctgttaaatgatagtttgtgggataagtttggggtataacttctatttgtagtcctaatcatgggtctagtgctactgaattatttttttccttgctgtacctgagatacatatataacactttatttctccaaaataacatacctgccagttttctggatatcctgccaaaactgaatgcaaatttttctctccaaaaactgcaagtttggggcttgatttaattttctccatgaagaataggcaagcttgatgggcagcaactcttgtacaattaaacattagtacttaaaattaacctactttgagaaaacagctaaggaaaatgtaaggctgtttataacattcatacatctataatcagcctttcgttcatagataggaagcatctgtggagcaaaccataatcttgttataatacctccctagcctttttctttttcatcttttttttttggagaaggtctcagtctgtcgcccaggctggaatgccgtggtgcaatcttggctcactgtaggcccactgcagcctcaacctcctaggctcaagcgatactttcacctcagcccctaaatagccaagactacaggcgtatgccaccacgcccatcgaatttttttatattttgtagagacagggtctccctatgttgcccaggctggtcttggtctgggctcaagcagtcctccctcctcgacctcccaaagtgctgggattacaggcatgaaccactgtgcatggccacctcccaagcttttaaaagcccttatcacaatatcattggtagaccccagtgggcaaaaattggctcatgatactgtaggggacaaaaacaaacaaacaaaatacttttcctttacatttcaggtttagtggctggggcctgtgaattaaactgacaaaaggtaaattaaccagagaaaaagcatacacattttatcaatgttaacatttttatgagcatggggcttcacagtagtatataagaagtgtttagactcagggcttgtctacctaacttagtagggaaaagggagaggaagaaaagtttcctatgggaaggacaaatggctttttaggaggacaagttagtggtaatgtttttctttatgagtattagtggtctttctgtctccctcagggccacaaaattcccctggagaagggatttacagtagcctcaaatctcagaagctactgcttttagtcagataagggaagatccaagaaagctttgtttagcacttgttgaatctaaaatgtcttcagcttaagataatcttgaaaccaatgctggagttctgagtggatccccacaacagagcagttcaatgtaaagaatactgcaaaggtgagccgagatcgcgccactgcagtccagcctgggcaacagagcgagactccatctcagaaaaaaaaaaaaaaaatattgcaaaggctgggtgcggcagggcatgcctgtaatcccagcaatttgggaggctgaggcaaggggatcagttgaaatcaggagtttgagaccagcctggccaacgtgacaaaaccttgtctctactaaacgtacaaaaattagccggatgtggtggcacacgcctgtaatcccagctactcaggaggctgaggcaggagaatcgcttgaacccaggaggcagaggctgcagtgagccgagatcgtgccactgcactccagcctgggcgacaagagcaaaactccgtctcaaaaaaaaaaagaatactacaaagggtctctgtgttctggtctctgtagtcccactataatttataacataacttgatatagcttttaggttgccttcctgtgattgcataggaagacaagcacgctctgctgctctcttggcaaggtcttacgattgcctcaaacaacaactagacacactggctaattactctcagtaagatcagctcagttatgccaaaaccaaatccaacacttttctcagttaattgttaacatctttcagtagaaaacatcttggaaatcttttaaaagtcatgaatcaatagatcaagtcagatattttcatgggttgtgttttaatacaatctctttccagaaatcccatagcatggagttttgccaaaaaaacaaaaaacattgaggccaggtgtggtggctcatgcctgtaatcccagcacttagagaggccgaggtgggcagatcacaaggtcaggagatcaagaccatcctggctaacacagtgaaaccccgtctctactaaaaacacaaaaaaaattagccaggtgtggtggtgggcgcctgtagtcccagctactcgggaggctgaggcaggagaatggcgtaaactcaggaggcagagcttgcagtgagccgagatcgggccattgcacttcagcctgggcgacagagcaagaccccatctcaaaaaaacaaaaacaaaacaaaacactgaataatactcgcatcaaggctttctagattacatatcgtggtcagtaacttttgcctgaaaacctatgacataggcacctctttcacttgtggcatctcatttaaagatttgtttatacacttgacatttctgtagaagactttctgaggctctctgaaacccagcctcaagcaaagttatctgggaaagatcacatgtcaggtcttctttggttttcattataaaaaaatcattgtgccacctccatgttaggaatctaacctgatgggacaccctcacccagaaacataggacacttcaggcacctcagtgatttgagtcttgaacgatttgctcttcagccattgtcaaaaactaggctgatgcatttgatatttaaaaagcatttttagctgggcgcagtggctcacgcccataatcccagtagtttggggggccgaggcaggcggattgcttaagctcaagagttcaagaccagcctgggcaacatagtaaaaccccatctctacacaaaaatatgtagagatcatgaaaatgacctgaacaggccaggcggggtggctcacgtctgtaatcccagcactttgggaggctgaggcgggtggatcacaaggtcaggagttcaagaccagcctggccaaatatggtgaaaccccatctctactaaaagtacaaaaattagtggggtgtggtggcaggcgcctgtagtcccagctacccaggaggctgaggcaggagaatcgcttgaacccaggaggcggaggttgcagtgagccaagatcgtgccactgcactccagcctgggtgacagagcgagattccgtctcaaaaaaaaaaaaagaaaaaaagaaaatgacctgaacataagtgtcaattaggcagtttgggaaatagctagctaagtagcattgcatttcatatttcatttttttaactattagaactttacacaatgcttcttaaaccgaagtgcacataagaatcatctcagagcttctccaaaatgcagatttctggatcccacaaactcagatgctgattatagtaaatcaagggttgaaaaccagggaactgtacttcaacaagcaccgttaagtgattcaaatttgagaaaagctggcttaagggtaaataaatagtacaatttaaaaaatcttacagacagggtttcaaatcatgtcattattttaaattgtgtaatcctggggaaactaatcttttttacctcagtttcttccattataaagtgaaaattaaaaattacttgagcaaagggtcattttaaggatcaaatgagtctgaatgtcctaccacagcaccgggaggatagaaagcacataataaatgctgactgtcattattatcaccacatattttcaaaccttgactcagggtagtgccagtgcttagggaagtttttctatgggtacccacagtatttactcttcttttgtagccctgacccagggcttaaaagtgtttttcatttgtgttcctgcatactccaagagaaatctcttgcttgcttttttgaagtccctagatatagagtaattaccccttttttgcttattgtccacatattcttgtcaccatcctggttttattatgtcagctcccgtcatgccatttatccagtttgccacatgtggcaaacagtgattatttataaagaaattgtagttcattccctaccatataattacggcaaattgaattctaagcccaaacccctttgcaaatagtttttggctaaacaatctgaaaactgcctgcctgataaaattggaggaaactgagacaggggagtgccttcaattaaggcactacaagcccagtttgaatgagctagactttaattaggacacaagaagcaatttagagataatctcactaaatcaaaaaactgaatgataagcgtgagcattactgtgcagagaaatgattttcctgttgaaggagattatggagcaccttagagctgtaggaagtggaaacggacatgaattatttttaaagaaatgtgtacatttatatataacatttgcacctcaaagaacgcttttgaagtaattacaaattcagtatagctaactcggagggactgatgttgttttgtcatttaagatattaaaataaagttttactccaagcgctctggtaggaggtggaatgccaagaagtttctgaataaaacaaatatctgggtccagcattttccagttattatttttctctcctcctcttctttttactcacattcttttttggtacatgttcttcaaactgtgtttcagaaaatatgtatgattcccaccactgtcatctgggctatttttctggctcaattgcacaatattgtgaaagcattcaacatcagttaagagtgactggagtatgaatacaaacgaggatccacgctgaagcattttactagaaaattagttgcaaaaacatattacttatggaaattacatgcacatttattaaaataatgttaaaaaatccaagtccctcaccctgaatcctttttcttttttttaacatcaaaaccatttttttttcttttggaggcagggtgtcactctgtcacccaagctggagtgcagcagcttgatcgtggctcactgcagcctcgacctcctgggctcgagagatctcccacctcagcctcccaaataactaggtctacaggcatgtagttttttgtagagacagggtttcgctatgttgcccaggctggtcttgaactcctcatctcaagcatcctgcccgcctctgtctcccaaagtgctgggattacaggcatgagccactacgcccagccatcttaaccattttaaaatgtacacttcagtgatactaagtaaaattcacattgttgtgcacccttagccattttgatgaagaatttaagactcatttttgtatcagtagattatggaggagcataatagtccttcacagaaagaaggaaagagcaacctgagagacagcttttaccttccctcacacttagggagaggtttttgacagctatgagcactgtacctgggaaaagaatcacggcagtgctgggatggggatttcagactcttaaatatgattctttctatcctgtgtcctgactctttttttagacctcagccttgacttttttagactttttagacaagcatgaagtttcttgaaaatttgcatggataataaggctgcaacagaggcaggctcctctttctcagtagcaacatctatttgtagaatagcagcaatgacaatgtcatagccctaatgggccttacagaagaaaagaatatatacatcaatgtatacacatatactaatggtagcacaagtcttggagataatttcgtgctataagaattccaaaaaaaggcaatttctgaaagctgggatgattgttgcctaattgttaaaatgactgcgtttacttaatataaattttatttgaaatactatgaaataaaacatcaatagaaatcttgtattatgtgcaaaatttgaaattacactgtgcatcaaaggaaaaaatgcaaggattttgtaatttcaaagccagtctgtaaaactatttatgttaatggcacatgatagctccactataagtaaaaagaaatacccaacaccctttgtcaatcttcagggaaaatgggttctgaattatgagagctgtgactaatgagtgattttcaggaatgcatttctgtgttagatgcactgcccttgtgctctgaaggctttgatgttcttaagggcagttggactcattattctgcattattttcatttttttcctggaggaaacatagctactctagtgtagcagggcaaaccttgtggatgaaacggaaatatcttacaaaatgtaaacctcttgtattaaaaagttaaaattccggccgggtgcggtgactcacgcctgtaatgccagcactttgggaggccgaggagggcggatcacgaggtcaggagatcgagaccatccgggctaacatggtgaaaccccgtctctactaaaaatacaaaaaaattagctggacgtggtggcgggcgcctgtagtcccagctactcaggaggctgaggcaggagaatggcatgaacccaggaggcggagcttgcagtgagccaagatggcaccactgcgctccagcctaggtgacagagtgagactccatctcaaaaaaaaaaaaaaaaaagaaaaaagttagatttccaggatctctttctaatggccgaagattagagatcatggcttgtggagcacatctcatcttcactttctgtgaatgggaccaatgcaggaattgaaaaatagagcctcacattgacaagacagaaatctattgctaggactttgcaagatttattaagaaagtggtcagtgttttaaaatgacggctaatttcacccagaagcatggaaaaaggcactcattcagccattgtctgcttattaataaaaacctgtagcttacatagtgaagctgagttgccctgagaattacaccagctgtctttctgactaaattcaagcagtggctttaactgacctttttttttttttatctgaattaagatcatttgggccacacctatgagctgaggtctagttcagatttgttggagaatgctcacccatcagtaattttttgactgattcaagccccttgaccaatggacattagaggatgaatgagaaagtggaatacattaagtaacttagaatgaagaaaaatcatagcataagagatacatttttgacactttgtaacatgtaaattataattaatacataaatttgcaccaattacttgactcaagagctcaaaactttctgtaatgggtttgaagcacaaaaatacagtgtttatagtcagagtgcagcctttactttcaataatggttatggaaagcaagtttggctttaggttgtaaagagtttttcagtgccaaggcatttgactgccctttctttcttattctccattgtcttgcagaccagatgatgtgcttctgcatcgcactcatgatgagattgtcctcctgcattgcttcctctggcccctggtgacatttgtggtgggcgttctcattgtggtcctgaccatctgtgccaagagcttggcggtcaaggcggaagccatgaagaagcgcaagttctcttaaaggggaaggaggcttgtagaaagcaaagtacagaagctgtactcatcggcacgcgtccacctgcggaacctgtgtttcctggcgcaggagatggacagggccacgacagggctctgagaggctcatccctcagtggcaacagaaacaggcacaactggaagacttggaacctcaaagcttgtattccatctgctgtagcaatggctaaagggtcaagatcttagctgtatggagtaactatttcagaaaaccctataagaagttcattttctttcaaaagtaacagtatattatttgtacagtgtagtatacaaaccattatgatttatgctacttaaaaatattaaaatagagtggtctgtgttattttctatttccttttttatgcttagaacaccagggtttaaaaaaaaaaaaaaggtgaggacatctgggtctcatttgcttctgctaggttaaacttttacttgacaacaaggattcctgctgaagtctgaaccttactgtgtaaccctcagtttccactattaaagagtatcttttgacgtctgcttggaaaatgaatagtatactggtaactcagtctccagtcacctctgtgtctcttaagcaagagattctaaaagattgggaaaacatatcctccaacacctgcctttgcctaaccattatttttcaccagattacttcttaagagagggaggtgattctgaagaaggcttctatctcaaaaagcactgggcttccttattcatctgttcttgttgtttttgacggagttaaaaaagtttgtgtgcaatacaatatacatgatgtgaaggacactcttcagcttagtgaaacgctgttttcatttttttttttttttgtaggtcagaaaaaaacaacaaaatcagttcaagcatttttttttctttgtccttgccttgatgttatgagtattaaaaccaggaggattgctgccattgtgcagtttgcttagacaaacctggagatgcaacccagctcacatcattgctactgatgagctttctgtgcctttatcaaaagttgattgagaagaccatatttctttgtatctttttataaactcaaattccaagtatcaaatcgcaggtctcagtgaacatcaaacctatttactacatagaatcaaacctttgtttaggtgagatgtacatcgttagtggaggaaaaactgacaacctaatttcatttgttttcttctgatactcttcagacatgcctctattagaataaaggtaaactggaatttaaagacaagttcccctcagttatttccatggagctgtaatatgtatatatggagtgatggtttcctgacctttagtccacataccaatgttttcttttttcttttttttttttttttttgagatggtgtctcactctgttgccaggctggagtgcagtggcacgatctcggctcactacagtctccacctcctgggttcaagtcattcctctgcctcagcctcccgagtagctgggactacaggcacgcaccaccacgcctggctaatttttttgtatttttagtagagacggggtttcaccgtgttagccaggatggtctcaatctcctgaccttgtgatctgcccacttcacctcccaaagtgctgggattacaggccaatgttttcttaatcttagaatgtgaataactgaaaatcatagtctgtggaaaggtgttgaattgagtataatcttcttctgtttatttttgtgttttgttttttaacagatgggtatcttgctatgttgcccaggatggagtgcagtagctattcacaggtatgatcatagcacactgcagcctcaagctcctgggctcaagcgatccccctccctcagcctcccaagtatctggggttactggtgtgcaccaccgtgcttggctccaataattttttttctaattcaaaagttacagtttcactgtgaaaaaggccttgaacacactatttatgacatcttttgaggcagctccagtgccttgacttcaatcccagtttccggttgcagcatccttgttgtcttagcaacacagtgaactattctgaagcatagagtaacacgaaactgggagtccgagaaataatcatctctgcatcacattatgggagacgaagtctgctttatccattttatctttattcagttgtctatgattaattgattacagagtagtagattagaatagtgcatggatatacatttgtgttgaaaaaaggggaagttgatatatatcaatcttagttttcatttatcagtttgatattcatgcatttacactaaacgcttccatttatcccgaaaaagtatatgcaactgtattctgtaggttgatttttggaaaaggggagaagcacactgaattcataaggtcacatgtagtcttaaggtcttacttgcttacagccaattaaatttgaagcaccttatttatacttgttaaaggtaaaacccaaaagaacaagcagaggacattttaaggtcataaaaggtaaataagcttaccttcttaatgttttcattctctttttgtataaatcagaaaatgatctaaactgctgtaacaaagagaccccaaaatatgatggctcatgtaagataatttatttttttctcacatagcaatccagaagtggcttcatttcacaaggtattcaagggatataggagtcatctaccttgttagttctcttaatacccaagggtattgttctttccatggtcaaagctggctcaagacttcctagcctgtgaaaaaagaagaaggtggagcaagccatttcctttttaggaaattacagccatcacttctgcccaccgtccattcatgaatacttactatatagctatacctagcttcaagaaagcctgggacgtgtctctaactagatggacatgtgccctactaaaactccagggaaagggttctattactaaagctaaaaagaggggaatgaatactagagttaaagacaaaaatgatagcagccaatggcccatgccgtgataatctgctgagcaggcatgatggagatcccttgcccagcagaaagtgttccttggtgaaatcatgaatctgctatctaggagaaactcccttgtccattgtcttctgtggccactagtttgacctctaggaaagtcttgctcgtcagcttctgtggccccgtctgaaacttttgagggacatcgcagcttttgcagcccctgcttgctggtgcagacttttagacctagattgccttagagactgaaaaatatacgcttttataggccggggttttagttcatttgactgtaataaagacgtcaatgccgtttttaatgtttgactgctgacatctttcaagactcacctttcccttctcccttatgctgcacatctgggcaagctgatggaagcatgggtgcctcctcctttggccccagcaggaagttcaaatcacgcaagccctggcatgcatgcaggaagcttcaccccagcctcacactctaagacggataaaagccaaaccaattaagccgtttctcgaccctcctgggagcctgccctatctccctggaaagtctcagtatgtgagtaataaacctttttatacccatttcttgtgtgtgtggcattatcagtctcagcatccgaactgaattcgtggtaattttctatgaattttgggaggaggaagttcatctgacatcttaagggtcatcatagcattggtgacatcattttatcaaaaatactagaggtttctggttcatttgctttcagtcagttcatgtgaaagtagccacagccaaagagctgttctagttatagttctttaagccagcaatgtgttatttattagtcactgtgcctggcccatacctctgtccctcaaattaatggcagccatcttgaagtcttctccaacaatgagtttaagtggtgatgcaacattcttcatctgatcttttctgccgaaatgactcccattgtctgaccagtaacacaatggagacttttttttttttttttttttgagacggagtcttgctctgtcactcaggctggaatgcagtggcgtaatcttggctcactgcaacccctgcctcccggttcaagcaattttcttgcctcagcctcctgaataacttagattacaggcttctgctggctaatttttgtattttttagtaaagacagggtttcactatgttggccaggttgatcgtgaactcctgacctttggtgatccccccatctcggcgtcccaaagtgctgagattacaggcgtgagcctctgcacccagccacagtggtgactattgaacaaaactgaataatagtcacatctcctgctcccttgaatgcagaagcaattgtacttcagggcatggtgttatctacttgcaaactttttattttttgatcttacagcaactacttttgatagtacctcactaaaaacatcagcaaggagccaccaatatacattaaccactctggttctaactgctttccccatagctagtctgcctttcaaattgttgctggtgtcagttttacctagtgattggtcaaaacataacaagggtctctagtttttcatcctgcaatatctgtttccacactgccggttgcctggcaacacaataccagagccacatattttagatttttgttatgatggcacttttccattcctacgtatcagtcagctagagctgcataacaaatagcaaagactgggtggcttaaacaaccaaaatttgttttttaacagttctgagggccaaaagttcaaggtcaaagtgttggcaagtttggtttctcctgaggcctctctccttggcttgcagatggctcccttcttgctgtgtccttacactaggcacttgtgcccctaatgtctccctgtgtgttccagtgttctcttataaggacaccagtcttataagattagggcccctctctatgatttcatttaaccttaattatctcctgaaaggccctatcttccaatatagttacattggggctttggccttcaacctataaattttgggggtctacaacttagtccataatattctggtactgaatttaaaactattagggtgtcggctaagccactgtaacagagaaacccccaaatactgtagttccaataagataatttattttctttcttgtagccatcaggaggtagcccatgaaattgtccagggacttatatttattctaccattatttttactctattattattttatattattattatacttattctaccatttattctgccattccctagagtgtcctcttcatagtggtcaacctgtgggatggagaagagaaaagtaaagggcaagcacatacatttgaataaaatgagatagaagttgcacacatcaagtttgtatattcttttggtaagaaattaactgcagaggaacctcttgctgagcagccatgccttctaaaacctgggacagagattttattattaaaatgaggaaagggagaatgaacgggggggaggattatcagttccttcctacattcctcttctatacatcttacattttgtattgagtatgagaagagacctgaaatttagatgattctttacatttttatttatctaaaattgaagtttacctaatttagtttaatttaattattttactgatttaaattaatcagaattttcttaaaattcagtaaaagaaaaaaacgtaagggaagctttgttgctttgcaaaatagggagatatttcaggaaggtaaggggagaggtctatcctacagtatggagtacagaagtgggacttagagatagccaagagagtttgaaatattcaaagaatatatacaatagaatctgtagccttttttaaaaaaaaaattagaatttccatctctctgaatgtattccagttgtaaaaaaaaaatgtattgagtgtcccatcatatggaagtttttaaaattgtaggaaataaaatattcagaaggctacacaaggtattaaaaaaggggacagggatataatagcttactagcttattagaatgaatttggttccttatgagggataatctagagaaaagaggcatagaataagatctttggaaccaaacagtctgagtttgaatcctggctctcccttttggcatctgtgtgatcttgggcaagctacctaatttctattacagctttgttatctcaactgtaaaatgaggctgatattgatatatcattggagaggactaaatgagaccatgcaaaatgtgtacttggcacagtgcctgatccacaaatactgatgatgatgatgatgatgatggtggtggtggtggtggtgatgatggtgataataacagtgatgatgatggtagtatagcattagtgcagcaaaaaggaaaaatggactcaaaactaatttttcctaaaaatttgtgcttttatttatcagatgcttctaacttagtccccaccagtctaagactagaacaatattgggattttccttttcagaagttctatcattggcaagttgtttttatttccagaactccaactcagaagaaatcacctctgaattcattgtctatttaataaagtcaagattcttcaaattctccattttattcagtattaaataactttcaaaatatggctatcttgaaagtctccacttcctcatacttagcaatttccagcattatttaaaaaaaaaatgtgtcttttctttgatgcaaagcaattactgggatactttcttctcagagaggaaatgcaaagaacatgatcctttctgcctggtccctgtacaacattgaaaacaactggggtaattttttattaatgcatttgttaaaaagatgcaacatttctatctccaagaagtttgaaatatataaaatgtattctgtgtctcattatcaggtctctgactcagagtaacttttacaaaggtttttatctttttttcccctctatgcttcccaaagcatgactaatgaggctgatgaatgtcatcataggagcgccgcgtttctggcaggtagaaaaagatcacattagggcttggacttccaagtgacatctagaagcaatgagaaattcaaacaagactaccctgagtctatgcaggaattggtagtgtttgaaatttgggagaaatgttttaatttttgtgaaagtcagtggtgttaaaggtcagaaatgtaactacctccagagttctagcattcagggtagtgaagatgtggtgagagttaatgaaataaaatcaagaaaggaaaaacatacatgttggtgtcaggagatgtgtctggttaaatgtcagttcttgttcacagcaagtagaaatgttcagtctttcagagtcactgccaaaggcaccatatacatttctccacatcaggaacctgagaatcgttttctcttttcccaattctacaagggtttataattcacagaaccgtgcagggatcgcttttggacatttgtcccctttaccagacagcagttaatgaacttgcatctctgctttaagcttaggacacctaggtgaaagcagccactgctgaattagtgtgtacttcattagaaaactaatgtgaggaagattcctggtggaaatatggcagtggtttctgagcctgtgggctaggcagtgcttagttagaatctcagaccctgatcctcccagctcactctacccacaaagaacaacatatacatatttattcttctgccagtgcttgaaatcaagcttgatcagccatggcagtaggatgggaggtgacctagaacagactatgggaaagtgagaagagagtctctgactgggatgatgttgatgtgttcttgaggatgtctttctgcatacacctagctgtctgcaattatcactaaggtgacctagaaaatacagccaaagaaacatatactgaataattgtggggtatagtactatcctgttatctggtaaatattagatatatttcttctctataggattttccgtacattaccataatggatgagacccatccattccctagcttttctgtgatctcagctgtgattaccagattattatctcttgtcccctgtttcaagctctggatgtatatcacaatagctcagatgcattcttatgtctctgtctcaagcttactgatggacggaaattacaataacagagtaatgggacaaaatattctcagacaacatggatagggagccatttgcctggctcagataatgtgtccttctgaaaagttaccatatcaaaccatataacaaccttttcctaatacctcaacattttcattacacgctctgcagttcagttgcactgtacttttctcaggaccttgagcctctcttctcatcatgtttcaatatctggttcttctgatccatcaggtctaagcttaaatattgactctttcctgaagtcctttgtatgtatggtgatcttatgtaagcagatttctcctgtcattctctcctcttcatgccgctttcttcttttctagtacttttaattgctttatttatttatttatttgtgtacttgtccattacttatctctcttcctagttctaagattcatgaaggtagaacaatgttgatgggcttttttttccaccactgacacagtgccatatttatggaatgaatgaatgtccttccctgccttgggaaattttattccactttcaaggcccaacctcatccctttatgcttccccgaagaattaatcacttcttcctctgtgatcccacaaaaatgtgtacatacatctatcattttaagaatttagcatgtattacaataatttatcttgtgttatatggctgttaattcactgattctttcttacctctccaccttgtgagacaaaaaacataatttattgacctttttatccatatgataataataataattcccaactcttattaagtgctttctgtgtgcatttaagttttttttatcaaacatcattctaaactcttcattaaaggttggcagaatgagacattaagcatactacctagggcatagttaaccctgtaaaatgtaaatgaatgaataataaatatctattccaatcttggtcttaaaaacttatgatgaagataaggtaatgtacttaaatattatatactactctttaaacagatagacagcagaaaaattactgtgttcactatcaaattaccctaaaacatagcaacttaaaacaacagacgttttttatctcacacagtttctgaattaggaagtaaggaatctggaagtagcttagctgtaattctaaattatttttggtaaaattatgccacttagaaagataagtctatagattagggttatagtggaataaacattagctcgttagcaggaaccctgcagaattatagtggggaactttttataagaatactgggatttgatatatttgataagaatagtgtatttgacagacatcttacaacaaaaagtgagcaaagtccaagtgtctgctttctttggggaggggaatgaagagtcttccaaaagaagtaactggagacgtcagggatagtctttttaataacttcagatagctttcaagagtagatactgaaacatacatgacccttaagctttcctcactttttgtgaacagccttaagccagaaatagggcttaacactgccttccccatggaaacactgaaattgggaatagccctatggccagatctttaacacctaactgaaatttttgaaagaggcctagacactgggcgcggtggctcacgcctgtaattccagcactttgggaggctgaggtgggtggaacacgggaggtccagtccgagaccaacctgaccaacatggagaaaccccgtttctactaaaaatacaaaattagccggacatggtggtgcatgcctgaaatcccagctactcgggaggctgaggcaggagagtcgcttgaacctgggaggtggaggttgcagtgagccgagatcacgccattgcactccagcctgggcaacaagagtgaaactccgtctaaaaacaaacaaacaaacaaagggcctagagccctcagacctagaataaacttatgcctttacagataaaaactaataaaagcatccagggaaagaagacccttgataaagaagtatgtaaatactgtaaacagaaaagatattggaaaaacaattgtgctagttaacaaactgaaggggggaaaaggtcagtaaaaaataaagttgctctaagggggactcaagtacccaattaaccattttatttttatttttattttttttctgagacggagtctcgctctgtcgcccaggctggagtgcagtggcgcgatctcggctcactgcaagctccgccttccgggttcacgccattctcctgcctcagcctcccaagtagctgagactacaggtgcctgccaccacacccgtctaattttttgtattttcaggagagatggggtttcactgtgttagccaggatggtcccgatctcctgaccttgtgatccgcccacctcggcctcccaaagtgctgggattacaggtgtgaaccactgcgcccggccgctttactcttaagttcacgagaaaaatttatgtcaatgttatagaacagtcttgaaaatgtttttttgatgatgagtattagaatacctccctttaactcaggtgctgagatatcacatctcccagaaggtcaacaaactactcaggtggtgggatctattgtgtaaatgaatctgccagattaactgctccactaaacacctcttctttgagatccatagggacttccctattaaaacacaggccaaggctagtttgaaaatgtactggtatccttgtgcctaaatcaagctcacattgaaggtctctataatgtcctgtactggcctccttatggacttaaagttctactgatatacgtagtgtaggggaggaaaaacttttcttcaaccctcgttggttcagtaactggggccctgcaaattaaactgaccaaaaataggctagcaggataaatagttatgtatgcacccagaggcatccacagaaacaaaatgaagacaaagaaacagacttggaggctttatataccattttaacaaacagcagtataaagaagtggcaagacaaaggaaagggagttcagccttgtaggggtggtaaattgtggattttcctggtatgaaagagtgaagggaggacgttttcttaaacaaaaatttatgccctgctttcaagcaagtagggggagggcacagagcttttctgtgcctgctatttcttgattgccttcagcttaaaataattcttatgtcaaagaggaaaattttggggtggcatactctgatctgtagaattcagtagaatttttagggctgaatctatcaaggttatgttgacacattcaaaacatattcaagcttgcacaataacttctaaaaacagtagataaagaactaaaatcaatagttgaaagcctaatttaaaaaaaagactctctggctgggcgtggtggctcacgactgtaatcccagcactttgggaggccgaggcaggcagatcacctgaggttggaagttttgagaccagcgtgacaaacatggagaaaccccatctctactaaaaatacaaaaaaattagccgggcttggtggttgcatgcctataatcccagctatgcaggaggctgaggcaggagaattgcttgaacccaggaggcagaggttgcagtgagccgagattgtgccattgcaatccagcctgggcaacaagagcgaaactccgtctcagaaaaaaaaaaaaaaaaaaaaaaaaaaaaaagactcaccataacttgtactggtccttacgtcaaataacacaatctgcaatgatatatattagtttaggacctcagggtcataaacaaaactgccattcctgaactttctgtatactgagctctaatactattttcttgtggggttacatattctggacttagaaatctgtgctatgccctctttagtggttccttagggtagattgaaatagttaatcgtgctcactttttcctggtaaagtcaacgatatgctttgacagttatgctttagtgatttacctttttttcacaagttcatgattaggaccttctgaaccttaaatttccttgaaactctacttgtatcccatatgtagatgaccacttgttatattctaaaaatgagttgagctctcttagtcatttatgttcttacagttttaactcagaaaggacttaaagttagaaggaaagttacaattttctcaaaacagattgtgtgacttagatcaagatttattcaagagtaaataccccacttaggacagaggaaaagccattcaacggttttccaggccaaagctacacaccatgatatacacctgtagtcctagcttctcaggaggctgaggcaggagcaggaggatctcttgagcccaggaatttcagcctgtctaggattgctccagtgaatagcaactgtactccagcctgggcaaaaaaccaagatcccatctctaaaacaaaaacaaacacaaacaaacttttctgggccagttattcagagtcaattaagaggattccaactgtcctaaaatcatcatgactctatctgatttaaacaagttttaaataatcaaaactcttccttgggagcctagatatgagccagcattttatgatttaaaatgagatttttaacatcttcatatgctgagtcatcttaagtattttaaaccactttacctatttgcatataagcaatgatggacaagcccttagtattctgactcagctttatagcatttatcagagacttgctacagctttcctcttgacccaatggcaaaagtgcaccttccttgtctcagggcaatagcaactcagctaaattagtgaaggctactgctaactcactcgtagggtctcccttagactcaatggaccctcatcatgtacaatagttgcatgctaaaaattcactatatttctttctttttttactttattcaatctgtagagattgtcaaaattttccgatgccaactgtattgcaaatcatcaccaccgggtattgggaagttttcaattagcaataatcacacctcagaaaaacctcactggctgcatgaagctgaaaatgtacttaaaggatatgcttactattcatgaaattttattgctttctcacttacgtttccttccctggtagtaccataatatatgtactgttgctttccttcttttaccagaagaaggggtaaatcatgactgcctaacctctggccaagaacagtccatgccctaaacagattagaaactcttccagaaaattgagagttagccttgtttgttcatggcgatactgtttggatttgtgttcctgcccaaatctcatgtcaaattgtgatcctcagtgttgaaggaggggcctgaagggaggtgactggatcatgggggcagattttttcccttgctattctcatgatagtgaattatcgtgagatctggctgtttcaaagtgtgtagcacctttccctttgctctcttccttctgctgaagccatgtaggacatgcctgcttctacttcaccttctgccataattggaagtttcctgagacctccctagccatccttcctgtacagcctgcagaacccatgagccaattaaacctcttttctttataaattacccagtctcaggtagttctttataacaatgcaagaatggactaatacagaaaattggtaccaggagtgaggcactgctgtaaatatacctgaaaatgtggaagcagctttggaactgggtaatgggcagaggttggaacagtttggagggctcagaagaagacaggaaggtgagggcaagtttggaacttcctagagacttgttaaatggctgtgaccaaaatgctgatagtgatatcgacagtgacgtccaggctgaggaggtctcagatggaaatgaggaacttattgggaactggagtaaaggtaactcttgatatgctttagcaaagagatggcagcattgtgcccctgctctagggatctgtggaactttgaacttgagagtgatgatttagaaaaaatggcagatgaaatttctaagtgcagcttgctcttcagtgaacaccaataaataagtattcagacagttacagctgaacagggcggggagcagctcctccaagggagtgctgctttaagatctgtctgccaggtatttactgagaaggcttgttaaactacagtttagacaaataagaaacatccaccaggtggctatttggggtcgggtcatgaggtgcatatggcctctgtttattacgtctgaaagcactcaaaccacattcttaggaggctgtgttcagcactccttatcacacatcctgttccttgtcttgttttcagggtcaaggagttacagtctcatgcacaaacaacatacacacagtgcctcagtatttttccatgcttcgatctcaaatgccttgtacataagcttgactgtattgttgtacacccccccatatcgcccccttttttgtttattaatatatactttaagagttcgatgagcttgttcaacaatggcctgaccagttgagttataaggaataccagttttatgttgtatgtgccaatgtttcaatgcatatgcaaatcgagcgctaagatagcgaggaccattatcagtttttatagtttttggaaggcctaaggtcataatagattttaaaagatgagcaattgctctttagttttttgtccagtccagggagtagcatgtttcaggcccgtataagtgtccacagtaacgtggagaaatttaaagcattcaaaggtagatgctgagtaatatcagtgtaccagatagcattaggtaccagacctcatgggttggcaccaagttccaatgaaaaaggggagagagaatgcccttggcaatcaggacaagttttaataatcatgcgagcttgagcaagcgttaaatgaaactgttgtgtaagactgcgggcgttctgatgaaaaaaaggaatgatcagcttgagctcacaaaaaagcaagagagtctgaaaaccacatctgtggttgtaccagagcatcaactcaaacattcccttctgacagggaccaggtagcccagaatgagagcgaatatgtgtgatataaagggggtgatgacgggcacagaggagctcctgcactgtgagaagtagggttagtaggggttcattagtagtgcctttcagatgtgcgagatctaaatgagtaatactacacaccgcataagaggaatcactaattatatttatgtcttggtgaggaaaagtttgtaaggccagcattagggcacctaactttgcctgttgcatagttttgaaatgttcctggattttgtgctgccagttttgcatggcatcttgcacactatacctgccttttttgtttttcctgaatcatctgtaaagacagtagtggcgtgaggcaagggctcagaaacaacaataga

SEQ ID NO: 66 - DNA, 92011 bp, Homo sapiens
tctattgttgtttctgagcccttgcctcacgccactactgtctttacagatgattcaggaaaaacaaaaaaggcaggtatagtgtgcaagatgccatgcaaaactggcagcacaaaatccaggaacatttcaaaactatgcaacaggcaaagttaggtgccctaatgctggccttacaaacttttcctcaccaagacataaatataattagtgattcctcttatgcggtgtgtagtattactcatttagatctcgcacatctgaaaggcactactaatgaacccctactaaccctacttctcacagtgcaggagctcctctgtgcccgtcatcaccccctttatatcacacatattcgctctcattctgggctacctggtccctgtcagaagggaatgtttgagttgatgctctggtacaaccacagatgtggttttcagactctcttgcttttttgtgagctcaagctgatcattcctttttttcatcagaacgcccgcagtcttacacaacagtttcatttaacgcttgctcaagctcgcatgattattaaaacttgtcctgattgccaagggcattctctctcccctttttcattggaacttggtgccaacccatgaggtctggtacctaatgctatctggtacactgatattactcagcatctacctttgaatgctttaaatttctccacgttactgtggacacttatacgggcctgaaacatgctactccctggactggacaaaaaactaaagagcaattgctcatcttttaaaatctattatgaccttaggccttccaaaaactataaaaactgataatggtcctcgctatcttagcgctcgatttgcatatgcattgaaacattggcacatacaacataaaactggtattccttataactcaactggtcaggccattgttgaacaagctcatcgaactcttaaagtatatattaataaacaaaaaagggggcgatatgggggggtgtacaacaatacagtcaagcttatgtacaaggcatttgagatcgaagcatggaaaaatactgaggcactgtgtgtatgttgtttgtgcatgagactgtaactccttgaccctgaaaacaagacaaggaacaggatgtgtgataaggagtgctgaacacagcctcctaagaatgtggtttgagtgctttcagacgtaataaacagaggccatatgcacctcatgacccgaccccaaatagccacctggtggatgtttcttatttgtctaaactgtagtttaacaagccttctcagtaaatacctggcagacagatcttaaagcagcactcccttggaggagctgctccccgccctgttcagctgtaactgtctgaatacttatttattggtgttcactgaagagcaagctgcacttagaaatttcatctgccattttttctaaatcatcactctcaagttcaaagttccacagatccctagagcaggggcacaatgctgccatctctttgctaaagcatatcaagagttacctttactccagttcccaataagttcctcatttccatctgagacctcctcagcctggacgtcactgtcgatatcactatcagcattttggtcacagccatttaacaagtctctaggaagttccaaacttgccctcaccttcctgtcttcttctgagccctccaaactgttccaacctctgcccattacccagttccaaagctgcttccacattttcaggtatatttacagcagtgcctcactcctggtaccaattttctgtattagtccattcttgcattgttataaagaactacctgagactgggtaatttataaagaaaagaggtttaattggctcatgggttctgcaggctgtacaggaaggatggctagggaggtctcaggaaacttccaattatggcagaaggtgaagtagaagcaggcatgtcctacatggcttcagcagaaggaagagagcaaagggaaaggtgctacacactttgaaacagccagatctcacgataattcactatcatgagaatagcaagggaaaaaatctgcccccatgatccagtcacctcccttcaggcccctccttcaacactgaggatcacaatttgacatgagatttgggcaggaacacaaatccaaacagtatcgccatgaacaaacaaggctaactctcaattttctggaagagtttctaatctgtttagggcatggactgttcttggccagaggttaggcagtcatgatttaccccttcttctggtaaaagaaggaaagcaacagtacatatattatggtactaccagggaaggaaacgtaagtgagaaagcaataaaatttcatgaatagtaagcatatcctttaagtacattttcagcttcatgcagccagtgaggtttttctgaggtgtgattattgctaattgaaaacttcccaatacccggtggtgatgatttgcaatacagttggcatcggaaaattttgacaatctctacagattgaataaagtaaaaaaagaaagaaatatagtgaatttttagcatgcaactattgtacatgatgagggtccattgagtctaagggagaccctacgagtgagttagcagtagccttcactaatttagctgagttgctattgccctgagacaaggaaggtgcacttttgccattgggtcaagaggaaagctgtagcaagtctctgataaatgctataaagctgagtcagaatactaagggcttgtccatcattgcttatatgcaaataggtaaagtggtttaaaatacttaagatgactcagcatatgaagatgttaaaaatctcattttaaatcataaaatgctggctcatatctaggctcccaaggaagagttttgattatttaaaacttgtttaaatcagatagagtcatgatgattttaggacagttggaatcctcttaattgactctgaataactggcccagaaaagtttgtttgtgtttgtttttgttttagagatgggatcttggttttttgcccaggctggagtacagttgctattcactggagcaatcctagacaggctgaaattcctgggctcaagagatcctcctgctcctgcctcagcctcctgagaagctaggactacaggtgtatatcatggtgtgtagctttggcctggaaaaccgttgaatggcttttcctctgtcctaagtggggtatttactcttgaataaatcttgatctaagtcacacaatctgttttgagaaaattgtaactttccttctaactttaagtcctttctgagttaaaactgtaagaacataaatgactaagagagctcaactcatttttagaatataacaagtggtcatctacatatgggatacaagtagagtttcaaggaaatttaaggttcagaaggtcctaatcatgaacttgtgaaaaaaaggtaaatcactaaagcataactgtcaaagcatatcgttgactttaccaggaaaaagtgagcacgattaactatttcaatctaccctaaggaaccactaaagagggcatagcacagatttctaagtccagaatatgtaaccccacaagaaaatagtattagagctcagtatacagaaagttcaggaatggcagttttgtttatgaccctgaggtcctaaactaatatatatcattgcagattgtgttatttgacgtaaggaccagtacaagttatggtgagtcttttttttttttttttttttttttttttttctgagacggagtttcgctcttgttgcccaggctggattgcaatggcacaatctcggctcactgcaacctctgcctcctgggttcaagcaattctcctgcctcagcctcctgcatagctgggattataggcatgcaaccaccaagcccggctaatttttttgtatttttagtagagatggggtttctccatgtttgtcacgctggtctcaaaacttccaacctcaggtgatctgcctgcctcggcctcccaaagtgctgggattacagtcgtgagccaccacgcccagccagagagtcttttttttaaattaggctttcaactattgattttagttctttatctactgtttttagaagttattgtgcaagcttgaatatgttttgaatgtgtcaacataaccttgatagattcagccctaaaaattctactgaattctacagatcagagtatgccaccccaaaattttcctctttgacataagaattattttaagctgaaggcaatcaagaaatagcaggcacagaaaagctctgtgccctccccctacttgcttgaaagcagggcataaatttttgtttaagaaaacgtcctcccttcactctttcataccaggaaaatccacaatttaccacccctacaaggctgaactccctttcctttgtcttgccacttctttatactgctgtttgttaaaatggtatataaagcctccaagtctgtttctttgtcttcattttgtttctgtggatgcctctgggtgcatacataactatttatcctgctagcctatttttggtcagtttaatttgcagggccccagttactgaaccaacgagggttgaagaaaagtttttcctcccctacactacgtatatcagtagaactttaagtccataaggaggccagtacaggacattatagagaccttcaatgtgagcttgatttaggcacaaggataccagtacattttcaaactagccttggcctgtgttttaatagggaagtccctatggatctcaaagaagaggtgtttagtggagcagttaatctggcagattcatttacacaatagatcccaccacctgagtagtttgttgaccttctgggagatgtgatatctcagcacctgagttaaagggaggtattctaatactcatcatcaaaaaaacattttcaagactgttctataacattgacataaatttttctcgtgaacttaagagtaaagcggccgggcgcagtggttcacacctgtaatcccagcactttgggaggccgaggtgggcggatcacaaggtcaggagatcgggaccatcctggctaacacagtgaaaccccatctctcctgaaaatacaaaaaattagacgggtgtggtggcaggcacctgtagtctcagctacttgggaggctgaggcaggagaatggcgtgaacccggaaggcggagcttgcagtgagccgagatcgcgccactgcactccagcctgggcgacagagcgagactccgtctcagaaaaaaaataaaaataaaaataaaatggttaattgggtacttgagtcccccttagagcaactttattttttactgaccttttccccccttcagtttgttaactagcacaattgtttttccaatatcttttctgtttacagtatttacatacttctttatcaagggtcttctttccctggatgcttttattagtttttatctgtaaaggcataagtttattctaggtctgagggctctaggccctttgtttgtttgtttgtttttagacggagtttcactcttgttgcccaggctggagtgcaatggcgtgatctcggctcactgcaacctccacctcccaggttcaagcgactctcctgcctcagcctcccgagtagctgggatttcaggcatgcaccaccatgtccggctaattttgtatttttagtagaaacggggtttctccatgttggtcaggttggtctcggactggacctcccgtgttccacccacctcagcctcccaaagtgctggaattacaggcgtgagccaccgcgcccagtgtctaggcctctttcaaaaatttcagttaggtgttaaagatctggccatagggctattcccaatttcagtgtttccatggggaaggcagtgttaagccctatttctggcttaaggctgttcacaaaaagtgaggaaagcttaagggtcatgtatgtttcagtatctactcttgaaagctatctgaagttattaaaaagactatccctgacgtctccagttacttcttttggaagactcttcattcccctccccaaagaaagcagacacttggactttgctcactttttgttgtaagatgtctgtcaaatacactattcttatcaaatatatcaaatcccagtattcttataaaaagttccccactataattctgcagggttcctgctaacgagctaatgtttattccactataaccctaatctatagacttatctttctaagtggcataattttaccaaaaataatttagaattacagctaagctacttccagattccttacttcctaattcagaaactgtgtgagataaaaaacgtctgttgttttaagttgctatgttttagggtaatttgatagtgaacacagtaatttttctgctgtctatctgtttaaagagtagtatataatatttaagtacattaccttatcttcatcataagtttttaagaccaagattggaatagatatttattattcattcatttacattttacagggttaactatgccctaggtagtatgcttaatgtctcattctgccaacctttaatgaagagtttagaatgatgtttgataaaaaaaacttaaatgcacacagaaagcacttaataagagttgggaattattattattatcatatggataaaaaggtcaataaattatgttttttgtctcacaaggtggagaggtaagaaagaatcagtgaattaacagccatataacacaagataaattattgtaatacatgctaaattcttaaaatgatagatgtatgtacacatttttgtgggatcacagaggaagaagtgattaattcttcggggaagcataaagggatgaggttgggccttgaaagtggaataaaatttcccaaggcagggaaggacattcattcattccataaatatggcactgtgtcagtggtggaaaaaaaagcccatcaacattgttctaccttcatgaatcttagaactaggaagagagataagtaatggacaagtacacaaataaataaataaataaagcaattaaaagtactagaaaagaagaaagcggcatgaagaggagagaatgacaggagaaatctgcttacataagatcaccatacatacaaaggacttcaggaaagagtcaatatttaagcttagacctgatggatcagaagaaccagatattgaaacatgatgagaagagaggctcaaggtcctgagaaaagtacagtgcaactgaactgcagagcgtgtaatgaaaatgttgaggtattaggaaaaggttgttatatggtttgatatggtaacttttcagaaggacacattatctgagccaggcaaatggctccctatccatgttgtctgagaatattttgtcccattactctgttattgtaatttccgtccatcagtaagcttgagacagagacataagaatgcatctgagctattgtgatatacatccagagcttgaaacaggggacaagagataataatctggtaatcacagctgagatcacagaaaagctagggaatggatgggtctcatccattatggtaatgtacggaaaatcctatagagaagaaatatatctaatatttaccagataacaggatagtactataccccacaattattcagtatatgtttctttggctgtattttctaggtcaccttagtgataattgcagacagctaggtgtatgcagaaagacatcctcaagaacacatcaacatcatcccagtcagagactctcttctcactttcccatagtctgttctaggtcacctcccatcctactgccatggctgatcaagcttgatttcaagcactggcagaagaataaatatgtatatgttgttctttgtgggtagagtgagctgggaggatcagggtctgagattctaactaagcactgcctagcccacaggctcagaaaccactgccatatttccaccaggaatcttcctcacattagttttctaatgaagtacacactaattcagcagtggctgctttcacctaggtgtcctaagcttaaagcagagatgcaagttcattaactgctgtctggtaaaggggacaaatgtccaaaagcgatccctgcacggttctgtgaattataaacccttgtagaattgggaaaagagaaaacgattctcaggttcctgatgtggagaaatgtatatggtgcctttggcagtgactctgaaagactgaacatttctacttgctgtgaacaagaactgacatttaaccagacacatctcctgacaccaacatgtatgtttttcctttcttgattttatttcattaactctcaccacatcttcactaccctgaatgctagaactctggaggtagttacatttctgacctttaacaccactgactttcacaaaaattaaaacatttctcccaaatttcaaacactaccaattcctgcatagactcagggtagtcttgtttgaatttctcattgcttctagatgtcacttggaagtccaagccctaatgtgatctttttctacctgccagaaacgcggcgctcctatgatgacattcatcagcctcattagtcatgctttgggaagcatagaggggaaaaaaagataaaaacctttgtaaaagttactctgagtcagagacctgataatgagacacagaatacattttatatatttcaaacttcttggagatagaaatgttgcatctttttaacaaatgcattaataaaaaattaccccagttgttttcaatgttgtacagggaccaggcagaaaggatcatgttctttgcatttcctctctgagaagaaagtatcccagtaattgctttgcatcaaagaaaagacacattttttttttaaataatgctggaaattgctaagtatgaggaagtggagactttcaagatagccatattttgaaagttatttaatactgaataaaatggagaatttgaagaatcttgactttattaaatagacaatgaattcagaggtgatttcttctgagttggagttctggaaataaaaacaacttgccaatgatagaacttctgaaaaggaaaatcccaatattgttctagtcttagactggtggggactaagttagaagcatctgataaataaaagcacaaatttttaggaaaaattagttttgagtccatttttcctttttgctgcactaatgctatactaccatcatcatcactgttattatcaccatcatcaccaccaccaccaccaccatcatcatcatcatcatcatcagtatttgtggatcaggcactgtgccaagtacacattttgcatggtctcatttagtcctctccaatgatatatcaatatcagcctcattttacagttgagataacaaagctgtaatagaaattaggtagcttgcccaagatcacacagatgccaaaagggagagccaggattcaaactcagactgtttggttccaaagatcttattctatgcctcttttctctagattatccctcataaggaaccaaattcattctaataagctagtaagctattatatccctgtccccttttttaataccttgtgtagccttctgaatattttatttcctacaattttaaaaacttccatatgatgggacactcaatacattttttttttacaactggaatacattcagagagatggaaattctaattttttttttaaaaaaggctacagattctattgtatatattctttgaatatttcaaactctcttggctatctctaagtcccacttctgtactccatactgtaggatagacctctccccttaccttcctgaaatatctccctattttgcaaagcaacaaagcttcccttacgtttttttcttttactgaattttaagaaaattctgattaatttaaatcagtaaaataattaaattaaactaaattaggtaaacttcaattttagataaataaaaatgtaaagaatcatctaaatttcaggtctcttctcatactcaatacaaaatgtaagatgtatagaagaggaatgtaggaaggaactgataatcctcccccccgttcattctccctttcctcattttaataataaaatctctgtcccaggttttagaaggcatggctgctcagcaagaggttcctctgcagttaatttcttaccaaaagaatatacaaacttgatgtgtgcaacttctatctcattttattcaaatgtatgtgcttgccctttacttttctcttctccatcccacaggttgaccactatgaagaggacactctagggaatggcagaataaatggtagaataagtataataataatataaaataataatagagtaaaaataatggtagaataaatataagtccctggacaatttcatgggctacctcctgatggctacaagaaagaaaataaattatcttattggaactacagtatttgggggtttctctgttacagtggcttagccgacaccctaatagttttaaattcagtaccagaatattatggactaagttgtagacccccaaaatttataggttgaaggccaaagccccaatgtaactatattggaagatagggcctttcaggagataattaaggttaaatgaaatcatagagaggggccctaatcttataagactggtgtccttataagagaacactggaacacacagggagacattaggggcacaagtgcctagtgtaaggacacagcaagaagggagccatctgcaagccaaggagagaggcctcaggagaaaccaaacttgccaacactttgaccttgaacttttggccctcagaactgttaaaaaacaaattttggttgtttaagccacccagtctttgctatttgttatgcagctctagctgactgatacgtaggaatggaaaagtgccatcataacaaaaatctaaaatatgtggctctggtattgtgttgccaggcaaccggcagtgtggaaacagatattgcaggatgaaaaactagagacccttgttatgttttgaccaatcactaggtaaaactgacaccagcaacaatttgaaaggcagactagctatggggaaagcagttagaaccagagtggttaatgtatattggtggctccttgctgatgtttttagtgaggtactatcaaaagtagttgctgtaagatcaaaaaataaaaagtttgcaagtagataacaccatgccctgaagtacaattgcttctgcattcaagggagcaggagatgtgactattattcagttttgttcaatagtcaccactgtggctgggtgcagaggctcacgcctgtaatctcagcactttgggacgccgagatggggggatcaccaaaggtcaggagttcacgatcaacctggccaacatagtgaaaccctgtctttactaaaaaatacaaaaattagccagcagaagcctgtaatctaagttattcaggaggctgaggcaagaaaattgcttgaaccgggaggcaggggttgcagtgagccaagattacgccactgcattccagcctgagtgacagagcaagactccgtctcaaaaaaaaaaaaaaaaaaaagtctccattgtgttactggtcagacaatgggagtcatttcggcagaaaagatcagatgaagaatgttgcatcaccacttaaactcattgttggagaagacttcaagatggctgccattaatttgagggacagaggtatgggccaggcacagtgactaataaataacacattgctggcttaaagaactataactagaacagctctttggctgtggctactttcacatgaactgactgaaagcaaatgaaccagaaacctctagtatttttgataaaatgatgtcaccaatgctatgatgacccttaagatgtcagatgaacttcctcctcccaaaattcatagaaaattaccacgaattcagttcggatgctgagactgataatgccacacacacaagaaatgggtataaaaaggtttattactcacatactgagactttccagggagatagggcaggctcccaggagggtcgagaaacggcttaattggtttggcttttatccgtcttagagtgtgaggctggggtgaagcttcctgcatgcatgccagggcttgcgtgatttgaacttcctgctggggccaaaggaggaggcacccatgcttccatcagcttgcccagatgtgcagcataagggagaagggaaaggtgagtcttgaaagatgtcagcagtcaaacattaaaaacggcattgacgtctttattacagtcaaatgaactaaaaccccggcctataaaagcgtatatttttcagtctctaaggcaatctaggtctaaaagtctgcaccagcaagcaggggctgcaaaagctgcgatgtccctcaaaagtttcagacggggccacagaagctgacgagcaagactttcctagaggtcaaactagtggccacagaagacaatggacaagggagtttctcctagatagcagattcatgatttcaccaaggaacactttctgctgggcaagggatctccatcatgcctgctcagcagattatcacggcatgggccattggctgctatcatttttgtctttaactctagtattcattcccctctttttagctttagtaatagaaccctttccctggagttttagtagggcacatgtccatctagttagagacacgtcccaggctttcttgaagctaggtatagctatatagtaagtattcatgaatggacggtgggcagaagtgatggctgtaatttcctaaaaaggaaatggcttgctccaccttcttcttttttcacaggctaggaagtcttgagccagctttgaccatggaaagaacaatacccttgggtattaagagaactaacaaggtagatgactcctatatcccttgaataccttgtgaaatgaagccacttctggattgctatgtgagaaaaaaataaattatcttacatgagccatcatattttggggtctctttgttacagcagtttagatcattttctgatttatacaaaaagagaatgaaaacattaagaaggtaagcttatttaccttttatgaccttaaaatgtcctctgcttgttcttttgggttttacctttaacaagtataaataaggtgcttcaaatttaattggctgtaagcaagtaagaccttaagactacatgtgaccttatgaattcagtgtgcttctccccttttccaaaaatcaacctacagaatacagttgcatatactttttcgggataaatggaagcgtttagtgtaaatgcatgaatatcaaactgataaatgaaaactaagattgatatatatcaacttccccttttttcaacacaaatgtatatccatgcactattctaatctactactctgtaatcaattaatcatagacaactgaataaagataaaatggataaagcagacttcgtctcccataatgtgatgcagagatgattatttctcggactcccagtttcgtgttactctatgcttcagaatagttcactgtgttgctaagacaacaaggatgctgcaaccggaaactgggattgaagtcaaggcactggagctgcctcaaaagatgtcataaatagtgtgttcaaggcctttttcacagtgaaactgtaacttttgaattagaaaaaaaattattggagccaagcacggtggtgcacaccagtaaccccagatacttgggaggctgagggagggggatcgcttgagcccaggagcttgaggctgcagtgtgctatgatcatacctgtgaatagctactgcactccatcctgggcaacatagcaagatacccatctgttaaaaaacaaaacacaaaaataaacagaagaagattatactcaattcaacacctttccacagactatgattttcagttattcacattctaagattaagaaaacattggcctgtaatcccagcactttgggaggtgaagtgggcagatcacaaggtcaggagattgagaccatcctggctaacacggtgaaaccccgtctctactaaaaatacaaaaaaattagccaggcgtggtggtgcgtgcctgtagtcccagctactcgggaggctgaggcagaggaatgacttgaacccaggaggtggagactgtagtgagccgagatcgtgccactgcactccagcctggcaacagagtgagacaccatctcaaaaaaaaaaaaaaaaaagaaaaaagaaaacattggtatgtggactaaaggtcaggaaaccatcactccatatatacatattacagctccatggaaataactgaggggaacttgtctttaaattccagtttacctttattctaatagaggcatgtctgaagagtatcagaagaaaacaaatgaaattaggttgtcagtttttcctccactaacgatgtacatctcacctaaacaaaggtttgattctatgtagtaaataggtttgatgttcactgagacctgcgatttgatacttggaatttgagtttataaaaagatacaaagaaatatggtcttctcaatcaacttttgataaaggcacagaaagctcatcagtagcaatgatgtgagctgggttgcatctccaggtttgtctaagcaaactgcacaatggcagcaatcctcctggttttaatactcataacatcaaggcaaggacaaagaaaaaaaaatgcttgaactgattttgttgtttttttctgacctacaaaaaaaaaaaaaaatgaaaacagcgtttcactaagctgaagagtgtccttcacatcatgtatattgtattgcacacaaacttttttaactccgtcaaaaacaacaagaacagatgaataaggaagcccagtgctttttgagatagaagccttcttcagaatcacctccctctcttaagaagtaatctggtgaaaaataatggttaggcaaaggcaggtgttggaggatatgttttcccaatcttttagaatctcttgcttaagagacacagaggtgactggagactgagttaccagtatactattcattttccaagcagacgtcaaaagatactctttaatagtggaaactgagggttacacagtaaggttcagacttcagcaggaatccttgttgtcaagtaaaagtttaacctagcagaagcaaatgagacccagatgtcctcaccttttttttttttttaaaccctggtgttctaagcataaaaaaggaaatagaaaataacacagaccactctattttaatatttttaagtagcataaatcataatggtttgtatactacactgtacaaataatatactgttacttttgaaagaaaatgaacttcttatagggttttctgaaatagttactccatacagctaagatcttgaccctttagccattgctacagcagatggaatacaagctttgaggttccaagtcttccagttgtgcctgtttctgttgccactgagggatgagcctctcagagccctgtcgtggccctgtccatctcctgcgccaggaaacacaggttccgcaggtggacgcgtgccgatgagtacagcttctgtactttgctttctacaagcctccttcccctttaagagaacttgcgcttcttcatggcttccgccttgaccgccaagctcttggcacagatggtcaggaccacaatgagaacgcccaccacaaatgtcaccaggggccagaggaagcaatgcaggaggacaatctcatcatgagtgcgatgcagaagcacatcatctggtctgcaagacaatggagaataagaaagaaagggcagtcaaatgccttggcactgaaaaactctttacaacctaaagccaaacttgctttccataaccattattgaaagtaaaggctgcactctgactataaacactgtatttttgtgcttcaaacccattacagaaagttttgagctcttgagtcaagtaattggtgcaaatttatgtattaattataatttacatgttacaaagtgtcaaaaatgtatctcttatgctatgatttttcttcattctaagttacttaatgtattccactttctcattcatcctctaatgtccattggtcaaggggcttgaatcagtcaaaaaattactgatgggtgagcattctccaacaaatctgaactagacctcagctcataggtgtggcccaaatgatcttaattcagataaaaaaaaaaaaaggtcagttaaagccactgcttgaatttagtcagaaagacagctggtgtaattctcagggcaactcagcttcactatgtaagctacaggtttttattaataagcagacaatggctgaatgagtgcctttttccatgcttctgggtgaaattagccgtcattttaaaacactgaccactttcttaataaatcttgcaaagtcctagcaatagatttctgtcttgtcaatgtgaggctctatttttcaattcctgcattggtcccattcacagaaagtgaagatgagatgtgctccacaagccatgatctctaatcttcggccattagaaagagatcctggaaatctaacttttttcttttttttttttttttttgagatggagtctcactctgtcacctaggctggagcgcagtggtgccatcttggctcactgcaagctccgcctcctgggttcatgccattctcctgcctcagcctcctgagtagctgggactacaggcgcccgccaccacgtccagctaatttttttgtatttttagtagagacggggtttcaccatgttagcccggatggtctcgatctcctgacctcgtgatccgccctcctcggcctcccaaagtgctggcattacaggcgtgagtcaccgcacccggccggaattttaactttttaatacaagaggtttacattttgtaagatatttccgtttcatccacaaggtttgccctgctacactagagtagctatgtttcctccaggaaaaaaatgaaaataatgcagaataatgagtccaactgcccttaagaacatcaaagccttcagagcacaagggcagtgcatctaacacagaaatgcattcctgaaaatcactcattagtcacagctctcataattcagaacccattttccctgaagattgacaaagggtgttgggtatttctttttacttatagtggagctatcatgtgccattaacataaatagttttacagactggctttgaaattacaaaatccttgcattttttcctttgatgcacagtgtaatttcaaattttgcacataatacaagatttctattgatgttttatttcatagtatttcaaataaaatttatattaagtaaacgcagtcattttaacaattaggcaacaatcatcccagctttcagaaattgcctttttttggaattcttatagcacgaaattatctccaagacttgtgctaccattagtatatgtgtatacattgatgtatatattcttttcttctgtaaggcccattagggctatgacattgtcattgctgctattctacaaatagatgttgctactgagaaagaggagcctgcctctgttgcagccttattatccatgcaaattttcaagaaacttcatgcttgtctaaaaagtctaaaaaagtcaaggctgaggtctaaaaaaagagtcaggacacaggatagaaagaatcatatttaagagtctgaaatccccatcccagcactgccgtgattcttttcccaggtacagtgctcatagctgtcaaaaacctctccctaagtgtgagggaaggtaaaagctgtctctcaggttgctctttccttctttctgtgaaggactattatgctcctccataatctactgatacaaaaatgagtcttaaattcttcatcaaaatggctaagggtgcacaacaatgtgaattttacttagtatcactgaagtgtacattttaaaatggttaagatggctgggcgtagtggctcatgcctgtaatcccagcactttgggagacagaggcgggcaggatgcttgagatgaggagttcaagaccagcctgggcaacatagcgaaaccctgtctctacaaaaaactacatgcctgtagacctagttatttgggaggctgaggtgggagatctctcgagcccaggaggtcgaggctgcagtgagccacgatcaagctgctgcactccagcttgggtgacagagtgacaccctgcctccaaaagaaaaaaaaatggttttgatgttaaaaaaaagaaaaaggattcagggtgagggacttggattttttaacattattttaataaatgtgcatgtaatttccataagtaatatgtttttgcaactaattttctagtaaaatgcttcagcgtggatcctcgtttgtattcatactccagtcactcttaactgatgttgaatgctttcacaatattgtgcaattgagccagaaaaatagcccagatgacagtggtgggaatcatacatattttctgaaacacagtttgaagaacatgtaccaaaaaagaatgtgagtaaaaagaagaggaggagagaaaaataataactggaaaatgctggacccagatatttgttttattcagaaacttcttggcattccacctcctaccagagcgcttggagtaaaactttattttaatatcttaaatgacaaaacaacatcagtccctccgagttagctatactgaatttgtaattacttcaaaagcgttctttgaggtgcaaatgttatatataaatgtacacatttctttaaaaataattcatgtccgtttccacttcctacagctctaaggtgctccataatctccttcaacaggaaaatcatttctctgcacagtaatgctcacgcttatcattcagttttttgatttagtgagattatctctaaattgcttcttgtgtcctaattaaagtctagctcattcaaactgggcttgtagtgccttaattgaaggcactcccctgtctcagtttcctccaattttatcaggcaggcagttttcagattgtttagccaaaaactatttgcaaaggggtttgggcttagaattcaatttgccgtaattatatggtagggaatgaactacaatttctttataaataatcactgtttgccacatgtggcaaactggataaatggcatgacgggagctgacataataaaaccaggatggtgacaagaatatgtggacaataagcaaaaaaggggtaattactctatatctagggacttcaaaaaagcaagcaagagatttctcttggagtatgcaggaacacaaatgaaaaacacttttaagccctgggtcagggctacaaaagaagagtaaatactgtgggtacccatagaaaaacttccctaagcactggcactaccctgagtcaaggtttgaaaatatgtggtgataataatgacagtcagcatttattatgtgctttctatcctcccggtgctgtggtaggacattcagactcatttgatccttaaaatgaccctttgctcaagtaatttttaattttcactttataatggaagaaactgaggtaaaaaagattagtttccccaggattacacaatttaaaataatgacatgatttgaaaccctgtctgtaagattttttaaattgtactatttatttacccttaagccagcttttctcaaatttgaatcacttaacggtgcttgttgaagtacagttccctggttttcaacccttgatttactataatcagcatctgagtttgtgggatccagaaatctgcattttggagaagctctgagatgattcttatgtgcacttcggtttaagaagcattgtgtaaagttctaatagttaaaaaaatgaaatatgaaatgcaatgctacttagctagctatttcccaaactgcctaattgacacttatgttcaggtcattttctttttttctttttttttttttgagacggaatctcgctctgtcacccaggctggagtgcagtggcacgatcttggctcactgcaacctccgcctcctgggttcaagcgattctcctgcctcagcctcctgggtagctgggactacaggcgcctgccaccacaccccactaatttttgtacttttagtagagatggggtttcaccatatttggccaggctggtcttgaactcctgaccttgtgatccacccgcctcagcctcccaaagtgctgggattacagacgtgagccaccccgcctggcctgttcaggtcattttcatgatctctacatatttttgtgtagagatggggttttactatgttgcccaggctggtcttgaactcttgagcttaagcaatccgcctgcctcggccccccaaactactgggattatgggcgtgagccactgcgcccagctaaaaatgctttttaaatatcaaatgcatcagcctagtttttgacaatggctgaagagcaaatcgttcaagactcaaatcactgaggtgcctgaagtgtcctatgtttctgggtgagggtgtcccatcaggttagattcctaacatggaggtggcacaatgatttttttataatgaaaaccaaagaagacctgacatgtgatctttcccagataactttgcttgaggctgggtttcagagagcctcagaaagtcttctacagaaatgtcaagtgtataaacaaatctttaaatgagatgccacaagtgaaagaggtgcctatgtcataggttttcaggcaaaagttactgaccacgatatgtaatctagaaagccttgatgcgagtattattcagtgttttgttttgtttttgtttttttgagatggggtcttgctctgtcgcccaggctgaagtgcaatggcccgatctcggctcactgcaagctctgcctcctgagtttacgccattctcctgcctcagcctcccgagtagctgggactacaggcgcccaccaccacacctggctaattttttttgtgtttttagtagagacggggtttcactgtgttagccaggatggtcttgatctcctgaccttgtgatctgcccacctcggcctctctaagtgctgggattacaggcatgagccaccacacctggcctcaatgttttttgtttttttggcaaaactccatgctatgggatttctggaaagagattgtattaaaacacaacccatgaaaatatctgacttgatctattgattcatgacttttaaaagatttccaagatgttttctactgaaagatgttaacaattaactgagaaaagtgttggatttggttttggcataactgagctgatcttactgagagtaattagccagtgtgtctagttgttgtttgaggcaatcgtaagaccttgccaagagagcagcagagcgtgcttgtcttcctatgcaatcacaggaaggcaacctaaaagctatatcaagttatgttataaattatagtgggactacagagaccagaacacagagaccctttgtagtattctttttttttttgagacggagttttgctcttgtcgcccaggctggagtgcagtggcacgatctcggctcactgcagcctctgcctcctgggttcaagcgattctcctgcctcagcctcctgagtagctgggattacaggcgtgtgccaccacatccggctaatttttgtacgtttagtagagacaaggttttgtcacgttggccaggctggtctcaaactcctgatttcaactgatccccttgcctcagcctcccaaattgctgggattacaggcatgccctgccgcacccagcctttgcaatattttttttttttttttctgagatggagtctcgctctgttgcccaggctggactgcagtggcgcgatctcggctcacctttgcagtattctttacattgaactgctctgttgtggggatccactcagaactccagcattggtttcaagattatcttaagctgaagacattttagattcaacaagtgctaaacaaagctttcttggatcttcccttatctgactaaaagcagtagcttctgagatttgaggctactgtaaatcccttctccaggggaattttgtggccctgagggagacagaaagaccactaatactcataaagaaaaacattaccactaacttgtcctcctaaaaagccatttgtccttcccataggaaacttttcttcctctcccttttccctactaagttaggtagacaagccctgagtctaaacacttcttatatactactgtgaagccccatgctcataaaaatgttaacattgataaaatgtgtatgctttttctctggttaatttaccttttgtcagtttaattcacaggccccagccactaaacctgaaatgtaaaggaaaagtattttgtttgtttgtttttgtcccctacagtatcatgagccaatttttgcccactggggtctaccaatgatattgtgataagggcttttaaaagcttgggaggtggccatgcacagtggttcatgcctgtaatcccagcactttgggaggtcgaggagggaggactgcttgagcccagaccaagaccagcctgggcaacatagggagaccctgtctctacaaaatataaaaaaattcgatgggcgtggtggcatacgcctgtagtcttggctatttaggggctgaggtgaaagtatcgcttgagcctaggaggttgaggctgcagtgggcctacagtgagccaagattgcaccacggcattccagcctgggcgacagactgagaccttctccaaaaaaaaaagatgaaaaagaaaaaggctagggaggtattataacaagattatggtttgctccacagatgcttcctatctatgaacgaaaggctgattatagatgtatgaatgttataaacagccttacattttccttagctgttttctcaaagtaggttaattttaagtactaatgtttaattgtacaagagttgctgcccatcaagcttgcctattcttcatggagaaaattaaatcaagccccaaacttgcagtttttggagagaaaaatttgcattcagttttggcaggatatccagaaaactggcaggtatgttattttggagaaataaagtgttatatatgtatctcaggtacagcaaggaaaaaaataattcagtagcactagacccatgattaggactacaaatagaagttataccccaaacttatcccacaaactatcatttaacagcattaaattcttacggtagctgggtttggcaaatgttttcctactgattaagatgaccgtcccttcagatgcagcccagtgaagtaattgtctcaaccaagtctcctaaagtagaggcctggggaaaccgtcgccactctgtgctcccagagtaatagactttttaaaaggttttactcacactgtgtggtaattattttttatccatctgtcggttttcccaatgtgattcttaaaaccctgagatcgggggcctattaaggataacccctgccggagatgcttcctgagttctcagaaataaagaggggtaatcatcaagacctgcaaaccagaaggatgcttatgactttctgtcttttttaaaaaggcaaatcaacgaatgaattttattctaaagtcagcttggcacaaaaaggctttattaattagaaatcctttgttgctcttccattgaaaatacaacagaaagagaattttcaacctagttagatattctctaagatcagatctaagaaactgcattaaatttacattaaatccttttcctcttccatcgacctccttgagctgctcaggaacctggatcagttcaacgttatctccacaccagagaggaggactttcaattcattgatttcatcagaagtgcaggattttgaaaactagctgacagccttgttccagaaattcctgagaggtttcctttaagaattgctgttcttcagagtaatttggtctgtggtttctctgagttaccaagttatttatttcatagaggactataagtgtttttctgtccaaacatttaaacttaaggtttaagcagaaataaactggagacaagaagacatttacattcttcatttgagacagattattcttataatagttctcaccttgttaacctactttgtagttccaaatttgatgtgaaagttcaatagtttaaattcgtatgggagagatgaattattgattcaataaattgtgttgggacaatacatgccatttggagaaaaaaacagcggctcctcattttattctccccacacttaccaaaaaatccagatggatgagaaccttaactgtataaaaacaaactatgaatgctctagaaaaataacttcgttaaaaaaaaaaaaaaaaaggccaggcatgctggctcacgcctgtaatcccagcactttgggaggccaaggcgggcggatcaagaggtcagggggtcaagaccatcctggctaacatagtgaaacctcgtctctactaaaaatacaaaaaattagatgggtgtggtggcggccacctgtagtcccagctactcgggaggctgaggcaggagaatggcgtgaacttgggaggtggagcttgcagtgagccaagattgcgccactgcactccagcctgggcgacagagcgagactctgtctcaaaaataaataaataaataaataaaaacccttggagtttcctcatttgtaaaatgggaaataaaaccctcattaagaagatcaaatgagggtatgtatgggaaaagtttttttttttttttttttttttcttttttgagacaaggtctcactctgtcgcccaggctggagtgcttaacctcctgggctcaagcaatcctctcacctcagcctccctagtagctgggactacaggtgcccaccatcacgctcagctaatttttacaattttttgtagagacaggatctcattatgttacccaggccagtctcgaactctggactcaagcaatcctccaactttgggctcccaaagcactgggattacagatatgagcgaccatactcagctgggaagcagttttctacaaaaccctacacagcataggtgacctcaaatctagtccaagtccaacttttccaaccttgaagaaatgaatttgacaaccccaagagtatgatacagaaccagaaccttttaaaatttgtagtatttttttttttttttttgagacggagtctcgctacgtcgcccaggctggagtgcagtggcgctatctcagctcactggaagctcccctcccaggttcacaccattctcctgcctcagcctcccgctgggactacaggtgcctgccaccacgcccggctaattttttgtatttttagtagagacggggtttcaccgtgttagccaggatggtctcgatctcttgacctcatgatccgcccgcctcggcctcccaaagtgctgggattacaggtgtgagccactgcgcctggcaatctgtagtattttcaaagctcaaagttgaagaaaagctcatattcattgtaaaagtcaattacacttagaactatctgcaaattactgcctgtatctatttcctattgctgctctagtagcttaaagcaacacagatgtagtttcttacagttctggaggtcagaggtttgcaatctgtttcactggactaaaatgaaggtgtcagcagggctgtgttccttctggaggttctaggagagaatctgtttccttgcctttcccagcatcctttcctgcattctttggctcatggccccctccctggcatcactctaatctcctttccctgatcacatcccctactactctctctgatctcatctcccccttataagtatcccatgattgcatttggggcacactcaggcaatccagtataatttccccatctcaaaatccttaatcacatctgcaaagttccttttatcatacaaggtaacatggtagcaaagtaaaataacataaatccatcgggattatggtgtggacatctttgggggccactattcagacagccacagtaccataaaccgctctcctatactgtaatcagttccttactagcacaagttttctatcccctttcccagttagtcattcagaattaaatcatcaacagaagtatttaaaaataacctagggaataaactgttttctattaattctattttataactcagatctacaatctgagttataagatttacttttttcattcttttttcagtgtttgccttttatgacaggcatttacatacaagacacacctgcccaaagattagcacacgttatgaaatacttctctttccttcatccttttcctacattgtgcctttgcctaggtagatctccactatttccaccactatctgctgttcctaaccacagcattaataacactttgcaattttaatatccatcctccctaagtgcctccttactttttatagaatatcctttttgtctttgtaatacatctttgatatttccttttcaactttattttttatcaaatgtgcccaaagattcttggttcttctttactcagttcttttatgatacaatgtcactagcaattctaaactgcatattcactttagccccaatcctatgccacaccatgtttgactttcctaaagtttttgttcattaactatcctttgaatatttttttttaattctgaattttaaaattgaagtagaatttctgcaaagagaaattcagaggtaacaagtgcatggtttaatcagttcttcttgttgttttgatactgctgatttctgatcctttcacttctattttataaaaacatttatccaacccattctattctttaaaacccacattcttccttacaatgatttctctcatatttgaagagcaatactgtattattaaatcagatttcatccagaaacggggaaatttaagggtgagccattttgtttccaaagaaagtctctcagaactcattttctatctcagcgatgcctagtgctaaagaaacatcctcagaaaatggaaatgttgatttaggatgttaatgctgaaaatatctttcttttttagaattccttaaaggaattaattcttaaacatcaaaaggtgcttgctgtgatatagcatgtctgataatatagggctacacaagggacttctcaagcaagcccgggctggataggactaaaaatcaaaggactaattatatcaggacatcccatattcccttcactgattaagacaaaacaatggggccccttattttactttgtgaagccaaattaacaaagctgaaatagaagttctccttataagaaaggctacaaacactggaaggattagtcacagtgagcaaaaatcaccgatgaacccaaagtatgcatatgagcagggattccattgggtatctataaggctggcaagagctttagaatttggttctcaaggaaatgaggtgggtaaggaatccccccaaatgtcaatgtatcttcttaccatctcaacaatcctgggtacaatgtgcacagatgaaatatggcatttaaaaggaggtcaagaaacattttcctcatgatttttgatataaaatcaagatggcaacaaactctggaaggattaatcacggagcaaagttagcacgcgcctttgtctcaaaatcttcaaaatcttttaaatgaaataagattatatccaagggcctaaaagcaggtgtcttctaggtttgtccaagaccataattctaaaatcctggaatctgcttcattgcttcaggtgaatgaagtcataggctacaccaagcatagtgactgcacacatataaaaagctgctttttgaaagatcactttaacaaccacattttgtatcatttccctaagctgaatcatgttctcagccctcgctccaggcaaagaggacacagaaaagagatataatcacagatcacacacttgcaacgtgggtgtgagaaaccgtttccagggagaaaatgacaaacatactgatgcacccaaaatatgcatatgagcagggattccattgggtgtctgtaaggctggcaagagctttagaatttggttctcaaggaaatgaggtgggtaaggaatccccccaaatgccaatgtatcttcttaccatctcaacagtcctgggtatgatgtgcacagacaaaataaggcatttaaaaggaagtcaaggcacattttccccatgaattttgatataaaatcaagatggcttcttagataggacaattgaagtggggcatagcaacacgggctagctgagtctcccatggctcaaccacaaatgcccccataaagaatggtcggtggtctcagtgagtttgttcaactcccaataacctggatttttttcccagtattcccgctcctagaagagcatcacaccctgctaagctcaaagtgagagctcagtaaatgttagtggaataagaaaagacttcaaagaagaaagtgaaaatccagtgccatagagtgtcagttaagcaaattaaggtagcgggcagggaacaagatcttagatttcatggaggttttttccaaaggccacatatatttgtttgaaattgcaaatatcatggatgtatttgcataaacaggcatgtgtatttgcttgtgtttttacagactgtgccaactattttcagataatttccaagaatgaatgatcatatttactactcattctgtcattactgttcttcttcctgcttcatcttttaatcgatctctatctagcccagccaaccccaatgtgtgcataacaactgtcacaagcagttcctgttccttcaactcacctgccccatccctgtttaggtgctttgtcctccttgaggagcctccaatgctgctgctcctatacatgtcacaatttcagacccagcatgctaggaactgctgccagcgcctggttaagccaatactaaatggggccaaacaggtgaacagacattctgtctttctccaaacctctgaaaaagattctgcaactcatctcacagtaatttgttccctaatttactcttaggaaattgtcgttaaagtctgattaggttaagtccaattccctgtaattagatcctcagtgaagaaaaatctacccatcaccacaatttattttcttttctatagctccagcatcagtattgtaccattattttggcagctctggagaaaggatttgaaaaatatatcctgggtgaagggaaagtcagctgcatgtctttctgaagaaagcgctaccttctgttataatatcatcattctagaagattcccaattgttaacagcctatttcattaaagtgtattacacaccggtttttttaaattaaataattagcagcttatatatattttgctattgcttgtaggaagacagaaataggctagcatttctatcaaggctagcaatgaatcattcatcctaacccctaaattatatagtaaagaatactttactatacattcaatttttacattcaattttgttgtagtctgtcaagcaatatctctcagttaaaatgcattaaacatcttgaaatgcctttgcaaagtaaaattagctaaattaattttgaggctcttttcctaaatgaaggattacaaatatgtttggagaacaaaaatactatacagaaatatgcataacaattaaagtggtgacttacagttcaacaatagaattttaaaacttgagtaatgaaaaagaccctatcagtcttcaagtttctcttagatgtgccagcagcttaactttatcctggtagcatgtgatattcaaaattcaagaaaacacatgtaaataactgtcagattggtggaataaacatggtaaagaatttgaaaatcactaaaaagtatagccacaggtattcctacagaaacctgttttctgctctttcaccttgatactagcattaatgtcccagataggtgcccctccttcatctggggtcccatagtgaaactgacatggagcagagctgcacacgacccaagacagacctagacaggaaataaacattggttgttacaagcttctgagattttcaggttgttaccacagcctaatttagcctaagctcattgacacacaccaggaagggctgaggatccaatggtttcactaaggaaacagccatgatggtcaaaaataatcttaatctaaagcacaaaaaagtttagagatgtttatttgggcattttaaaagactttcttggtactcagctctcttccattcagccatgtgatatttgcagaacaactatgatgtagcagggaccagggccatatttgtgtgttggctctcactagtcagctgtaaatccgagggcaggagcaccattttcccatgtttatattcccattacccagaataatgcttggcatgtgctctaggtgctcataaatgtttgttgttggcttactgttgaaatccatttcaaaatgcaatggacatttgtacaaagtgcagaggtaatattaaagaaggagaactgaagtttgcctgggaaaataaaaaggaagtatcttttcagcagacatgaaagaacagattagagtttggtgaaaaaatggggaaagaatttcttggtagaagatacagcacaaatgctttggtctggcatttcagattattttgccaccaacaacgcactttaaaaaatgttataatagcaatcttattaattagatttaatacagtcccttatgttatcctaacccaatatggactagaatcctggctgatgttagcagcaccagagcagaatgcttaagagaacagactctgtgaatctaattaatgccactaaattgtgagtctaattaatgccactaaattgtgcactttaccacaatttttaaagattcaccatggttagttctgtaatctcagtgtggaggtagaccatattgtccaagttttacagaagaggcttctggaactaagaggtttgaatcctggctctgtcacttgccagctatgtgatttggtcatattgcttaacctctgtgttccagttccctcatgtataaaatgaggattgtgttaataatgccttgtaggggtgttgtgcagattcaatgagttaatatgtaaaaaacatttaaatagtttctggtacagaggcagcatggtaaacaggtatcggctattatgaaaggccaaaggaagatcagcagtgaaataggtctatgtcctagtccttttcagcatttttatcgataacttggatgagaaaaatcaaagccattttgacttacaattaagatagaattatgatggaagatataacaaatatgatgggtaccataatcaagagtcaaaataatcatgagactggaacaatcggtcaaaagcaacaagatgtagtcacatataggaataaattttaaattcttgcgtatttaaatgctacacaaatctcaacagtttaagaatggagggaacctgctttaataaagagcagcatgtataaatcaaatgttgggagagcaaatttaattaagtataagctccatatgaatcaatagtgtgctgtagctgccaaaaaagctcatgccatgtcgttaactgagtttcagtctctggatttatcaagggtggtagaaatgttctgccttcctctgcactggccagctcagggcacagtaagaaaagcatcccaaatgatgagaacaaatctgttcccaacagtgatggcaatatgaacttggtgacacccacagtctgaaggtcaagtactcaggtgcagatcctgacactgctcctccctagccatgtgatcttaaagcctctgttgtctcttctgtaaaacttggacaatatggtctacctccacactgagattatagaactaaccacagtgaatctttaaaaattgtggtaaagtatacaactgagtggcattaattagactcacaatttagtggcattaattagattcacataatttatttccaaaatctttttttttgagacagagtctcgctctgtcacccaggctagagtgcagtggtgcgatctcagctcactgcaatctctgcctcccgggttcaagcaattctcctgcctcagcctcctgagtagctgggattacaggcatgcaccaccacgcctggctaatttttgtatttttggtagagatggggtttcaccatgttggtcaggctggtctcgaactcttgacctcatgatctgcctgcctcagcctcccaaagtgctgggattacaagtgtgagccaccgcacccagcccaaaacttaaatctcaccagacagaaactctctagccattgagcaatagctccccactttccacttccctcagtccctgataaacttaatatactttctgtctctatgaatttgcctattttaggtatttcccaggattaatttcttgacaactaaaaacgtttaaaaatggagtgggtttcttcaggaggaggtgatgtccactgtcacaagagtcgttcaagtagagaacagaaaacacttcaaaaaattatgtggtggggattcattttgggttgcagcaaatgaatgaaaagtgtctcccagatttgacagtctatgagtctgtgaactccacaatacatttgacatgtgtttccggtgacttctagccccattttatctaagatgaaactgaggcaagagctctttgataagtagcccaaggtcaatcactaagtcacgaagagagccatggatagaaatggagtggagtctcctgacgcacagccctgccctgcattccaccatctgatgatgctgcactctatgacctacttgtcctacggttcttgtatttttcctcccaaattccctcagggctttgtttgaaggctgcataaaatatcttaaatgaaaagtgatttaataacatcaaattcttaactttaatgccacgatgataaaagctgttagaagatgaatttgcaagcatgaaaacactttgattaaccattagaaaacagactctcaaatgtagattttaagtaatgtacagccatttggatgtcagactgagaaaaaacactggaataacttccatatatattccacagcatactggagaagccacagcaatcactgctttttttaaaaagtacagattttgggaccaaagaaagccttcaactctgatgtaatctctcttaatatggagacagacacaaatgtatatggaaaatacttggtttcggtaagattccagatttactgttttgttttttaagatacaggatatatcattgggtttaatgtctaaagaaaaagccaatatgttcctgtaaaaaatagccttagaaccagtctattctctaatgataagactgtaagaaatacttctcagagtagaagacaaaaataagtaatttttaccaaatatcaaacacagtatttagtaattcattccaatgtcaacaaaattttcctctggaatttgttccaaatcttaggtcccatctttatatgcacattttccccatttgtatactaagaggtctgctagtaaaaacaaagttttttctttagtaatttgctctataaaaaagccaaaagaaaaacttagaagccaatggtacaattaaattcaacatataaatatattaaaataaatctttttttgagcttgcatctgtttttagagctcaatctgtttttagaatgcaaagacgtccggaaaataaactacaactgaccaatcatttttcactctattggttataaacatattcagatgcctatttctaagcatgtaagtgttgtctgtcacacataacaagaaatccagaggtagcatggccagggcaggggcagctattccacaagagtgccaggaagctggctctttttgctccactcttactaatgtgtagatgtccactctcctgtttatcacctcaaagctgcatgatgccttttgctgttgtggcatcagaaagcaggaggcagcagcactcacatcagaaaagcaaaggctttcccagaacattccagttaatggtgcctccaaaacagttacccaggacagaaagccagaactggatccaattccatccagttcttaacctcaacccctatcaagcatcatgtacttctctaaatctgcagattccacttccttcaagtcctatgtccattcctccttttcttcctccactaattctacctttgtccaagctcctaccatcccttgtctagactggtacaacagtctccaaattgttcatggatcctccagctttggcttctatcaatctaccctccatgctgccactagactcatctttctaaaacttaaatgtgactgtcactcctccactgcccttaagacaaatttaaaccccttagcatgacatacacgcacagtattatctatttcaacctcttcagttcatctaccactttcttttttctttttttagacagggtctccctatgctgcccaggctagccttaaactcctggactcaaatgatcctcccatctcagcctcccaagtagtggggactacaggtatatgccactgttcccagcttgagatggtagcatttttatgtgtaaaatttaggacactaaattacaaaaagagtaacaaccatgataccagagtgataagctattctgtggcggcaggaagatctctgtagcccctgaaatgggcttgcttcacggagaggaaatagacatttacaaaagtgaattttccaaataattaaagcttaaattttaagttgaataaaaactaataaaatattaaaatattattggtaaaaatcttcctaaaaatgcattacacatttctttgccttttaaggagagtaggttgaaccaaatttaaccttttttgatgactcagtgtcatcattatgaaactcaattaccgttgaggtagcagggctgtctccctctccattaaatggctctagactgttaaccatttatttctttactaattgcctctccctttcaccattaggattttatctagcatcttaagttgttgtaattttgtacaagtcttcagaaccagggaatcataaaaccatagaatttgagagtttgaaggaattttagagatcatttcatccatcagtctatcaaattttatagttaagaaaactaaaccctaagtaagtgagcagtctttttctaatcagttgcttttcatcttctattttaatggctttaaaactgtgttctgaagaaaccactactcaatttgagctcaggccattatgtttatctttctttaaaatgctaagggtaaactggatttaaaaacatatgctacaggataaacacactttgagtgaacttagaaattaggatatatctgttagcatcaggagtacaacatatttaacaacagaatttcttctttcttccttttttttgtgttgttgttttactcattcataaaaccctcattatttatttattcaacacctcagcctccaatcagtaaataaccaggcccaactttgtttctaacttagttgttagaaatctacagaggcagggaagaaaagcatatgtgtttactaagtattagctatggtgcaaatgtgtttcttacaaaaccaaaacagaagctcttaagatgggtaatgctatcctcattttacaggcgaggaaaccaagatggagaagctgcacaatttatccaaggtcgtacaattaatcagtgatagaggagaaatgtaaatcccgatgcttgatgtcacatgactgctgcccttaaggaattcataatctataacaacaaaaaagtacatattcaactctcttaacagtgtgataaaagcaaccatggcagtgtgggactgcagaagaggaagtaatgaattatacctgaaaaggtgggagaaggttacacagtaacatttgaggtgaatcttaataatagtaataaaaacaataatagcaaacacttttgtaggaattattgtgggttaggcacatgccatctccttgatattatatcccacttctgcaaaggaaactgaggcacagatagatttaagtaacatatctaagaccacgccactagaaagcgtttggttctagagttcattctaggactactgtgctgtgctaattcccagaagtaaaaaaggtgaaggtgtccccaggtgaggagaaagagacaggagcaaaggcatcaaggtgtatgggaaacagaatgactcgaggtgactgatgcagctggaataaaagttaaaatatgtaaagcagaccatattaccactctgcttaaaaccaacgactggctgctcactacattttaagagaaatctaagccctgtatagttcttgctccactctcccactcattcacagttctcctgacacactggccttccagtacctaaaaccaccaagctcttttttgctgcagaacattggcacatggtagtatctcattctgaaatattctccccctagctttttacctagctaattcttgaacatcctctggtcttgacctaattttaatttacacagaaaggtctttgaaattccccatcatgccgtaatatctcatagcagcatcctcagcttccccttcatagcactaccctactttgtaattatactactgttgtgactacagactataggctccatgaaggcaaggaccgtgtctgctattttgttgttgttttcttgttgttttgtctttggttttccttgactggcacataattcaatggcagaagtttaagttggaattggaagagcatggcctttatcctatagataagaagaaggcagaaaaatttaatcaaggactgtgacaagatcaaaaggaggcttaaacaaagcaaaacaaaacctagcgtggtgtggatgacagacaagagaaagaccaaggctgacagactagttgaggatgccttcaacaagccaggtgagagcctgaatccaggcagtggtggaggaagtgaattcaagagactgcacaggtggtgtggctggatttgttcatttgacgtgtgtgtttgtgtaagcctgctccgtgtactctgtgacctactatccagaggtataaaacaaagtactaaaaagtaaacctgtatagaaaaactctatgctctccaacaagaggaaaagataaaaagactgatcactccttttggcctttagatccaaagggaattgaagaatgaatagttattttcaaagggacaagccctcttcaaggagaagccagttaaggcaaagatgaagaaaggaaattgtatgaaaagattgagaatacagagaagttttctggcaatgaaaagggggtttcaaagtatactcgttaagggggtataagttaggttttgctgagaaggaataagccagggaaagactgagaaaaaaaatgaaaacatgatatagggagaattgtgaacttacctgaataaaaaagtgtaaaaacaaaatctacacattttggaaggagactgagcctcgaggttaagggaggcaaagagtggaaaggttatatgggagggccacaaatggactcaacccttggcatgaattcaccccagtgacgcctctgcagaatccttcctgggtgtagagagggatggccgcaccgagactgactgcccacggcaggcacagctgcttcggggctgcttcggccgctgcagactcaacactggaatacagcttgcctcaacaggacttaaccagtggaaagctaagactcctctaatctttgtcttagatttttaaaataacacccttttcttgaaagtcaaaactggactattctccctaatttcctgcatttgagcgaaatcgaaaggtttctttaaatataaagttcatcttttcaagagcatctgggagtccctacagtaagtctattttaatttcatatttagcagtagtaaaaagtgtactaagagtagatggcaccagggagctgccatttttcacacctccaaacagcactcctgtttcctctcacatatgtcatggtaaaagagccaaactccgaacgcctgccttcccagagtcgctgaaaaatcctgtcttgagtgctgctgggctgtgatagaccacccccgcttctatctacacccccaccgtttgggaatgggacagtgagatgatggatagggaatgtgtatccgttctgaaggaggtataatgagcttaaatttactgtactgaagttaacacaactgctataggtgacataataagaaatttgtatttggtctctgccccggttcctggcacagaacttgtaaaacccttgtaatttcctgagtagtcggggtgagaggagaatcttcgttttttcatagtaagcccctttcaaccatgcccaagtttatactagtgaggtgactcttggaggatggggaccggttgtcagaagaaccaaccatgtgaatagaggattagaattcagcaccacctcaggctgggcgcggtggctcacgcctgtaatcccagcactttgggaggctgaggcgggcggatcacgaggtcaggagatcgagaccatcctggctaacacggtgaaaccccgtctctactaaaaatacaaaaaattagccgggtgtggtggcgggcgcctgtagtcccagctactcgggaggctgaggcaggagaatggtgtgaacccgggaggcggagcttgcagtgagcagagatcaagccactgcactccagcctgggcgacagagtgagactccatctcaaaaaaaaaaaaaaaaaaaaaaaaagaattcagcaccacctctctctagccacctctccaggcaagggagagttggctagagatcaactcaaccaccaagggccaatgctgtaatcaatcgtgcctatgtaatagccataaaaaccctaacaactccagagctcctgggttggtgcatacatcaaggtgctgggaaggtggtgtgcctggagagggccccttgctcaatgcatctcttccatctggcagttcctgagttgtgtcctttataataaactggaatagtaagtagtgttctgtgagccattctagcaaattattgaatgcaaggagggaggatgtgggaacccctgacttagagaaggtcagccagaagtacaggtagatagctgggacatgcgcttgacatctgaagtgggggtcatcttgtggggctggaccctttaatttgtgggatctgatgccaactccagaaacaaactgaactgtaggacaccagctagtgtcaccagagaactgaactgcttggtgtggaaataccccacacatttggtgtcagaattgttgcgagagtacaaaaaaatacttttatacttttagtatataatttggtttagctctttttaggtagacctcacacttctggaggaatagtccttcttgactgggtattgagaatattcaaaattcatgccctgacaggaggagacaaccctgtcagggggaggcagcccttacaacacgcagttcccaagtggggagtgagaggacgttcatcaacatggtcaccagctagtcaggacagcacatggaaggggtgccttgttcacctccaactgcaagctcaagctcaggaacgttctgaaaccagttcccagtccagggcaggaagcttcaaggaagcacctgattcacacagcagtgggttcaggctcaaagagtcccacctcacagaaaaagaaatctgcgtactccttcagcattttatttcattctgtctcgttttcttcagggcacgttccatttttactttacgatatacattccatttttctctctccctccaacagttttcatctgcaggaggcttatttctctatatccactcctcagttactcacctcctccccaagcctttttccagtcataggaaactttaattttattttattgtggtaagaatacttaagatgagatataccctcttcaatttttaagtgtacaatacattactgttggtgatagtacagtattgttgtacacaagtgttgacttgtactgtacaagtctgtagagcctattgatcttacttgactgaaactttatggccattgattagtaacttccgttaccccctcctcccagcccctgataactaccaccattccacttttttaatctatgaatttgactattttagatacttcatataagtggaatcatacagtatttgcctttttgtgtctggcttctttcacttggtataatgtcctccaggttcatccatgtcgtcacatgttgcagagtttccttcttttcaaaggctgaacacttccattgtatgtacataccatattttctttctatttcttttcgagatcggatctcgctatgtggcccaggctggactcctggccccaagcaatcctcccgcctcagcctcccctagctgagaccccaggtatcaccattgcgcctggcttcacatattctttatccattcatctgctgatggacatttaggttgtttccacatcttggctattgtgaatactgctgtggtaaaaggaggagtgctcttcaggatcttgaagagtcaagatcctgatttcaagtcttttggagaaatacccaggagtgggattgctggatcatacagtagttctacttttaattttttgaggaacatccatactgtcttccatagcagctgcatccttttgcattcccaccaacggtatgcaagggttccaatttgtccgtatcctcaccaatacctgtcttttgtttttttgttaatagtcattctgagaggcgtgaggtgacattacattgtggctttgatttgcatttctctgatgattagtgaggttcagcaatgtttcatatacctgtcagccatttagatgtctatttttgagaaatatctatttaagcccttagcctttttttaaatcagattattagtttcttttactattgagttgtaggagttccttatgtattcaggggattaactctttagcagatatatagtttgcaaatatcttctcctattctgtaggttgccttttcactctgttgagtgttttctttgctatttagtatgatgtagtccatggcaaacttcttgaatgagtagtctgtacttatcaaaggctgtacctaaattatcttcttcttgactaacttcttctccttaaaatactctccttttaagacgttcttatttgattttcctttcaccctctggccactcttccttcatctccttctgcctataacttaaatgtagatgatcctaagattctgtcaacatttccctcctcactctaaatgttcacaatatgcactctttgtcttcgcttcaactacagcttgtgcgccatgattcccacatctgaatagcactgcttctgacctcttgctcctcaacttaaaagtctgtgtttctaactctttcaaagcatcttctggatattttaagaatctctcaaattcagcatactcagagctagactgtccttttctaacactcagtcaagtttgacacctttttccttatcacttacattgtcattaagttctgttgattctaactaaaaaatcttactgctataatccttgttgctactttcaccaccactattctcgtttatgccctcaaagtctcttacgaggaccagcagatagtcgatgggaactttgggaatcagactaactggattccagtttttgcacttaacagttgtgtgcactggagaagttatttaactttttaaatatgcaatttattcatatgttaaatggggctagtatttagagatttagtaatctaaacaaaatgtcattcacaatggcaggcacacagtaaccattcaaaaatgtttttcactcagtactctcctttctttctgcctttaacccatctttcccagccagtatacattcaacattcacaccagttactttctaactcaaaaggtctactcatgtcagtcttcaattaaaaaaaaaaaacttttgacaaatttttattgcctatatgacaaagaatctctttagtttgacactaatgacccattagaaatctaaccccaagctacctttctagcttacaaactcattactccatattacataacttatttacctaaggtatcttacattgtcaagccttaatttctttattgttgccacctcaatgttcagtcttcccccttctatttctagctgatgtaatcatatttatatgtgcatatgcatatgctttcagcaataagtcctaattccttggaagcaaagaaccctccttttaatttgacacattgcattcacttattcattcactcaccaaatatttattacctgaaacccagacattgtgctagatattagagatacataaacaaagaagactggcccatacccttaacaagtgtgcagcctggtgaggaaaatgggcatacaaacaattccagtaatgggtgaaaagtgaaagggcagaacagtgactgtagtttctggttatagattagaatccctagcatcgattttacaaaatgctaatgcccggtttcaaccaccaaagattctaattaattggtctgtggtaaattttctttttttaaagttcctctagctgggcacagaggctcccgcctgtaatcccagtacttcaagatgggaggatcgcctgaggtcaggagttcaagaccagcctggctaacatggtgaaaccccgtttctactaaataatacaaaaattagctgggcatggtggcatgcacctgtaatcccagctacttgggaggctgaggcaggagaatcacttgaacctgagaggcagaggttgcagtgagccaagatcgtgccactgcactccagcctgagtgacagagcgagactcctactcaaacaaaacaaaaagaaaataaaataaaaagctcctctggcctagttatgtgaagcaacccttgcaagctcctgggagagagttgtaaatagaagcctatggaatattatgactcagaaacatttcctgaaaaaataaaataaaataaaataaaataaaataaaataaaagacgatgactatggaatatgggagacaaccttttcattggcatttttggttgttccacaacaccttgttccctttcttcttccttcccaaatctactcaggggtataccccgtctccaagtgacttaagagatgtaacactagccccaagtcaggggttgattctgattgttctttcttgtgattggtttaggtgtgggcaaaggaactcactgtgaacaaggatacatgaagggaggttgcctgtgggaagatgggaaaagttttccaaatcccaagaaaaatgcatcaagaaagacaggctctttctctctttggacactgctgcatctggctgggacatctggaactgaagcaactatattataactgtgaaaagagccaccttgaggccagatttgaaaaggagctgggttttggtaacactattaagtcattgcatcaaacaaccctgacatccgtccacctgtgcatttctccttcattttcatttttttctttcttcctttttttttttttttttttttgaggcagggtctcattttgtcacccaggctaaagtgcagtggtgtgatcatggctcattgcagcctcaacctcccaaggcttagtaggacccaagcgatcctcccatgttagcttcctgagtagctgggactacaggtgcacatcatcatgcctggctaatttttaaaattttttgtagagacagggtctccctacgctgcccaggctggccttgaactcctgggctcaagtgatcctcccgcctcagtcttccacggtgttgggattacaggcgtgaaccaccatgcctggccttgcatttcttgatgtataaaataatacatttcctaatttctttatgatgctttgagtcaaaattctgattacctgcaacacatcacatctcaactgatacagaactaaatcaaaattggggatcaaggaaggcaccccagagaaggtgatatctgaggaatttccagtatggccgccaagaagcaggaaaagcaaataaaaaggcatacatataaaagtataaaatattctgggaagtgcacatagttcagaatggctattgcaaagagtttgagcaaggaaatgaggttggagaagtgacagtctgggacaagatcttgagaagccttgtatcctgtggtagattaaatgtggtgacaaatgttttgcagctcctcctatcaagaggcaaagcctactccagaacctcatgaatacggctggcttcatgacttgctttgaccaatagaaggtgtcagaagtgatattattcaaattccagagccgaggcctacctctcttgaaatgctatctgaggctgccacgttgtaaggaaggcaatctagcctactgaagaatgagaggccaggtggtggggatactgaggcgccccagctgacagccagcactgactgctgggcatgtgagggaggaggccatcttgaaccatgcagctatttcagccatcatccgactacaaatgagcacagccaacccacagaatcataaaaaaaaaaaaaaaaagtgtcattgctgtagtaagccactacgtttagggtggtttgttatgcagcaataggtatctgacataggccatgccaagatgtttgagctttattctgaaaactatgcagagtaacctgattagactcatgtgttagaaagattaccttggcagtactatggagagtggcttggagtgggtccacggtggaggcggaagacttgttacaagactattgcgttaatggagctgagaaatctggatgtaaactaagacagtgatagtggggaggcagagaagagtcatgatacaggtaaaaatcaacatgatgtgttggacacagtggctcacgcctgtaatttcagcactttgggaggctgaggcaggcagatcacttgaggtcaggagttagataccagcctggtcaacatggtgaaaccctgtctctactaaaaatacacgaattagccagctgtggtggtgtgtgcctgtagtcccagctactcgggaggctgaggcacaagaatcacttggacctgggaggtgcaggctgcagtgagccaagatctcgtcactgcactccagcctgggtgacagagtgagactctgtctaaaaacaaacaaaaatacatgatggtgacataggttacaaagtacaaaggagaaaaatgaactaagcattactcaaaggtttctggatttggtaaatgagtgaatggtcatgccattttctaagacagagattatgggagcaagtgaaggtttgcggtaaccctggaacatccaagtggagatgtacagcaaggaattgtgaatactcaataaatgtttgatgaataaattactgattaatctgagtgggtaccaaagtgccctagtccaaggaaccatctttacatggtttatatggtataaactgagtactaagtcaagtaaggttttaatggtgtgaactcacgttattgacgcttcatcagaatagaaaggaaaaggaaaggtaagattcgatgcagtctaaaagtgctggcaaatctgcacattgcttagcttatgtgcatcaatctgcaattcttaggaaatgcaaagtaatgttcctacctaaagtcactatcattttgtagtatattcacagggtaaggtgtacaacacaagtctttttctctgtcctgcagattcattatatgggtttccctaattacacgcaaagaagagttgaggctatctccatgctgtcaagtgggcataatctacgatataacagtgtaataagctgcagagtctacaaacaattttaacacgcacatgcaaatattgacttacctttgatgttgattaaaatagcaagtaaatggctgggaaccaatctcatctttccagtactgttgccaattcatgacactttccaaattcttctgattttctctcttacagggagggatataggagcactaacaaaatagaatacagaaagtaaacctattattttatggaacattgagatacagtctttttttatagaaagatggcattataaagacagtaaatctaatttaggcctccctaatttttaaatacaaccaaattgaaattactaaactatattccaaatttccaatttggcacaaggacagaaagtattccaaatacaaaaacacagcaaaaaataaacttcagtcattatggtgtaagggtattttataaactattagttaccatgtaatagcaaattaaaagcataatatactctctcttttggtgacctgtccgtcaacagagggaggcataaaaaagtttatttttatccccaattgctatctatgaaccttggcatttctgtcttctacctgtaactaataaattcaagcacatagctcttctcaggatactgctcctaactgctgaaacccaagttttcttttcgtacattctcttggacaacaaaatcagtggaaaatttcctttcaaatacataatcagtgtattttgctaactgatgtcttttcctagccatgcctctgacaaagtagttctcttaaaggagctctattatcgtaagcaatatagattaagcagaatcagacaactgttcttaagtccagatgttaaaatgaactctcggcattctaatccattttctgcaattcagctttttacaacgatgacgaagatgatgccagtttctatttattgagtgtttgcaatacagcagacgcaaatgcttaacaggacttaacttgtgtactttttacaaccctataacaatttccattttatagatgcagacattgagattttcgtcagctctacaaccacaactagattctggtggtcttaccacattctactcttaggtgttctaccaaggtatctgatattaaggagcagggaaaaaccaaaccaacacaacatagagttttatagtataatttcagtcacattgtttaatttacagcatacaattattcaacaccttctcactattttctggtaaaactgaaatgttttagcatgatgcacaaagctctttgtgatctggtccctgcctgtcttcaccctcatttaattctgggatgcagccatatggatgtacttgctctccaaatctgccacgtgctgtcaacctacttgcttggcacaggctgttctctctccttttaatgccctttgttcctaaatctcctttattttaagcttcaagtttggtgttacctacttgagggagccttctttttcttctaccacagttaagtgcccctcatttgtgctgccatgggactcacgccacgtgatatcacagctggaaacacacagtatcatacttgcctgttttatgtcagccttcccaatttgctggcgaggtgagaacaagacctgttttctgtcttttctatattttcacacttatgactatgtctgctaatggtgaaactgcaaaaatgttggttgaattcgttaatgataacacggatacatttttattcaagatgatgacattattttcacagtgtttaaacttttaaaaaatatagacattataaattttagtaaatttggttgtctattatatacaatacattcacaacatgttatgcaaatgttattttaatgattgaatcactgaatgtttatcttctgcacatatagttctacatctattaataacaataatacgaagctaaaaatgtctgtgaaattatggattctgagttcttccaaagcagcagttgggtttggaagcaatggagaccattagatagggctccagtcctattgtctattaggtgttaggccttgggtaaattacttcccttttctggacttcattttttcaaatatgcaaaatctccaaaataatttctagctctacatttctatgattctattcttggaggtacaccaagaaagaacccagcagaaggcaggactacaaacactgtcacagtatttttcccagaagagatcctgcccactggggagatggctgggaaccctgactaagccagtattccagccagcaaagaggaggagtgtggtaggtccttccttaggggccagcactttgcattagaaaaatgttcacaagagaaccatgattttcttattgcttactttctctaaggtgttggatattttgtttccttctattaaaatatatatttttctacattatagtcaattagtttataaagtgtgagcaagtgccaatttattgtgctcttctacgaaggagaaatttcccaatttggaggtagaagctgtgaagtgtgaaggcctaaaaattcatcagagccctttttgcaatgggtaaatacttgacacaagagatatactaagtgcgttaggaaagaacaattcataaccacatgtaatcaaaacagattttaaatatttctaagttaactcagtttgaattctttgctatttagttttttggggagaaatgggtttaaaagaaatgtctctctcaaatgataacctaagatttgaccagaagaattacattgacatgcttctgaaaaggtcaaaaactttcactgagtgtgtaaagttctgtattaggtatgctgaagtttcatgtgagatttttaaaaaaattcttgcttttttggaaagtctgaggttgtgtggatggatttttggatggaaagtacttttttacattggagaaaataatctgagatcaaaatttgagtattctttttatgcactgcattctttccaaagagtgacatagattaagtgatctatacttaacaatactctagcaactttttaaaactaacattgcctggaaagaattttttttcaagagtcaaggacttgctctgtgacccaggctggagtgctgtggtgagatcatagctaactgcagccttgaactcttggggctcaagcaatcctgctgcctagcctcttgagtagctaggactacagctactccaccacacccagctaattttttgtagagaaggtgtctgtctcctttggttgtccaggctggtctcgaactcctgggctcaattgtcccaccctggcctctaagagtgctggggttacaggtgtgagccatcacacctggtctgaaaagctacattttaaggcaaacatcaaattcttaaaaatcattatggctccatttccttaaatctttattctcaagttaccgtgaagcctaactcagatcctccctagattccttctcaattcacttagtgtatcatcgtagattgccagaatttttacataaattagaaatgaaagtccaaagcacggtgctggaaaaagaactcgagaatccagtcacacaaatgccttttatttctagattgttcaagcctggtggttttcgaggcttcataatagttccaccatggatgtctctcatttggggaggaccacaaataacaacctacatggtaacgtcatcatcacaaccagcatttattgactatatgtcaagtgttgcattaattcaaacgagcaaatattataattacttccatttttggatgaggaaactgagggacagagggacttaagaaaactttcttggccaggtaccatggctcacgcctgtaattccaacactttgggaggttgaggcgggcagatcacttgaggtcaggagtttgagaccagcctggacagcagggtaaaaccccatctctactgaaaatacaaaaattagcagggcgtggtggcacacacccataatcccagctacttgggaggctgagacaagagaatcacttaaacccaggaggcggaggctgcagtgagctgagattataccacttgcactccagcttcggtgacagagcaagactctgtctaaaagaagaagaaaactttctcaaggtcccaatggcaaatggaaaagctgggattcagactgcagagtggtcctaactactgctttccatatctctatctttagggattcctagtcttctctctttggagctcctgatttaggacaaggagatcccctgccctctgcatccctctcttggagcaccagtgtagtatttttattggaatggaattgatgtagtcctcctgagagctgatgggttgaggcaagtctgttgcagtcctttgtcttcctggtacatcctcagagaaatgcactgtaagtctttgcttgttccctcctgtttcaatttggcttcagggttggtttccggtgccatggatgtaatttcacttaggtgaatttatagacataatgcctttggtcatggaggacaatagcatttccttagagaaatttcttcatatagttctgacctattttgtttttcatttgcaaaggcagcatttccaggcttctaatatcattattgcacaaataaccttcactagagcccatattgtttgctgcctgaacttggatgaaataacttctttgaaaaaatattttcgaaaaagattttttgaacttttgcattcatgaacaaagttcatggaaccgagtgggctatcctgacaagaataacataaagtcttccaatgagtttattaagaaaagacagtatcatcacacaacatggaatgcttgattacgtacttattattacttagttttccattatcatatgttagggtttgtcaagatttataacagcatttttttttctgccaaccacaatgggatttatattttaatagaatcgtttttgagtaggttctttgtgataagtgtcttgagaggactgcatttcaatcatttgggcagagtaggcagaattaactttcttctgttactgaatcatttaaagattattgcataaatcctgtggtctacttagttaaatatcagggactgggttctatgttaggaattatctaagaaacagaaatgaggaaatttgtttctccagttttccattgacttcatttggttagggagggtagtactgaaagacataatacagctgaaaacatgcatgcagctgattaaatgatttccaaataaatttggttacaaaatgaattcttaaaacattatctactggaacacatgtttaattatattttataccataatccctcattttctgaactcctataagaaatatctgtcagctatcattgtaattttagtgatacttttgacagtatgagcatataatcagaaaacactgtgaaataaaaagtataactgagccatttataaactccattaacagtcaggtgcagtggctcaagcctgtaatcccaacatgttgggaggatgaggcaggaggatcacttgagctcaggagttcaagaccacactgggcaacaaagtgagatctcatctttacaaagtattaaataatcagccaggcatggtagtacacacctgtagtcaccgctactcagaaagctgaagtgggaggactgcttgagaccaggaagtcaaggctgcagtgagccgtgatcgtcccactgtactccagcctgggaaacagagcaagatcctatctcaaaaataaataaataaataaactccataatgtttcaaatgttgtgggtgcatatgtgcatgggcgcgcacacacacacacatacacacatacagagtccttatgaatgtaggttaattgaacaaatatatacgaaattatatgtcagctaaaaaactaaattctagggcaggtagtccagaatgtttatccacatctgaaagctaaatgaaagtaatcttatggaagaattcagagttaaataaatggcttagaaaatgtgaaaagcaaggttaactaagaacaggagaagctaaaatgagctcttaggcaagagtaggctgggcagaaagagtagtgcccagcctagagcagagatggtcaaagtctgttccacagatcacttgaactgcttgtcaaaaagatccaccctcctcaaagtgtgattaagactaggaatctgcattattaacagctctcctgcccttggaatgacagatttttagaattgataatttatgcaataaactattcttgattgctgagtactgcataggaaacaaagattagctattactcactcccttctccctctctctccctctccacctcccccgaagcaagcagtgtagtaatagtagcatatttacaaagtgctttgtgactacaaaagaagacatgaatattttggcctccagagtataagagaaggcttcacagaagagatgacttgatttgtgtctttaaggctgaacaggaatttgcttgtcagagaatgggctgggaaggtgacatcccaagaagaaatggaatgtacagaggctgtgtatggatgttccagaaagactgagtcatctaatgtgccttggaggacaaggggcataggagatggcgttggaaaatgcccaaattatctgacctactattcactgaagaattgttcctctctccttaaatgtttctgtaaaaagttgctcactacctcccagagaatacacccacgctccaatgcatagtttttttagttagaatttactatcatatgttgatatgatatctggatttttggaatttaataatattcacttaacttctgcattcaggcagactgctaaggttggttatattattaagactgaaaagttcggcatggcattccatcttcaaaatagttcatttagttttagagttagaaaataaaaacacggcggggcgtggtggctcacacctgtaatcccagcactttggggggccaaggcgggtgggtcacaaggtcaggagttcaagatcaggctggccaagatggtgaaactccttctctactaaaacaacaaaaattagctaggcatggtggcaggagcctgtaatcccagctacttaggaggctgaggcaggagaatcgcttgaacccgggaggcagaggttgtagtgagccgagatcgcgccactgcactccagtctgggcgacagagtgagactctttctcaaaaataaaataaaataaataaaataaaataaaaacacacagtctttgccaaaaatagaagttgaatccaaatagaagcaatcacaccaaaacaagaaattttaatctggaagaagttcaatagttattaataattataacaaacatgacagggcctataaacatttgtttaataactcctgatcagaatttaaaatcctgaggagatggccaatactctttctttaaattttattatttttttattatattttatgggatacatgtgcagaacatgcaggtttgttacatagacatacatgtgccatggtggtttgctgcacccatcaacccctcatctatagtaggtatttctcctaatgctatttctccccgagtttcccactccccaacaggccccagtgtgtgatgttgccctccctatgtccctatgttctcatttttcaacttccacttatgagtgagaacatgcagtgtttggttttctgttcctgtgttagtttgctgagaatgatggtttccagcttcatccatgtccctgcaaaggacatgaactcatctttttttatggctgcattagtattccatggtgtatacgtgccacattttctttatccagtctatcattgatgggcatttaggttggttccaagtttttgctattgtgaacagtgctgcaataaacaaacgtgtgcatgtgtctttatagaatgatttataatcctttgggtatacacccagtatacccagtataccatttgctgggtcaaatggtatttctggttctagatccttgaggaatcaccacattgtcttccacaatggttgaactaatgtacactcccaccaacagtgtaaaagcattcctatttctccacatcctctccagcatctgttatttcctgactttttaatgactgccattctaactggtgtgagatggtatctcattgtggttttgatttgcatttctctaatggagatggtcaatactcttatgacactgaaatgaaataaaactttcttaaatgttcatgcacacattcagatggcttcattgatggcattatttgtagctatattgtgtactgtaaggtacacaaattcaatgtgtgtatgtatggatatatatacaatgaaatattacaaccatcatttctgcatgaaggggatcaacaagccctgtctattgtaagtcctctagaaccagtatggtgatgataaaaaaaactggtgcttcctatttgtagcagaatatgttttctaaagagagctgcattaatatacatcccatttcacatactcttacaatgtgatgttggcactcctcaattgagaggtggaggtctagcttctcttccttagcacataaatgagccattgattacagcaatgattcagtgtgacttcaaggttagatcagaaaaggtgataaagcacctgcttgcatctctctcgagaatgctcatccttggtctccagacagtattctacaaggaaacccaaactggcccataatgagagatcacatgaaaggcctatgtggagaggacctcagactatattcttctctgtgtcctttataaatttctgacccacagaatttgtgaacataggccaggcgcagtggctcacacctgtaatcctagagccttcggaggccaaggcagggggactgcttgaacccaggagttcgagactagccagggcaacatagcaagaccctctgtctacagaacatatttttttaattagctgggtgtactggtatatgtctttagtcatagttagtcaggagattgagaggtgaggatagcttgagccctggagtttgaggttacagtgagctatgattgtgccactgcactccagcctgggtgacagagcaagaccctttctctaaaaaaaaataataataaataaaaaataaaagaatgtgtgaacatatgaaaaatgacttgagccacagggatctttgacagtggctgagatcacaggacatctaagattaaaataaatagataaccttctaaggttcttctttatttacatacctgaaagtataaaaacacttgaggtttgatgaaatgaagtctatgagtcactgtgatgtaaggtaggactcctcagccaatcccaggcccaaagctccttagaggaagggtgagggggctggtttatacttaaagcccttgtggtagaacctcaagtcctacctactgaaaatctagcctttcccagcagaacatgccgacatgtagcagagtagtatagagcagaaagggcagatattcagaatagtattgaacactggctctacgctaatgctaatccctggggactctaagtacacctgtgcttagaatgagagctcatgggggtcaggggaaaatgaagttttggtccaagttagtgtcacaataggcccagggagtccatgaactctcttcacgattgttcctacagatcctgaaagtatagcgtcttcacattttggaggaaacatatactgacatttgggattgcttctctgatcaatatactgagtaacccagaacctgccagctttcagtagcaatcagagcaggaaaacctgctcaaggctacagagcaggaagctgtctcaattcatctctatggctcagtggcttcaataacaaacaagagtctatgacagatcagcggatatatggagcccagagagagccctgatggtataaagcaaacccatgctttctttggcaagtgactattctccttttgagaaacaagtggtttgttactgggtcccagtagggtctgaatgcctgaacatgcaacatcaatttaccattttacccactgtatgctgggctattttgactcactaaaacataaagttgggatttacagggctgaagcaggacttgttggcaaataaatttcagaagcaaatggctcacactcccaaggcaccttctctttttataccaccacctgccccatcttgtgctaaaatgcagttgttaatctgggttggttttcctcatactgggatatacagaccccaaggaatactctgcagtgtgccaggaggttcttaaagcctatgatcagttttgatggatgagcaaatttgagctcattgagcataactctgggcagaacatctgattgtttatttctcttgaaagaaatgatggaggtacagtcctacaatattttatggacactggttaacaaatagtaaacttgtttcaagtaacatgattagagtgtgttaaatcctcagaaatagaactctgatctatacatgggcctacaaattctatttcccattcacccattctcggaaagctatttgaggatgtactccaacaaaacaaagaaataaattaagaaagaggaaggcatgggatcaaggaaacaaggtactcaacacaagaaagatgcagcaggcctaaggtgcatccagttcagtatgagaagtaggcagatggggcccagcaagggtgtcccacgaaatttttatttgatcttatttttttgacacagggtctcactctgtcacccaggctaaagtgcagtggtgtgatcttggctcactgcagcctcaacctcccaggctcaagtgatccttctgccttagccccccaagtagctgggactacaggcacatgctaccatgcccagctaatttttgtattttttgtagagacagattctcaatatgttgcccaggctggtcccaaactcctgggctcaagggatctgcctgcctcagcctcccaaagtgctgggatcccaggcgtgagccaccatgcctggctaagaaatttttaaaaagaatgagagaaatgtggaactaaatgactacctattgagaatggtcatatgacaaacagtatacaaatgggttttacaattctgcaggagaattttggaaaaataagagaaaggtacacaggaaaggtacaggaaagtaagaaaataaaaaagggagatgattcttacctcaaggaaaataagttatagaagtgaacagtactttacatagttaaagtaagttgagcactcaatattaatttatccaaaaattatgatagaatcatatttatttaaagaataaagagaggaaaatggggtaggatggtgtggtgcaagaaagctaagtccatataatccatcataggtggtcaacagtatctcaactgcatacatcagaaaacctattgtttagaaacacagaggtaaaaaccagaaaaaaaaaaaagccctaaaaatagttaaaaccagttatctctgggtggcacaagggtttggagcagtggagtactactccttaccctcaaataaaagtacagtgcaatttgattttcaaaactatgttcataataacaagagcaaacattcactgaaggcttaccatatgcaaggaactatcctaggagctttccatatattaactcattactcctcataacccaaggagacaggctctattataattctcattttacaggtgagggaactgaggcacatctgaagtcacactgctattctaattaaaaattaataatcaagacatacaaatggcaaacaggcatatgaaaaggtactcaatatcactgatcatcagagaaatgcaaatcaaaactacaatgagatatcatctcaccccagttaaaatggcttttattcaaaagacagacaataacaaatgctggcaaggatgtagagaaaagggaatccttgtacactcttggtgggagtgtaaattagtacaaccactagggagaacagtttggagaacagttttgagtaactaaactggagaacaatgtagttactcaaaaaactaaaaatttagctaccatccgattcagcaatcccactgctgggtatatacccaaaagaaaagaaatcagtatatcaaagaaacgtctgcactcctgtatttgttgcagcactgttttcaataggtaagatttggaagtgacctaagtgtccatcaacagatgaatggataaagaaaatggggtacatatatacaatagagtactattgagctataaaaaagaatgagatcccatcatttgcaacatcatggacggaactggagatcattaagttaagtgaaataagcaaggcatagaaagacaatggttacatgttctcacttatttgagagatctaaaaatcaaaacaattgaactcatggatagagagtagaaggatggttaccagaagctaggaagggtagtggagggctgtgggggaggtggggatggttaatgagtacaaaaaataaaaataaaaagaatgaataagacctattatttgatagcacagtagggtgactctagtcaataacaacttaattgtacattttaaaataacttaaagagtataactggattgtttgtaactcaaaggataaatgcttgaggggatagattccccattctccatgatgtgcttatgtcactttgcatgcctgcatcaaaactcatctcatgtacctcttaaatatatatacctactatgtatccacaaaaattaaaacaattaaaaaaaaacaacactccaggcatggtggctgacttgaggtcaggagtttgacaccagccttaccaacatggtaaaaccccgtctgtactaaaaatacaaaattggctgggcatggtggtgcacgcctgtaatcccagctacttgggaggctgaggcaggagaattgcttgaaactggtagaaggaggttgcagtgagccaagactgtaccaccacactctagcctgggcaacaagagcaaaactccatctcacaaaaaaaaaaaaaaaaaaattaaaaaatttaaaaaagacgaatcagtgagtcacaaatgaagaaataaaatggcccacaaatatgtgatgaaatgttcaaacaaactagataccaaaggtgctggcaaaattaaactgctaaaaatgaaaatcacagccaatatcccgtgcagacaagtatctgcaaaaaataggctctttcacacacagctgtcggaatgatacatttttattacttatttagtataatttggaaatatatgataaaagcttaagaaagcaataagctttgtttcccttcaaaaaaaaaacaacaaaaataaagcataatagacacacaacgtaaaaatgcaaacagtgggaaaggttacaaaatgaaatgtctccctctgactgacccttaccccaggcagttatgcttaacagtcattgtgcattcttccagatattctctatactctatcttaacaagaatgtgagcacactcttctgtttattgctttgttctttcactaaccaaaatatcttagtgctctcatgtgtacagatagaggtctcattcttttgaatgctcactgcatagctgtgtcaaaatttatcagttggtcctctaatgaaaaacattatagaagtttctagtcttttgcaattacaaacaaaagagcaacaaacttccttgtaccagcatctatgcacacatgtgtgagaacaggaataaaagctggcatgtattttcaaaaactgtaattatggtattccaaagaacctgcatgagagttcatgaaagcacctttccccatctccttaaaaaaaaaaaaaacaacaaacaaacaaacaaaaaggctacaattaaacttttctgatggtgaaacatggagcttcttattttaatttacatttttaaatgaacatttcttttctgcaaactgaccatccatgatctttgcctatcttggtcattttctcattgatgtttaaaagtcttcatatagttaaaaaaaaattgtctcacaatcccagtttccctcctgatttttcttgtctttatttgtggtacatttactacataaaaaaattaatttttatgaaatcaatctgtgaaaatttatataattagacccactttgaagacagacccattatctataaaaacatatattgtaatctctgaaacaagatctccactatcacaatgcctcagacttacaagatgaggtatgtgactgtctgaaaaaggtttttagaaaatagagataagcaaaaataaaatttagaaacctctgataccgtcatcactgagattactaatttcattttggattttaagtaaatattcttgaagagaagctgtcctgtaactttcatctgtatatatatgttattataggtttttgtttcaatgtaatcataaatatatgaaaagaatttggaagttttccttatttctgtttctctggcatagttcaaagtaggattaaagttacctgttttcacagagttgacctggaaacatttacagttgtagttcgttgacagctttctccatttcctctatggtaattggtctattttttagaaatctctatagattgttttatttgggaagtttatattatcctaagaatcattatctcatcctatgagttcaaatttattggcatagaattgatcgaagtattcacttgaagttcatttaacttttcctgtatttgtggttgtttcctcatttttgtttctaattttgtatttttgaagaacatttctttggcaattaaacttgctgaggattcataactgaatttatctttccaaaaataaagacaattctgcactcgttgaagatgctcagcatatcttcaatgggaattttgaagccctgaaaaatttcaaggctataaagttgtgctattaattttctatccaactcttatgcaaaatcaaataaatgttcattaaaaacattgaagggaaaggtgtttgacattaaccgaagaaaatattcagtacatcacagggacatgggagataaagctagatgaaagaaagctcaacagattgaggaggtagatgctctcaaatccaagagtaaatgcaccccaccacaacactgtgtgatgtcctccagagactgtgccagaaagaaagctccaacccaggaggggttttgtgaatcagacagcattcacagcagttaggatagggcctgtaacatggcagatacccaataaacatttgttgaactaacaattctgaagtttgtgacaaagtccctaaactctgtcctcatctgtgaaattccccccgcttgacacctcagtaactacaaatacaaataccaagatgtatttattccagaagtatttatcaataatatctgcttggaacattatatatatcatctatagtcctcagcttgtaaaggtttcttgatcaagaggttaagtgactgacctatagatgttcacctttaaatagggagcatctagattcaggcacatgggccttttctttctttttcttctttttttttttttttttttttttgagacagggtctcactgtgttgctcaggctggagtacagcgacatagtcatagctcactgtaaccttaaactcctgggctcaagcgatcctaccgtcttgctagaactacaggtgtgtaccaccatgcctggctaattaaaaaaaaattgttttagaaacagagtttcactatgttgtctaggctggcctcaaactcctctcctcaaattatcttttcaccttgacttctgaaagtgttgggattacaggcatgagccactacacttagactggcgttttccattataccaggtagcttctcaaatgtctatgtgcccagctctgtcctagactctgttagtgaatcccgaggtgtttccccaacggggactgtgagaggccttttcagtcattcattatcgtggtgacaagttgggatgggagaggggtatttaagtaaaacagcatggttttgtaagaaggtagttttatcttaatacatcgatcctctccattgtaatatttagtctcttgtgtttcacagagcatttattttaaagtaacagttctcagttttctctcacaaaaataagccttctttattggagaaatttagaagctacaggtggtcaaaaatcgtatttatggtgtgcattttttccattttgtcatttatctttgatctttgtatatagtcttttttcatataaaaatgttcaatttacatgaacacaatagggtcttgcagatggaattagttaagatgaggtcacagtggattagagtaggccctaaattcaatgactggtgttttttgtttgttttgagatggaatcttgctctgtcactcaggctggaatgcagtggcacggtctcggctcactgcaacttctgccccctgggttcaagtgattttcctgcctcagcctcctgagtagctggggttataggtgcacatcatcaagcccagctaatttttatgtttttaggagagacagggtttcaccatgttggccaggctggtctcaaactcctggcctcaagtgatccacccaacttggcctcccaaagtgctgggattacaggcgtaagccaccgcacctggctgtactggtgtttttataagagaaagaagaaagggatacggagacacatacagagggaaaaaggccatgtgaagacagaggcagcaactggagtgatgcaactgcaggccaaggaatgcaaggattgcaggaaacaaccattgctaggaagaggcaaggaagggtgtttttctagagccttcaggggagcatggacctgtttgattttggacttacagacttcagaactgtggacaaataaatctctgttgagttaagcaacctcgtttgtagtactttgttatggcagccctaagaccctaagacatgtatttttcaggattttgatatgtatttccaagttgacatgcaattgctcctgcaacatgttgccaccagcagtgcacaagactgcccacatccccatattgccaccaatttaatatgtaccaacttgataggcagaaaaggtatctcaacattgcattaattaatatttcttttttccccttagctttactgaaatatacttgacaaataaaaattgcacatatttaaggtatataacgtgatgttttgatatatgtgtacgttgtgaaataactgccacaatctaattagcacgtccatcaccttacatagttatgatctgattagtacagtcctgtgctgaataatgacatttcagtcaatgatgaactgcatttatgactgtggtctcatgagattataatactgtatttttactgtaccttttctatgtttaaatacacaaaaacttaccattctgctacaactgcctatagtattcagtacactcatagtacaggtttgtagcctaggagcaataggctatatcatatagcctgggtgtgtagtaggctatactatctaggtttgtgtaagtacactctatgatgttcacaggacaaaatcaccttaaacaatgaacgactgtatttctttgatttttagtgagataccacatatttttcatgtttttatttgtaattctttactgaactgcctacgcatgttcatgcctagtattttactgaagagatggtcttttattgctaagagtacttcatatgttgactttttaatcatttccccaccatgttgcaaacatttgtccaaatttatcatttttccttcaattttaatgttcaaaaaaatgtgtaagttttcccttattatatcattaatcagtgtattcctttatgatttctgtccttgctacatgtttagaaaagctttgcccaccccatatatacaatattaatgtataaaatatatatttacccaaattttatttagtactttcataatttatttttgtacctttaaatttttttttttttttttttttttttgagacggagtctcgttctgtcgcccaggcgggagtgctgtggcgcgatctccgctcactgcaagctccgccttccgggttcacgccattctcctgcctcagcctccagagtagctgggactacaggcgcccgccactgcgcccggctaattttttgtatttttagtagagacagggtttcaccgtggtctcgatctcctgacctcgtgatccgcccgcctcggcctcccaaagtgctgggattacaggcgtgagccaccgcgcccggccacctttaaaattttattccatcaaaactaaaattttaattttaattagatgtatatttctaagtaaatattttccaaataacattttgatgattcctagtattttccaaacaagtttttaaatttagaaaattagttttttaaaatttatttccaaaaaataataggcagttttaacaccacttgctgaataatacattgctttacaagttatttgaaatgctgaaatttgcaaagcaatcattcattattattttttgggcaagagatttattgaaatataattcacataccatccaatttacccattaaaagtgtacaatttaatggtttttagtagattgcacagaggtgtgcaacaatcatcacaatcaattttagaatgttttcattacaccaaaaagacccctgtaccctttagctgtcattcccaatcttcccatgccttctagctttaggcaaccactaatctactttcagtctctatagatttccttccttattctggacatttcctgtaaatggactcatataacgtgtgtttttttgtggctggcttcctatacttaccatatttttgaagttcatccatattgtattaacacttcattctttttacagccaagtaattttccattgtatgaattagcatatttcatttatccattcatcagttgatggatgtttggtttgtttccaccttttagctattatgaataatgctgctatgaagagtcatgtacaaagtttctgcatggacatgttttcgtttctcttggatatataattaggaaaaagttgcttggtcacatggcaactgtttagcgttttgaggaactgtcaaactgttttccaaagtggctgttatctttttcattcttacattcttgtatgaagattccaatttattttgacaacacttgttattgtcttttttacagccattctaatggatctgaagtggtatttcattggggttttgattttcatttccctcatgactaaaaatgtcaaacattttttcatgtgctcattggccatttggataccttctttggaaaaaaaaaaactattcacatcctttgcccacttttaaattggattatttgtcttgttgtgttgtaagcattcttcattattttcttggtactagacacttatcagatacattatttgcaaatattttctttctgttacacttgtcttttcattttattgatggtgtcctttgaagcacaaatgtttttaattttaattaagtccaacatatctatttgtcctttagttgcttgtgcttttagtatcatattcaagcattaaagttttagcacttatatttaggtctcccatccattattttaatgtgcaatcagagttcaacttcattccttggcatgtggatattcagctgttcaagcaccactgattgaaaagactgttctttccctattgaatgctcttgacactcttgtcaaaaatcaaccgtccatgatgtataggtttttttttttttttggactctcagttctattccataggttggtaggtccatccttattcagtatcacacagtcctgagtactgtagctttgttgtacaggcacacttcgttttattgcttgctttattgtgttttgcagatattgcattcttttacagatggaaggtttgtggcaaccctgagaacaagtccattggcaccattttttccaacagcatgcacttacttcatgtctctgtgccacattttggtaattttcacagtatttcaaacttttcatgattattatatctgttatggtgatctgtgatcagtaatctttgatgttactattataattgctttggggatgccacaaaccatgcccatatgaggacaaagttaatcaatgaatgtgtgagtgttctaagtgctccaccaaccacctgttcccctgtctctctacctcttctggggcctctctattcctgaaacaaaacaatattgaaattaggccaattaatacctctacaacagcctctaagtgttcaagtgaaaggaagagtcattgtctctcactctaaattaaaaactagaaatgactaagcttaatgaggagagcacatcaaaagctgagacaggctgaaaggtaggcctcttctgccaaacagccaagttgtgaatgcagaggaaaagcttctgcaaaaaaattcaaagtgctactctagtgaacacacgaatgataagaaagtgaaacagccttattgctgatatggagaaaggtttagtggtctggatagaggatcaaaccagccacaacatttctttaagccaaagcctaatccagagcaatgctctaccctctttaattttatgaaggctgccagaagtgaggaagctacagaagctaacagaggttcattcatgaggtttaagaaaagaagccatcttcataacataaaagtgcaaaatgggctgggcatggtggctcatgcctgtaatcccagcattctgaagggagaagaaggcagatcacttgagcaaattcaagaccagcctgggaaacatggccaaaccccatctctacaaaaaatacaaacattagccaggtgtggtagagtgcacctgtagtcctagctacttgggaggctgaggtgggaggatggcttgagcttggggtggaggttgtagtgagcagagatcacaccactgcactccagcctgggtgacagccagaccttgtctcaaaaagaaaaaaaaagtgcaaagtgaagcagcaagtgctcatgtagaagctgcaagttatctagaagatctagcttagataatttataaaggtggctacactaaacaacagattttcaccatggatgaaacagccctctattggaagaagatctaggactttcatagctataaagtccaggcttcaaagtttcaaagaacaggctgactcttgttagaggctagtgtagctggtgactttaagctgaagccagtgctcatttaccatttcaaagatcctacggcccttaaaaattgtgctaagtctactctgcctgtgctttagaaatggaacaagaaagcctggatgatagcacatcagtttacagcatggtttactgaatatttaaagcccactgttgagacctactgttcagaaaaaaagattcctttcaaaatactactgctaactgacagtgtacctcatcacccaagagctctgatggagatgtatgaggagattaatgttgttttcatgcctgctaacatgacatccatactgcagcccatggatcagggagtaagttcgactttcatgtcttattatttaaaaaatacactttgggctgggtgtggtggcttacacctgtaatcccagcattttgggaggccgagatgggtgaatcacttgaggtcaggagttcaagaccagcctgatcaacatggtgaagccttgtctctactaaaaatacaaaaattagccgggcatggtggcgtgcaactgtagtcccagctactcaggaagctgaggcaggagaatcacttgaacccaggaggcagagggtgaagcgagccaagaccacaccattgtactcgagcctgggtggcacagcgagactccatctcaaaaagtaaataaataaaataaaaaataaaaaatacacttcataaagctgtagctatagtgattcctctgatggatctgggcaaagtaaatgaaaaactttctggaagggattcaacaatttgatgccattatgaacattagtaaatcatgaacggaggttaaaataacattataggagtttggaagaagttgattccaaccctcatggatgacttgtggtgttcaagacatcaatggagaaagtaactacagatgtggtagaaataggaaagaactagaattagaagtagagcttgaaggccgggcgcggtggctcatgcttgtaatcttagcactttgggaggccaaggcaggcagatcatttgaggtcaggagtttgagaccagcctgaccaacatgatgaaaccctgtctctactaccaatacagaaaaaaaaattagctgggtgtggtggtgcatgcctgtaatctcagctactcaggaggctgacgcaggagagtcacttgaactcgcgaggtggaggctgcagtgagacgagattacaccactgcactccagcctgggcaacagggcaagactccatctcaaaaaaaaaaaaaaagaagtagagcttgaagagattctactagaattagaagtatagcttgaatttctggaatcccatgataaaatttgaacaagtgaggatttgcaaatcctcatttggatgagcaaagaaagtggtttcttgagatggactccacttctggtgaaaatgctgtgaacactgttgaaatgacaaatgacaacaattaacctagatattacctaaactgagttgataaagcagtggagggatttgagaggactgactccaattttgaaaggagttctactgtaagtaaaatgctattaaatagcatcacatgcaacagagaaacattttgtggaagagtcaattgatgcaggaaacttcgttgtcttagcttaagtaatttccacagccacctcaaccttcagcaaccaccaccctgattagtcagcaaccatcaacatcgaggcatgatcctccacccgcaaaatgattatgactttctaaatgctcagatcattactagcatttttcagtaataaaatatttttaaattaaggtatgtacatttttaagacataatggtactgcacattaatatagtataaatgtaatttttatatgtactgggaaactaaaaaatttgtgtgactcttttatcgtaatattggctttgttgaagtggtctggaaccaaatctgcaatatttccagtgtatctcaggaaatgtgaatctttccattttgttctcttttttcaagatggttttgtttattatggttctcttgcatttccgtgtgaattttagaatcagctcgtcaatttatgcaaaaagaaaaaaataactaatccagctggggttttgctagagactgtaatgaatctgtagatcaacctgaggaatactgccatcttaacaatattgggtcttcctatccaggaacaaaggatgtctttccatttatctaagtcttctgtaatttttctcagcagtgctttgtagtcttcaggttataggtcttgtacttttgttaaatttataaaatttattccaagacattttatttttatgttattataaaattacattcttttttctttttttttttttgagacaaggtctcactctgttgcccaggctggagtgcagtggcatgatcacagctcactgcagccttaatctcccaggatcaagtgatcctcccacttcagcctcccaagttgctgggactacaggcacgtgccatgacatctggcgttttgtttttttttaatttttgtagaggtggggtttcaccatgttgcctaggctggtcttaaactcccgggctaagcggtcctcctgctttggcctcccaaagtgctgggattacaggcgtgagacatcatgcccagccagaattgtgttcttaatttcattttaggattgttcattcctagtgtataaaaatataattaatttttgtatattgatattgtatcctgcaactttgctgaattcatttattagctctaataaattttaggggaggttctttaggagttactatatataagatcatgtgatttctgaaaatagttttatttttcctttccaatctggttgccttttatttctttttcttgcttaactgcccctggctagaactgccactacaatgttgaacaagagtggtaagagtggacatcctcgtcttcttcttgatcttaggggtaaagctttcaatgtttcatcattaagtatgatattagctgaggctttttcataggtgtcctttttcaggttgagaagttcccttctattcctaatttgttggttttttttttttttatcatgaaaggattgttaaattttgtcaatgtttttttctccatatactgagataattatgcttttcttgttctttatgctagtaatctattacattgattggttttagcacgttgaaccaaacttgcattcctggaataaatcccacttcatcatggtatataatcacaaactcttccaaaaaaacagaagggggaacacttcccagctcattctattactatgataccaaaatcagacaaagacatcacaagaaaaggacagacatatatcctgtataaatataaatgcaaaaatcctcaataaaatattagcaaacaaaatccaggaatctataaaaagaattatataccatgaccaagttggaggaataaggagtgagagctaatacgtataggacccctacacattgttgaaccccaacacggaactactaaatctgaaactcaggtagagcttttgatttattgggtcgaggatgggacctgagaatgtgcatttcttttctttttagagatggggtcttgctctgttccctaggctggattacagtggtatgatcacaacttactgcagccttgacctcctcagctcaagcaaggagccttagcctcctgagtagctaggactaccagtgtatgtcatcatgtctggctaattttttttttttttaatttttgtagagatgtggtcttggctatgttgcccaggctggtcttgaactcctggcctcaagcaatcctcctgcctcaacctcccagagtattggtattacaggtgtgagccaccacgctcagccagaatgtgcatctctaacaagttcacagataattctgatgctgcccgtccactgaccatactttgaaaaccaccggtttggaggaagaaatagactagccataaactcaatgaacagatatggtaatcaaagcaaaagacagcactaaacaagagagtggcagtgaaatttataaaaaatattaataccagagaatgatgatacaattaacagaaacaaaaaactccagaataaaagtgggtttgggagaaatagtgatgaattttgttgccatttttatccttgaaacagagaaaacaaaaggtaattaaaataagaattacaaatttagcactcactatagagtattattgtctggttttcccttctttaggtctattttaaaataaaactgtttggataaagacaatcataaatatatttattacaaagaacaaaatggactaaatttttactttctaggatttagttttctccagtgaaatataatatcaatatatgctgctgcaatatagttagattaaaaccagtaaactggacattagatgaggtttcaaagtccatttgatcaactacatcaattacatgaagacaaagcaagtctagatattttttcacatgtgcttcagtataaagagaccatctagtaacctaatctgttggattacagtactcaagaaagcacttacttaaaataaatgtatcctagtttatttataaaaatggccacagaattaaataacttaataaacacaatgatttacaagtattatattggttattttaaaagaatagaagaggatattacaactcacaagtacaattttttacacattaatttatgtgttgtagagaatacctaaggctcagcatgaggaatggttggaaacatatgcaatgttaaaaactattctgttcagtattttactgtgagtaattatggtaattgtaatataaatgtactgctgatctaggaactaaactgaattgaaattctgctaaggactgaaaaaaaatttaaacccaaaggaaataaaacttgacatcttcattcataaataagtgcccaaaacattttaaataaacaaaatgtgtcaacttataaaaagctatataacgaggcaagtttgtgatcaaataaatgtattttgtaagcaaattataactgatatgtattgtaatgtcacaaatctcttttgatttttagtttctgattcttttttatgcataagttttggggaccttacagatataattgagatcttcataaatgacatccacaaatgggggctggagatacattacgataatctcagacagatagatcatagcatcctgcagattagattgcttttgttttagaaatggagtcttgctctgtcacccaagctaaagtcctaaagcacatacttaaatttagctcactgcagtcttgtactcttaggctcaagtaatcctccctcctcagcctccagagtagctgggactacaggtgtgcaccacaatgaccagccaatttccttgatatttttttaagagatgggatcttactacgtggtacaggcctcagcctcccaagtagctgggattataggtaagagccaccacacccagcccaaattagattgtttctaaagagatattctgaccacgcctttaaatatctaatcataagtcacctactcaaaaaccgtccttgacttctgtattagtttcctattgctgctgtaacacaaacttagtggcttaaaatggcacaaatttattatcttacaattctggaggtcagaatctagaatgtgtctcactgggctaaaaccaagatgccaggctgcgttctcttctgaatgcctagcggaaaattcattttcttgccttttaccacttccttggagaaggagtctacatgctttttttggcgcatggccctcttctgtattcaaagctagcaatggctggttggatctttctcaaactctatcactctgacctgcctctgtcttctacttttaagtaccttgtgattccattgggattgtctggataactcaggataatctccttattttaacatcaactgtttaacaaccttaactccctctttaactctaatttctctttgctatgtgacataagacacttacagtttttgagggttaggatgtggacatcgtggaagggagacattattcctcctaccatggcttcccagtatctagcaaacccatcctggctgcctgggtcttctacactgtgggctcgaatttactctccagccttacccccaagacctcattctatgtgccctgtgttccacacacaccagtccatccagatcccccaacacaccccacactcacacagctcatagctttgtttcttgcattttatcttctttgatgttctcttcattccaccctgcctccctttactcaccaccaagatgaaactctgttcatcctcggacttatagcaaatgcttctttctccatgaagctttccccctaactttttccctctggatgttcatatcataatgtttgtacctctctgtagaacttgacattctgccttgtttgacagttatttgtgtccttatctcctctgctaggtaataatttccttgaggacagaggctcatggattcatcctcatatttaatgtctgttaggcatatgcaaaactgaacccttgattttcatccacactcctccagacctactattcctttagtttttcccatcactaaaagcacctccgttcacccagttgcacttgacacaaactttggagccattctcaactcctctttccctcattcctcatatccaattcattagtaaattttaccagtgctacccactgatctaagccaccaccatcttttgcctgtcctacaggacttcctgtttcaagtcttgcctctgcacctctcactgcacaagtcagaatgtgtgcatgtgcatgtaaacatacatataaattctgttttcaactcagcagcgagagggatcatttgcattttttaaaagtctaagtctgatgatatttcagccccgcttaatgtcacagattcccatcatgcttggaataaaatccaaagtccgtatcgtgttctttaggaccctaacctcatttcccactgtccaccttgctcactgtggtccaacctcactttcgccctcatagttcctcacacagacacttgtcacagggcctttgcatgtgctatttcctcagctggtggacactcttgtctccagatagccacatgattcattacttacatcccttctgtctctgctcatcccctcatgttctttgggtctctgtgtaaatgtcacttcatcagagcggccttccctgaccaccctgtccaaaagaagagcccttcacgtattttgtcactgtctatactcttatcctgcccaaattttctttatccacctatcattacatgacatggcattatacatttatttcttgtctgttacttcccagcagaatataagttccatgagtgcaggaactttgttttgacctatattctagtctcagcacctgaatgcacacatagctcaggatacgtgtttcatgaatatttgttaagtgaacatattcatctttgtatgccctctagtttcttgcccagttctttgatcattataatagatgctgaaaaaggatttcctgattgaattttatgtatataccaaacattatataacatcatctccaaaggaaaaacaaccaagaaatgccactttttcaagataaataaaggttacaaagaagtcatcacaattctgcttagccttttatcatgtagttctgatatgatggatgtctctagagcgcaaaatgtatcaaactgaatgttccaggaaggagttcagaaacaattccaggcaggccacactgcctctcctacagtgcactgggacagggtacatgagtggatgtggagagggcctaggtgactgtgagccaccacgccctgtagttaggtacatccaacttcagcaaacgtaatgcctgaagccttattcagtcccacctaagtttttcttctccttaatgcatttctctcacttctagagtactggtttcttagaaggagccttttatcctttgtttctaggtttttattattagaggaaggggaaaaaaaaactcaaaataaaaataaacatatagaccgggcgtgttggctcacgcctgtaatcccagcactttgggaggctgaggcagggggatcacttgaggccaggagttggagacccgcctggccaacatagtgaaaccctgtctctactaaatatacaaaaattagctgggtgtggtagcacatgcccgtaagcccagctacttgggtggctgatgcaggggaattgcttgaacccaggaggcggaagttgcagtgagctgagatcatgccactgcactccagcctggacaacagaatgagactcaaaaataaataaataaataaatgaaataaccatattatctctaatcactcactctgtcttgtctcacatacaagagggcagttttaaaaactcacctttttttttttttggccatccaatgtatataattatgcaaatgcaaatgtctggaatcaagttcatttcatttaaacttattggttttaaactattatttacataataattttaaataatactctccctttccttcagaatttccttttataccgactccctaaattcagtagcactggccgggcgcggtggctcatgcctgtaatcccagccctttgggaggccaaggcaggggtggatcacgaggtcaggagatcgagaccatcctggctaacatggtgaaacctcatctcactaaaaatagaaaaaattagccaggcgtggtggtgggcgcctgtagtcccagctactcgggaggctgaggcaggagaatggcatgaaccagggaggcggagcttgcagtgagccgagatcatgccaatgcactccagcctgggcgacagagcgagactctgtctcaaaaaaaaaacaaaaaaacaaaaaaaaacaaaaaattcagtagcaccaacaatatcttttaatctgaaaacacaaatattaatcacaatgactcctttttggttctcaggttgtttttcttgcacagcagatgagaacattttctaagacagtggtttttgaatcttgtcttcacattagaatcatcacagaacttttaaaaaacatcaatgcccaggccccacccaagaccaaatcagaatcttggagagttggacccagccataagaacttctttttaaagttcccctggtgattctaaggtacagccataggtgagaaccaaagctcctagcatatacaactgtgagtcaccaagagatagtgcagtgactggaatagtagcaagaggaagttgaccccgaatttagattttgctatggttaatccacagagataatctccctgtggacaatttgttgccttgaatactctattacaagactggatatagtgattgctttagacaataaggatatgattcaaaatacaaataaattcagtaggaactcaaggtattttaaagaaattattagtcaaagatcaaatttactcacagtatcttcttcagcagcttatggcttaagaaattctgtatttgcaatgtattctttccctctcctgcctcttactgtaattaatgcaggaaactcaagggagaggaaaaaactccttattctattttttctaagaagtgatttcctaagtggtttcttgtgttggtgggtcatgaagaaaagcctggaggcggctgggattcaagacactgttgggaatctagacattctacaaagaaacagaggggaagcataggccttcaataaagaggtaaagtaaggcaaagaaaagatctaggcagccaagagccaacaggaatggacaatgggtattgcctaattgcagggacactgtggaaacactctgcttatgtacatgactctggcataatatttttattacattgaatttttccatcacactgcctataagaatttccaaattgagaatttattggtcaaaaatagaaaggtgatgctaaagaacaaacttacagtctataaatgatacaacataattataatctggataaagagatataaattggtttggctgagaaaaccttgactaaaatgaataggatgttgtccatgacttctgtaacataaatatattcttctccagttctgtcagttcctgaatactttactttataaaatgtattttgttcaggtactttttcaaaacaactgttgccaagatctgaactggcactggaaaaaaaatgattattttcaggggagagagagataaagaaaagagagaggagaaattttagtattacataaagcattgggattgcttctaggtaatttaaaaatcaacgtcccaatgatttcaatttactttttctgccagatacttcaaactgcctgaaaattgtgaagcagtctttttgtaataaattataatttgtccttgtcttgattagatattagccatttattaatgtgtgtgtgcatatatatgtatatatagatatgaaatttattagtgcttgaaccactatcttaaaataattagcaacgtttcaccaactataacaacttctaaatgatgaactgccatataatttctaaatcattactactggttggcactcatctttgacattattgatttaattctaaaaaaaaaaatgtttctaaaaccctgagatttctttttaaattcctgagcattaagaggatcaagttacaacatttgtctttgagacgttatcacctcttcaagatctttaacattatactccaaattctatattcttagtcctatatttactgcttatgtattattgatattttttaaggtaaatcaatattcatttgtcgacaggagcattttttttttgagaggagtcattcatatttttaaaaagaaatattttctaaatgtctcaaattcaagaatttactgttcaggaggtaagaccacaagttttattgcagagtgacggtaagctgttttaaatactattataatattaatgtagaatttttttcttttggattaatataaatatatcttgttagagttaacagaaagttttcctgtgaacacaagatgcattcccttttggactgtttttctgcttgatccctcaaaaaaaggaaaaatgtcagtaacttttaaaaagatacatacctttgatagttaagcaacaaggagagcagaaaagatcaagggaagtagaaacggaaccagaaccaggtgcactacaaagctcaattagttcacaggctaaggacactgctttttataagttatttttctccattgggaacagttttctgagacttcctctctctgctctccatcccgggagtcctaaccaggttttatcttttttttttttctttttctttttcttcttgcttgctttcgagaccaatagaagttgtcagagaagtcatattaggtacatttcactgaaggttttctattttcagcaagttttactgttctccagacgactcctgactgtccctaaacacaaagggtaactaggctccctgtagactcttttgagaatctatttcatgaaaactaggagccctctgtacttcccaaaatggacccgcaatattccacatttgattccgggtcgtttgtcaagccacaaaagcttatctttgaaccccaagttgaaaatgcctatgtagagcgaaaaggtgaggaactctctcacaactttcgagagtcccctcgacctttcaaggaaggtcattccatctgagttctagatgagaccagctgaagctcggaccttgaccgtgagctggagtaggtggatccccgctaaccactggctttaaatggaggaaaagttaactttcttggctccttgcacttctccaaacccagtccggtaggcgcaggacccggactgggtcgaggcctcaaaatctgagaccaggcaagacaggttttaaagtaagcctctgggcaccactggtcgccgcgcgtaaacccacctgaaaagaccggagccctggggctccctgatgtagtcattcctggtttgagcacagcctgcgccacctggtctcctcctagcaatgcgagcacacgccgaaccctccccgcgcggagtctaacaccgacgctgcctccaaacctccctcgcggggagcccctgggtgcgcggggcgttcttaccttggggttggtcaggagctggtgctcgtcgctgtgcagcagcgccctagagttggactcagagttgttcacgtagacctggacgcaggggtactgcgaggtgcccctgcagtcggcgccacaggtgaaggtgcactcgaacacctcgccgatctgctgcaccgacagcaccgtgcaattggcctccgtggcttgcagatcctgcagcgcgggactcagccagcagaagccgaagatgaagagcgacacgacgccggagatgatgagaaacaagccgagccggatgctcttgtcctcggcttccgtgtactcgtaagccacccggagcttcgccatcgccccccactctcggcggctggcgtgctccccccgccccctcccgcccccggcgccgagcccgactgcctcgggcgggaggagccgccgccgccaccgccgccgccgcgcgacagcaggggagtgggcggcgagggggagcgcgcgagaacaaaggggccgaggccagcgacgcccccggcggcggcggcggcagcgccccccagccccccagccgccgcctgggccccgcggtgcagcagccgcttcagagcctcctgcaccctcgggcgcggggagcgcacggaccgctccagcttccagcgccccctgccagcctccgcccccgcactctccccgcctcccccaccccgcctcctctcgtcgggtgtctctctgtctccatcgcccgctggccgctactccgctgactcgcccggcagctgccccaaggctaggagtgtctgagctggggcgagcccgggggctcccccgtgcaggaggaggctccgccccgccccgtccgcagcagacccgggcccttccgccccgccccgctccgccccgccccgcccgggggcgtctcctttgggcgaggggctgacgggcacaagcgacagcggcgacttgcaatcggaatcttcgctcactccccttagagggacgtccgagatgaaagattaagatcaatttagcttaaccggagggaagttaaaataataataataataagaggggagggtggagttcaagtggagcggcgggaatcttgaactccaaacgagtactggtcacctgcagggagagcggccaggctccgggcgcaccccgggaagcgggcacgggtggcggtgtgggaggacacgagccgcccaggccgggcggatcgaggtgaaagccccaggctagcggtgtgcgctgggaggtccccggggacgactgaatcgcaggttcccatgccacgggcgggctggcgcgcggtggtgccggaggcgtgacccagccgcgcccacgccgccagcggctgcgcccaagggagcgcagtaaccgtccagtcccaggacttgggcctcctaaccgtcttggcgcagacccgcgccccctgaccctgctgaggccgggagggctgcaggattggagttaaacaagctgagtcaggtggagtttgctgtggaggcaatgtgcgtgggggcaggaggctggacgaaggaaacttgctgcttaggtcgtcggtgacccttgtggcaacttaggtctctggcagccgagttgaccccaacttgatttgcccccatggctggggctgactgagaccaaaggaaaaaggtggagagctttgcagcctggaaagaaataccactttacccatcagaaaagtactcttgctttggggctcgcaagaacagaatcatttctgtcgtttccctccttaggagtcttgccacccctgacccgccccaggatttgtagatgaggtttccaggagcgctgcttaaagcgacagcgccgggcagacccactttgggacaggtactgtttctagacctgtgttctgctcttaattcttgccgttgctccctcctcccccaattacgctaacaatgcttcagcctctattgttttcgcgacctttttaaagttagaatgaccttttcccaaactacacttttatcataaaatcaaacttgagaactatttatatgtacatttcgaagaataaaatcagaatattaacttccttgcaaactacataaactttttttgtttgcttgtaagtctcaaatgaataaactcttaattatgttcctgatgaatacggaaacatggaatcatggaattcttgacttctctttcctggacttcaaatgttacttaactggtattgagtacctttcgactgcagttctgataacgttattttgaagcactacattatgacaggtaacaagtatttcccagcaatgggcaaattaattacaggaagatcctaagtgtctttttctcaataaattaagaagatgtagagtttgaaaaacgtccaaattaggaagatgctttgttctctaatacctttcaggttttgagattttctttttttaatttaaatgtaagaattgtattcttttcctgttagcataaagacaattgtgattacattgcttaaaagtgagtttaataattgaaatagcataaccgaaaatcacaaatcttcaatctgaatctttttcctattgcaggaaaaataaaaaacataggaaataatcttttttttctattgttataatcttcttttccaagaaaggaaaagctatgtctaagatctgaagcaatgatgaacaaataacaagatacaattattctagctcagtatgttgaggaactgaaatgaggcagaattaattcctattaatgcacagcagttgggggactaccaataatttaatgaatatggttcgtttttcaatgattccagagctcaaagtcttctgtgaatgaaacctctgcctcaaaactgaagtacggtggtctaagtctagggaacaaaatcagaaaattctatcttattttaactgaaattcttgaagttttaaaattcattttctttcagttctgcatttagtcaatttctttcttggcaattattcttaaagtatttaaagaaacttgtgtcttctgttctctagacatttttttctcctgtttcctgtttttaatttagcttttctctgaacacttttatcttcacatctttattgaaagtcaaacgtattaagacttcacaaattaaatcaatttctattttattcttaatgaaacactggaagtgtttattagttttacttacttgaagcggagctgctttatcacattcccaaggaagattggatatgtcagcccctcagtttcagaatacaggtcaccacttactaagtcagaatggtagtaagaactccaggaaagctcagaaatgctaagatctgaggtcacttaaaatctctgttccctgtgaaaggtggaagtagcacagaaaaagcagctagtcctttctttgaatagtgttccaccaattaagattaaaaatgtaatattaagaaccagactgacttatttgatgtacatcgtctgcagtagtttttccagtaggatcatggccaggtcttgataaagttcaatttaaaagaaaaataaagcctgtctaaacaagggcatcaaagccatgttacttataatttgttctcatgatcaatattcaaaaagtcctgtggctgatgctaaagttgcagtatacaatatcatatgtatatatactttttaataaaagattctaaaaataattttaaggcaggcttttgtatcctaggaatagaagggaatttacagcaggtgggaaaattttttcaaaaattggcacattatgaagttttttgataactgccactaaacacttgaaaagcgaaaatacataggaaaataatgtataatcactttttctattaaaatttacgttctagagtttagaccttttttactagatattacacatgatgaaagtatgagtgatccaacaaagaaaaccatataaaaccattttatattttcttcttgattcagcagctataattatagattttgttaatgtcataggaaattgagttccagcttgctgataccaaattaatttccttgccatgctccattatgagtgttaaatatttgttattagcctcagaattttaaattcaaaatacatttcctatgtggtcactattttttctgattgttttttcctggccataaacttcacctattaaaatgagcatataattattactaagaacactacttactatctctaattacagtaaattagaacaggaagggattttaaccattgcctagttcaacattaaccaagaagctcccagactttgcattttgcttgtaattgtagttatttaaaatattttttaaaagctcaaatttatgtttgtgtatagcctttatgtttgcaactgaggaaagcaaaacacagacaatcaattcacattttttccattaaaatttacattctggatagattagcaaatttttaataccatactggtagtgctctagagttcctaaaatctcaccaactgttgagtctttcatgttaactgcagtgaatctgtatgggagagatatacacaggtatgtagtaaaagggaaatcagctttggaacttgaaacatagaggccaagaggttttggtcccagctttagtagtaaataatttgacacaaggtaaataatcctcttagtctattttctgttgctataactgaatacctgagactgggtaatttataaagaaacttatttcttacaattctagatgctgggaagtccaagagcatgacagtagtatctggtcaggtccttgtgtaccctaacatggcagaaggcagttccatagcaagaaagcaagaatgcctattaactcaggccactgtacatataaagccaccagtcccatcaggccccacaccctgatgaccttatttaatcctaattatctcccaaaggccccatctcgaaatgccatcaaaaatatgaatttggggaatatgttctaacacattaaatttgggggacacttttaaaccatagcaatattagtttcctccttgtcgtacaaaagggttggtctagaagagttttagtattctagtatctaattcccatttttgttttgccatgcactttagaaaattgggtattgctatataacagtatctagtgaagttaaaaggtcttgaacagaatccaaaaacatggagagcctgtcctagcatgatggctaacaggaagagtgtttgtctttagagaaatggacctacgtcgatgcaacacctaatataagctaggttatttacaaatgccttaatttaaccttcccatgagaagaagagggaaaaacattcagagattaggtaatttttgcaagactgcacacatattgtgacagggccaggggattttatatttgcattttacatagtatcttatatttaagaaatactaactactcgaagataataaattacctaaaacaatttttctactatactatgccacttctaagaaatttgttaacaaaaatgaagtgtagataatacaaaaagcatttatgaatggatttaaaatgtgtttctatacttatatttaagtacagttaggcttaatcaaaatctctactgtgaaacgattatgaaggggacggtgagtagaggctgaaggaactaataatttaatctggtccccctgcttaattttactctgaatcacatttgtgttgaaaatagcctcttcagatgcttagcaaatagtagtagtactgttttatgtggaacagagagattaagttaggtttctagtggcttgctaaaaattcaagctaaaattcaaggtagaagtaaatacagggaataactagatgtgcaatagttataaggcagaaggaaatcctatcctctgcagactgaaaagcatcatcgaatatttctaataatacttttttttttttttgccttttcttggacacttccagtgatggaaagatataactcctaatgatttctggaacttttgaaaaattataaactggtactttattactgtagattgaaatttgccttgccataacagctatgtaatggtccttattctgtcctctggcgttatgtaggataaagatatttttaagaataaagccttacatgaggcagaatggcgtgaacctgggaggtggagcttgcagtgagccgagatcgcaccactgcactccagcctgggcgacagagcaagactccgtctcaagaaaaaaaaaaaaaaaaaaaaggattaagccttacaaatgactctacctcagaggtgagaagacagccattatgtctctcctaggccttttgttatgcacaacttccagtttcttcagtattctcttttgatatgatgtaggaaactaaggttttacccttagtccaaaatgctaagaataataagtcaaagttggaaaggatgccccactttaacattcgaaagtctgagcttttcttttccatgatattccaatttacaaacacttctaggataatggattttgttgttcaatgacagtgtcattgcaaatgtagggaatttggattcctaatagtgatatacaagtcaactaatattcaaattttagacctatattaagtcatttagagtgaactgaaaaaaattatacaaaactttagataaaaaaagggaaatctggaaataactttttgagcagaggagtaacatgacttgcattttttaaaactgagatataactcatgcaatagacagcatgttatatttgaagaatattaaccacttgaagacaataagttaaaacattcaaaataaaaaaacaaacatatctttctcttaagaggggaaatatttaactcaaagacagcccatttttcatgcactgttacatatggtaattaaaactccatcttaaaataaatgttcagtatgtaacagatttaaaggtagctttgaaacattctggctgccccaaatctttatttttatacataagaagatgaaactatttatatcattccctcatgtaatgttttctcattcagatgtataattttgaagaataaatgtttaatttaaaatagttttctcattataaattagtatcaagaggcctgattctaaaaagaatcaagcagactcagcgatttgtggacatcataccacccttgaaatttgaagtattcttccaaaatgtttgaagaattcatgtattatcatcaaaattatcttcattatgcactaggaaatagtttggcctggaagaaaaaagcatgtattgtaagttttaaaagtaaattatatggtcaaaatgtcacttaggccaaaaataaatgcaaatcacaaaaacattacatttcaggaaacacatacaaattagagaccagctctgattcatagtaaagatttgttttcctcagctagtgccttcaattattgtctaaaagaactaacacttttggcataaagccagttttatttaatcttctctaagaaagatgtcaaaacattttggtggtatggtatggcctttcaggcctagaaatgaaaactaagataaatttcaaaaagaatgaaaaattggctttgctatgtagaagatagtttaagtattttagcacatgtcaactggttatcatatgctatttgactatgcaataatttggattttcaagatagagaattatgacaattaggaccttgtgaattttgacactttcaagaagtcatttaaataactgagagaaaactgtacaataaacatggaaatgactagctttttaaaaagccctataaatcttgagttcttatgataaagagacatgtcactaaaatcttgtcacagtatttacacaactgtttaattggattaaaaaaccttcaattaatgcatacataactgataatgtaattcccattacattatcagtttttatacatacaaactgaagaggaaatcttaagatcagcagaaatattcccaggaaataactgagataaaagcacttttgctgttttatatttatatatggattcagctttcctcctgttctgctaacaaatactattgtagtaacatggtttctgccctagaacattggatgttataggaaaaagtaaatgaatgcccctgatacacagggattataatatttagtgggattttaagaaacaagattttattctacttagtacttgtacccaggagattgcacactaatgcaacgtacaatttcagactaaacatttacgtcaaaacttaaaaattgtctttttcctctttcaaatgtagaaatatacacataaataaatctggtgaatacacacatacatatgattactatttgttgtgctttattaatgtttcacattcctactcctaacatcaaaacaactctacatgtaagttcaataaagttgccttttgtaattcttttttgatttaaatttctttccaaagatatagcagtgattttaagtataccttatccatgattcacagaacagcatattcttatgtacttaaaggtcaatgctttaagtatataccttttagccctgatgacatcatagtctccaacttcaaatcaagaaaagggtatcagtaccttaaagagctgaaaagaggtctggaagtaatcacattcaactttttatttaaaaaggcagtcctgtcaactaattgagagtcattcagtttgtttgcacattgactgaacctttacttcatgaagcagctagtactgtgtagcaccttaatatagaaaaagtctgtttcattcaacttctccttattggtttgagacttgccctattccagttcttcctgtgtttgatgacaactgtcatgcctccccttagtattctttagttgtctccaagacctacatctcatcaattctaagatgcacgttctttcttcacataatagatacattctgtaattggcagcttgtcttagtggtacataaaatggtgtcccttacaattgatggcaattagatttgctgaaatacagtaattatctcacttactttaacactttttcaatgagccacaggaacattaagacattcaactccttaccttatgcacagaacactatccagccagtctctcctaggttatgtcctatgaagttaaatctaacgccttacaaagcaactgatttaaaaatctgaattaactcagttactttttaatattgcactgaaatcccttatttgtcctagttctgctcttccagtcacaagaatgagcttaattgcctttcattgacagctcttgaatttgatacctgaagacaaataccatgtttccaaaattgtattcctatttgtttttaaaatttactctaaaatgggaacactaaatttcacctcatgatgctattcttcagacaacaatgtatataaaaacacacagcatttgccaggcagctagaaggcatgctacttctccatccccttctgccttccccaggcatggcagctcttctaatacagcattcaaacagaagatgacatttcagatgagtgattacttccagtagagtgggcttcctatctttttctgagtgctatatttttcttaatgtagctgaagattacattagtatttttggcaacaggatcacaattcttactgatctatatatgaaccactcaaatcatgttatattccaccattctttattaacaatcaaagtgcaaaactaagtaattttcttgattgaatgtatcctatttgattcaactctacacaccaaactacttggttagatttagatcccaattttaaccttcagtgagtttatttgcttcatcttccagatctgtcatgtattcatggtataatcaaagtcactggtaatgccagtggcaaggagacagccttgtgacctgccattaggatccaacttttagaaagtaaaggcatctcaatgtctggcttagttcattctccagagactatctcaatggaacctagttagtagatatttctagatcttattaactacatagacaaaccatggttaatgtattatacaatcctgtttccacacacgtataggttttcagcaactttttgcaaaattgagctattaaatctaagttaaatgaaatgagtcctactgtacagccatgctcagatgccacatattttatgagcaatggatataacaaagtggaagatctatggcttgtgaatagaagaggatttatcaattagagaagctatagactggaaaaatttgaaatatttaaaagttattgaaaatgcttaaaaagattattgtgaaaatgaaattatagcaaatgataattgagtaagctatctcaaagcccaatgctttatactttattttcaaattgaaatatcaacttttatcagtcaacaactatcaagcacctgctttgtcccaatttcagtgtcaaaaagaaacagactagttatatatactttaagaattaacataaactttcagttcttaaaatgtattatatctaaggaaaactatttgtgtagttaagtctctgaaaatagagctttagcatataaattataataccacctaaataattatatttgaaaccaaataaaggatttccctttgcaattaaatagcttttattcccagaaagccaatcatagtttaatctaaaaaatttatttaacatagtgtacacatctatttcactagctatatagggggaaattaacagaattaaagctttgaaagaaaatgtgaaatataattagttggattcagcctctttacatgtataaccacgttataaaatcaaggcgtattataactgttacatttaaaaagttcaaagtagtgttttaaatatttcaaatagagtaatttgtattttgaagtccatagcatggtaatttctgatattaacaagttataaaaagttggctaacatgcaagagtttcttcattttgatgattcaggataaaaagaactcaaaaaaatggaaaagtgtgcatttaaaactctgtatatggcagttaacaaaaaaagagaaaaaaagattacagccaagacaacaaaccacttggtatgagctatcttatttttcggagtcattcatcagtaccagtcatgatcacgcttcagctgagacttcaatctatattgttgtttatattcatgagaataaagatccccttccacatttttcttcctacttgttttttgtggttatgtaggaaaaattacattttattttacaaagtgaattactaggaaaaatgtaatctttttttttctagattgatttctatgctttgactctggtttatgtcaaataaggtatagtgttctgtgaaggtttgtgcacaatagataaaatgatttatatagtgctatctttcttactgaggagatgctttggtttaattatgaaagatagaaaatcctgttttttatagtgtttctcatatctcaaaatgcatagaaaaaggtaaattttaagccactttatattcctggtacacaaacacagcaatgtcataaatgtttcattttcaaaagatttggttaatgccaacagacttttactcttcatagaaaaataggttaaaaatgaaaatttaaaggatcaaaactcattgccttttttctactctctagttctgctttggaagcttcaatcttctgatttttaaaatacagtatttgtatttagatgggaaaagaatccactaacttgtaaatatgagatatctaggccagcaaactgaaggtaaagtctacccattcccaccttatggcttaccttcatttgcacattacttcttaaagataaatttaaaggtctatcaagaaatttctcataaatttttcacagaagtactttggttgggttccaagagtattcagaatgttttatttctaatgctgccacaacccatttaaaaaagttttctctgattaatactgtctacatttttaacctacaagtgaaacggttcactatatttccattaaattacttgttggaagctgaaaaagacatttgagtcacaccattcagtttgatatctgtaaaacttcagtttgtttcctctatttttcatgttgaagaaataatttcgcaatttcaaatcaaagccaacactgcagtgaggagagcttttctactttattacaaagagaagaagcctttatgtggtcagaaaatacaagattgatctttttttctcttcctatgaaacgctgctgttcaaacagccagagtgaattgtctcagttcacttcttttaagtcccatcacattcacttgggtatggatgtccttggctgctgaaaatctggcccttttagtgcacagggcgacaaagtcccctgaccagcagttccagaatgtcccattttcatatattgcatccatgcacacctcctaaaaatgaggtacagcagggcaaacattttccaaaatagatgtcatatatataatatatacacattcgtacatacatacctttattcatgtgatgtccaaaaatttaaaaaaaatgtacacatttattacaaaatcgtaacaaagactggacagtgttttgctcattctggaaagatgaagctcagtaataacacaaccctggaaaaccatccagagattgtggcaatatctttcttctaaacagtcagatattcttgcattaagcttggcgaaactgcctttcaaaaacagaaggggaagtaaaatgaaggaagcagacctcttgctcatctttccaaatgaaatacgagaaggatcttcacataaaaatgcacaaacatttgttattttattaccaatagtgctacaatgaacaatgcaaaatttgtggtc

SEQ ID NO: 67 - DNA, 79656 bp, Mus musculus
taaaggtatgtatgtacgaatgtgtatatattatatatatgacatctattttggaaaatgtttgccctgctgtacctcatttttaggaggtgtgcatggatgcaatatatgaaaatgggacattctggaactgctggtcaggggactttgtcgccctgtgcactaaagggccagattttcagcagccaaggacatccatacccaagtgaatgtgatggggcttcaagacgtgaactgagacaattcactctggctgtttgaacagcagcgtttcataggaagagaaaaagatcaatcttgtattttctgaccacataaaggcttcttctctttgtaataaagtagaaaagctctcctcactgcagtgttggctttgatttgaaattgtgacatttcttcttctccagaaaaacacagaggaaaacctcaggttttacagattctgaatggtgtgacttgatgtcagtcgtcctcttcttttccgatgtcggcagatctgttgatggggccaccctgggccccttacttaggaaggtggcctcagcattagctgaggggagcattgggtaggttggagctacgttgcaagttagcacctgaccagggtgggacccaaccagaaagtttgttctgtgagaaattgatgaggaatttggtggtagaaatttgagatttatttagtcttcatgaaatttaccttcagcttgctgacctggatggttcacacttgcaggtgactgaattcttaaactgtgtggaggcaaaactgtggcttaaactgccaggaggactagagatagggaacaggctatgtggaatacaagttttcagtttttatttttaacctgttttcctagttgagtgaatacttactgacatagcctaagtaacgtttgaaaagtaacatttatgaatgctgtttgtgtgtcaggaatgtataggaactttgaacttaaaattcacccctaagcatttagagatagccaaaacggatttttttttttttaaaaataccatgattgttaaaaacattgcagaatttagagcaccacctcagcggtaaaggtgacacttcaataattacagttttaactcttgtgacaaaaatcacaacagatgctgcactatttaagatatgcctcatccaaatcgttgataccagtttccctcaaatagtggtgaggtatatcttaaacagtgcgctctctgttgtggtttttgatacttactgtgaactttaaccttataaaataagactccctatgcaaccgccagcaattggtgggcaggagaagacagtaggagggagggagggagggaggtggtctccaatgattgatgtagcagctgaagcacggtcatgcgactgacaaacaaggagctcacgtcaggtttgttgtgttgggtctaattcttagcagccataggcagaaaatttaagtggacacttatttcagttttccaagttatttttatttcagagtcggagtcatcaaaattaaggaaagttgcctgttaaacgttgtttttacaatttggtgatgtcacaggtcaacttgacttcaactgtaaattgaaaatgtacatttgaagttccaccctacatacaaagaaattggctgaaactatatatacattccacattttccccttagatttggttctgtttgtggttgtatggttcatttcccccagtgaagcaaatgggtatgctctgcccataactcaccgagtgtaactggctttgtggaacggaagctagtaccctgcacaacgcaaccctttcacctgcttggatgcagagatctgtacttgaggtgcactgtaacatggtaaaacgcttttctggaggtgtttgctgaaattttccttcaaggtaatcttccttaagaactgagagtatcttgcactatctacaaaagccaactgcttatccatgggtattttactaatacttgttgatgaattggcttttttttaatcatttcagtttgaaaatgtacaaattaaatcatttaggcattgacataaatctttgctgtaatttcattttcatgaagatcttgaacattttcacttagctttcgaaacccaacttttttccgtgtacagtcaagttgatcttgaatccttccattcccaagcaggtctcctgaagtcttaggccttgcccataaaacatgaggcgcctgagcatggccctgcaaggctcacttcatttacatttgcattcagagcatcatttctgcacaaagtttctacaaacacacgcacgcgcctgcgcacacgtgaaaagagaagaatggaaatgttctcaactatggtttgtctatgaagtttataatgacttagaaacatctgctaaggaggtaatctttaagatgtgcggcagtatagctcactgatagagtgtttgccctgccatatatgaggctctaagttaaaatccctgatcctgcacacactaaaattaaaaactaaagaaagtaaattaagaaacttagtagtatgctttcaagaatgtaaattctcatggcatgtcaccaagttcctgttggcgatgacatttaacagtgacttggatcagatttgggagatgaagcacataaatgcattgaaagagaaaaacaacccagtagttttaatatcaggttgaatcaagtgctatacattatctcaagatcgttagttttcagcttggatggtaaaacgaaaaaaaatggcttaagagtggtttatacatagagcaaactgatgattctgcttctactgctaaagtaaaaactatgtgtaatcgggacacggtaagaatcagccgggcgtggtggcgcacacctttatttctagcactcgggaggcagaggcaggtggatttctgagttcgaggccagcctggtctacagagtgagttccaggacagccagggctacacagagaaaccctgactcggaaaaaaccaacctcccccaccaccaccaaaaaaagaatcactgttttgaatgttatacatctgaaatgttatgtccagttaaatgctcttttggatgcttgttgcatgtcccttcctgccttctggctgccaggtgacatagtaatttttacatacattattgttttgtatttaaagaatagcattgtgggtgggtttactgttgcatattttatagaaggcttcagatgtcatcagtgcaaaaggaaataaggacgggcaacactgtagagaaaagggctttggaaaccgtatttcccttcaagtatcaaattccaaggctgtccgtgttcatgtgtgtggcaaaaagctaacaagcaccagtaaaggttttatcagtgtggtaggaggggccacagtaactgctcttggttttgtggtatttgggcttaagcatgcgtctcaataaagctagatacgcaagcacgctgtacctgcgagccgcgcccgcagcccagtgatccagggcctcagatacatgctttttgtaaggcgttacttttggcttcgtcgaacacagtggatgagggactggttggccagttctgtgcatgagggaaggcactggactgagggttaacttcctgtggctaactgaaaaagtgtaacaaggaattgggatagctagtgtatttctgcctatcagctagaaactcttcgagtccatcagaaagtctcagaggaagaccgcccattacaaagtgcattgcatttgtaaacaagcacaaacacaaagcgtgcgttttacagttggggaaaacatgggaccttaactaaaagccagagagcaaggggaaacatcacagttatcttcaaatacaggaagttcaaaagaaggctaagtcttctactcaagaagtggaaggtgagtgagataggatatcatcctgtatcaatatactgtatcaatataaagtacatccttaaagaatacgctgttctcggaatggggacgttttacttaaactacttgggggtaagtcattgcaaatttagttacgtttgtcattttccttttcctccctctagttggcagaagcagacatgtgaaaccggcaacacatattaaaagtattcattaggttattttttttagttatatattggtaagaggaacagccagtttatgctgttttgaagtaaatagcctgaaacgtaatatgtgacattcacgttcaatctattttctacaatagagaaaacataaatcaggttgagcaatatttctattacataaaaaaattgatgggctggagagatggctcaacagttgagagcactgactgctgctcttccagagatcctgagttcaattcccagcaaccacatggtggctcacagccatctgtaatgagatctgacgccctctgctggtgtgtctgaagacaactacaatgtactcacatacatacaataaataaatcttttaaaaattgatcattgagtttgacttataaatgcctgtttgagattcctatagggattttccagaagcagtgaaaccctgaagtgattcacctggaggccgtgtagagacaacagcgcccatgggagaagccagaaagctacttcagatcgcatgaagttactgccgcctgtccactttatacttggtttaatgtataaataaggtcctggtgaactctcaccaagttaacattagagtaaggttatatgccagaggtgctcacttgtatttcctgtatcacccagtgtcctcactgcgagaccagggctttacagcactagtcatcagtgggtcaggtagaaagggaactggtttccaaacataaaatgcaaagtgtttacctctattgtgtctgaagactatttttgctaggtttacttgtttgcataaaatctaccaaaagtaattgtgtacattatcagtgtattcattaagggaaagttgaaaatccagtaattcaggctcggcattttcttaatgctgtaagcttgtaagatttcagtattcatggaccacaaaatgctaacaacaacacacatatatatatatacacacacacatatatatacatatgcacacatacatatatatcaaaattttctgccaatcatttaaattggaattataaaaactacatggcttactgtgttgccaatccaaccaagttcctgtgtaaacagtacacaagcattggctgacagaccgattttgcattccttttgttcatttccagggcattaggcacctgccttgcattagctatcttctgataccttgctaggtaagaatcagtgtgttaagtcctctaagcagcattttgggtaccagctgaggaaaacagttcttaatttttaggcttatgtgtgtgagtgttttgtctacatgtatgtgtctacatgttccgtgacctaagtgtccacaagagtgttggattatgaatggttgtgagtcacactgtgtgttgggaaccaagtccaggtcctccccaagtgctcctcaccactgagccaactctgcagccctaggatgtgacctcctaatttgcatagacaggtcataaaatgttagggtagtttctatttatatttgacctaagggacatcttggccacataatatttgtcttaatttataataaaggactttttccaagacaaatttgtttctcctgcataatggaaataattttgctagtacttgagttcttcaaggaacatttggaagaaatgcctttaattcaagggtgataggatttccacaagtggctgagttagtttaacattgtggcctctagatacgcataatagaaaaacttaggtaaaacctttaaaattacacacttcaatatgaagacatatgaaggaatgacataaatagtttcatctccttgtgtataaaaataaagatttggggcagccacagtgtttcaaagctacctttaaatctgctacatactgaacatttattttaagatgtagttttaattaccatatgtagcgatgcattcatttggtctggttttgagttgttaaatatttcctcctcctaagagaaacataactgtcatgttttaatgtctgaacaattaatattcctcatatatgctattacataaaacatacctttatttaaatgccatttttgttactgtgcttaagaaatatttctacatttacattatctaaagctttgggttattcttggttcattctaaatgtagatctaaaatttgtatattaaattagtttgacttgcaaatcctattcagaataggaactgtctactgaagatgagccaatcactgccctggcttctcgacatttacagtgacagccctgaacaaggtccattatccctgaaatacttgcaaattatatggtgtggaaaaggaaggtgcagactcttgtttcatagagcattaaagtggggtttcctttccaattttgtatcatcctttttcttagaatttaaggtaagggtataaaactttagtgtcctaaatcccatcaaaagaaaccaaagtagcaggaaaatgtgcctgaagaaaaggtctagggtaaccgaatggctgcatatgtcttaataggagtcaattctttctaggttgtaagaataaactcttacaactgtctttaacctaaataaaacgagatgatgtaacaagcaccacaatgttacagcgaggcacaaagactaagttataataacagttctatttctttaaatgttccaaagacagcagtgggtagagggtagggatcaatgtatttcctatcattagatgtgtgcagacaaagacacggaaatcttactggaaataccaacttctctctcacataaatggggtaggatttccttctactctagaataatttagtgacttttgccaatgcctgtttatctttgtgtgtgtgtgtgtgtgtgtgtttgtagcttgaatctaagcaggaatatgattcagaataaatgggagctagattaagccatgagccccaacattcctctaccagttgtctccttcataggtttcctagtgcagatgtggaccaacccttggatataatgtatttgaaatttatttttaatatatcatcctggaaatgctaatctctgactttgtccctcatgagattaatttcgaacatttgtgagtaaacctagtttgtagagtcattcagcaaatgtatgcccatgcccccaaggatactcccacatgccactgtggggagatgttctctggatttgaggagtattttagaatacccttgactaggtgtttattacaaagcaatacaagtttttttgttttgttttttaattttagaacaacagttctattttaatcctagaatgttaaaaaaataattctaccccaatcttttcatttgaaattattgttgattatatcagatgaatagagctggggccaaagctaatactcctctttctacataaatatgtatcccctataataattcattcaccatgaaagatggtgagaatttaggaactctaacactagcagtgttttttttttttaaataatagagcattaatatctaagcaatgatgagggtgaggcttgtgacgtcacaccctagctgaaacactatggctgttgggcaaggagattgtcagtttggttcagggcttcaggcttcacctggctgtttgttcatgctccagtgggatggcctgtgcacatacagcaacattaagtggactcagtgggtttaaaaagagttcatgaagttggggagggaggggtttgggggttatggcaaggttggagggaggggtgggcttgatcaaaacatatatgcatatatgaaattctcagtttttactattaatacaagctgcttacattttctgtgtctgggatcttgcttatctgtgcttggcctgtgtacaaacaaatttcaaacttttaaaaataaattactttaaaagtatttgctgtttcaatgaggtgtaaggtcttagggggtgtcttggttaattttgtactaatattttctaagtatctggaagtactagtgttctcagttgtagtatgttcggtgaagtaggtactatttatgtctggaaatttatttcaaatctaaagcctaaggagataaacatttaacaatggagcgaaacaaaatttggtcgtagcaggctagaaatcatttagtaacactgaaaaatcttaaaagttaatctttgtactttaagtgtctgatgttttgcttgcatgtatcacaaacatacagttcttgaagagtccagaagagggcactggatcccctgagctggagttaacagacttgtgagttgccatgagtgggtgctgagaatcaaactctggtcctctggaagaaagtccagtgttcttaaccactgaaccatctctcctgtctcctgcaacctttattttaaaattatattattattttttaaagatttatttattttatgtatatgtacactgtagctgtcttcagacacaccagaagagggcatcgaatccaattatagatggttgtgagccactatgtggttgctgggaattgaactcaggacctctggaagagcagccagtgctcttaaccactgagccatctctccagcccaattttattatttttaaaaacgtgtgtgggggtctgtaagtattcgagagctggaggaaggaagtatcagatccccagagctggggttgcaggtgattgtgcactgcctacatagatgttggtcctcagaagaactcaggtcctcacaagaacagtatctgcccttaactgctgagtcatctcttgtcttagggtttactgctatgaataggcaccgtgaccaaggcaactcttgtaagcacaacatttatgtgaagctggcttacaggttcagaggttcagtccagtatcaaggcaggagcatggcatcatccaggcaggcacagtgcaggaggagctgagagttctatatcttcatctgaaggctgctagaagactggctcccaggtggttaggagaaggctctcatttcccacccccacacctactccaaggccatacctcctaatagtgccactccctgggtcaaacatatacaagctgtcacatctcttcggtcccaaactaaatattttaaagttaattacgtgtgagttgggaaaataagatttctataagattttctttgttgtattactagtttcttcctctcttgttatagtcagtagcaaatgtttaaaacttttccaaaatgtgaattttaatgaaaagggtgttaaaatatggcttccccccctagtctgtgtagttagctatgcacgtgtttactatgtttgttatagaaagcctccacgatgtgctgattctggaaatgacagacaggaacaacatgctctgttcctattcaagtcttgcatgcatgtgagattggatgctgcacttctaacgtaagccacagaagtttcccgtagagtgttgatcactaaagcaaacctataggggctttaatgttcatcttggggaaggttttgcttttcttctaaatgaaagctcactggggcttgctctggctttgagagaaccattggagacaacagtgttctatgagggagtctggtgccgaatggtgtgtctttcagtttctgtggatggcttactattcatagggaggtctcgcttcctctcctgtgcagtctctgccctcctgggaacagaaggtgccaagttgacctgtggttcaacctttccgaggccccctgggttcttcctgtccttctgacttaaagtcaagggttgagcgcttttctgatacaagcagcctaggtgggaatgttacaaggcagccctaccactaggagaagaaactaacacggatttctagtgaatccttcaaaataaaaaagttgatttcgtctgtgaagccttcagatctgcttcccttaccacagaagacaagccaacttatataggaaaacaaagaatcaaaatgaaatgtttgaataacacaaagctggagagagaacaacagcttctatccctgtgagaataaacaatgaagaaagtaactgaactaacatttgagttaagacagaactccctggccctggtttcctaggttgtaagcagtttttgttgttgttgttgctgttgtttcattcacaacacttaaggcgcccaggagacactgaactgtgaagtgtgtaaggtaatggtgttacgttacccttagggctctgtcctgggcttgctgcacgttgcatgaattactttatttagtcccttagccttagcggccctgttccgtgtttattcacccacccctcgtccccatctccaatcccagaagaggttgcttttttgaaatgaggattggcatctggaatctgtcgaaggaaaacactcagcgaagatttgcgatttcaggttaagacgcttcagctttggagctctcttctttatagccagcgtgtgcctaacaaatgccttgacgccaacagggggggaaatctcaggcagaaacaaacaaacaaacaaacaaaaaatacagtgtctgctctcaaacggagacgacactgagacatctttgtgattttaaagtttttccaagtcctgcagcctttttattcattaagaaaaacagacactaaaggtctcctttaccattgtttggaaatacccatcagcataacatgccagaactctgtcagtgccagccaaagggtttgaagtctggtagagtgggcttaacatttccatgacttggcaactgttattcatcaggagcctgagttcattcatctaggacttgaaagacaagaaaaggagggttaaaacaacaacaacaactttattcttccaaacgcagctctaaacagttctcaagtttggttttatgatctttaaaaaaatgtaggtaaaaagcaaatttaaacttacaaaggaaaagtcaggagaatagaggctgaataaaggtgtacatcgatagggtggagttccaaagtgtctgcaagccgcggtcgccttgcacagagctccagaaaaagctcacctgcaaatctcagggccagctaagggtggcaatattcctaaagaggccaacagagtctgctctcaccagcccgaggccaggctttgccacctgtttgcgtccaccccctaggggtcgttcccgctgtctggcacctatttttccaggaaagtccaccgacgctcaaggctccaatcgtgttagcctgcacggtcccggtggcggcgtgggatccgcggggacctccggctcccggccgctcgcctgtgggcatccccccgcgtccgcgccggtgccctctgtcgctcgccgccaccggagctccctttgccggtgcgcctgctgccccgcagctccccggatcggagtttgaagattcccgcttcgcacgctcacgccatcctcccccacttaaaaaaattttttttttctctcttttaactttctccccagccacgctccctcggtgctaagcgttcgcctcgaccgtctccgccatctctccaggttgcatctggcgaggattccgagagcagctcgcggcggcccgggtgctcgcccacgggagctgcggggcgcggcgcggggcggggcggggcggcggcgcccagggcggggaggagcagcctcgctcaacgcggagccagggctcagcagcccagtcgctcccagcgtcggggcgccgggcgctcggccgcggcgatggcaggcgggcggcgcgcgcggggaggcgggcgcggggcgcggagcgcgcgggggcgggggcgggctcggggagccccggggtgccggacgctgtgaggcggcggtggcacccgggagcccggcctcgggcagcgccgtcgccgccgccgggggcgtcgccggcctcggcccctttgttctcgcgcgcgccccctcgccgcccactcccctgctgtcgcgcggcggcggcggcggctcctcccgcccgaggcggttgagctcggcgccgggggcgggagggggcggggagcgcgccagccgtggagagtggggggcgatggcgaagctcagggtgtcttacgagtacacggaagccgaagacaagagcatccggctcggcttgttcctcatcgtctccggcatcctgtcgctcttcatcttcggcttctgctggctcagtcccgccttgcaggatctgcaagccacggcggccaactgcaccgtgctgtcggtgcagcagatcggcgaggtgttcgagtgcaccttcacctgtggcaccgactgcaggggcacctcgcagtatccctgcgtccaggtgtacgtgaacaactccgagtccaactccagggcgctgctacacagcgaccagcaccagctcctgaccaaccccaaggtaagcgcgcgggagctcccgcctaacagtgcaggttcggggccaacgtcccggttagaccccaggggaagaatcgagtgcactgtcctcgctcggagttgatgcgagggaggcatgaggtgcatgcacgcatccctggagcccagggctccagacctcggggtgtgtttgcctactgggcggtggtacgcgagcctctctgcaaacagatcttttctgttcttagatttttttgagctccggaccaccccaggtccagcgcctgcgggaaggggttgcctaaactcaaggagcaaagaaagttaacttttccttccaatgtagccatgggatagcccaggacccaggtactccagtatatggcctgagcttctatggggctcaagaactcccttctttgagaggttaaaggggtctcttcgcttctggaaagtatcttaagtgacttttgaattttagttctaaactgaagtttttaacttgaggtctacagatagacttgggatggtgagggtggggtcaacagccatcaggaggaatccaagaagagattctgatgaggtcgggttggtttgcttggtgctggtggtggaggctgaagggtcctaaccactctgagtgtttgggcacaatgagaagctgtaactaaggagtaagtaggagaacaacttaccgaaaatagaaagcccttgatgacatataccaagcagcggtttcctgacaacttcttttgttgttacaggggaggaaaaaaaaaaaaaaagagggaaaaaaatagataaaacctggttaggactttctagcctctggagagcagagagggagactcagaaaacttccccggggtaggaaagcacttataaaaagctgtgtccccagtccgtgaactaattgagccttgcagtgtgcctgcttctgcaggagggttctttgatgcctgtgttcctttctgctgccagctgaaggtgtgtatatatattcaagttactgagtccttgtacttcctgggggctgtgctggaagacaagcagaaatcattccaaagaaaatgagtcctgtgcgtgcaggaacatgttctcttaaatgtgaccagatagattaatcggaattcattattttaaacaagatcactaccgctgtgcagagaaactcgggcgtaactcacttatttggaaagttagaagaaactagtctttgaacatatgatggactcctcaatggaaaagtctcccgctagtgcacggaggctcgtttgcttttaaaaatggagctaatccaagaacagtaagtgtagacgtgaacatttggaatccagtctctaaggaccaaggtcttgccgaagtgatcggtctcaaaaacagatgtgggttaatctgcatagtgcttgagaatttaataagaggtctggtggctttgagaaagcattgtaaaaatcagaattaagtgaaaaatatctaagaaaggtgtcaagtagtaacttagtgatttggaaggtgctctgtagtttgccatacaggtgtagtcatagttggtgaaacactgctaattatttttgagatagtcgtttaatcaattatatatgtgtgtgtgtgtatacatatgtatatgtgtatacatacatacatatatgtgcatatacattcttacaaggtaaattctaacttgtatggttaatatctaattttggtgtagacaagttaggatttaccacagaagtcaaccaaagtttccaggcagttttgcaggattctggcaacagggataagttggaatcattaggacatcgattcttaaataacttggaagcaatcacaatgttttatgtaatattaaaattctctctctctctccacttgcaaataatcttatccccccccccccatgccagttaagaacttatcaatagttgaagaagtatcaaacaaaaatcgaagtggtcagaactgggaaaaaatgacatctttaatggtccggaagggtgataaatgacctttccatcaatttatgcaagatttcctctgccaaatacgcatctctttgtccaaattgtgatgtattgtagtatttatagaacaaacatcacttttttttcccccaattagatgttcaatttggaaatttttgtaagcactttagtaatggaaaaatctcagtgcaccgaaacaccatgttagggtcagactcgtaagaagattgagtttctgtggcgtccttgcgcctagacaatcccactgcccagtcctgttgcatatcggctacgctgagctatgccctcccttacttacttttaattttccagtctgttcctttcgtcttccatctgcttctcacattctctccaaacccaggcatcccaagaaactgttagggaaccacctctcatctacatagagcaagcatcttctcctgggcctgtgctcaaagtattacatacagcccaaggcagggaggggacagatggtccaaatgtacagctggttgagccgttgactgtgaggcaagtgctggcctttagagtatcgttatgctctgctcagtttctttacgtttttcatcaaatccttgttatctcaggggatcactgtgtttcatggcacagtattcggatcaggcagggacttgataaaggagctgatggatcacccatagcccagtctacgttccggtgttagcgtcctcttgctgctgccccagcattgcatcacctctgtgactcagaatggtgggtgccgagtgctctggtcctcagctacgctgtgggattactcaaggaccttgaggatcacctttttgggcttaggttcagttttcaggcacattgatgtggtcagggatggggcctgagtgttgtagttttcaaagccgtgcaggtggttctaatgcgtatccaagagatgaagattagtgccttggaaaatgtgctcatctgttgtgcaagaacaaccaccgggcttcaaaatgaattcaccatgattaatgctcatgttttcaacataaaagatgtaggcgccactgggtagagaaggtgcagtagggactcagcggaactctgaagagaagggagagagtcatttaaaattagtgcgggaagctcatttagagttgatcagtttaaatgaaacgaaggtgcaccattgcaaacactcgcttttgctgttacctactttggagggcaaagaagagatgaatttaggaactgccttctgctgtgtgctgcgagagggggtgattagaggcaggagccatgtttaagtttttgtttggaagggtttctctcccttcttcgattaaaaaaacaaaaaaacaaaacaaaacaaaaaacaaaacaaaacaaaacaaaaaaaaccagccaccaaaagcaaaataaagaataaagaataagtttgtttctaagaaactagttctttgacactgaagactgaggaaaaacttcagcggggacagaggaaggcttttggcttgaagagcatccaggaagggcagcagagcacagatgaaggcttcgtggttgccagccaccttagcgaagggccttcagacccacactcaccggccctgtcctcctacatgtaagggcagcatggctttgacctgtgggtttgaccttgatgcgcttggtcctctagggagaaagccatcagaccagggccgcatcatgaaaagatattggagctgtgccaacatctctagcctttatctgtccgcaaagaagtggcttcctttggattttctttcctttggtaatgttattaaataatatatatgtaatattatatgtaattatatagagatgttagatggacagatagaagatagacagacagacaggtaggtaggtgatagatagatgataggtagatgatagataaatagatgatagttaggtaggtagatagatgataggtagatgattgatagataaatgataggtagatgatagatagatagatagatagatagatagatagatagatagatagatgataggtaggtagatagattcatttgagcttctggtttctcagaacttattgtggccaaagaacagggcaaaacccctacgagacatataaagctaagcttgtttgtttatcagtccatctgtgcctttgttactgccgggttccagaccagaacagagatcaaagttcctgccctcacagagctggcatcttggtgcaggaaacagacgtgagtcaatttataatagaattccatgtagtgatagatatttaaaagttctagtgtgggcaagagagagtggcagcccgggtcggtgggtgcccgcgactggtggcctggatcggggtggcgtgactagatttatcgttgaactggatatgaagaatgaaggcaagaagaattgaagatggcgtcagagtgtttggccagcacatcacggcaagggagggggtgcctttacaggagatgggggatgtggaaaggttgatgtcgatgaaaaccaagggttgtttcgttttatgattatctatgttctacgtgtcctctgctgggccataatctttggggcagaaactcatacatagattcatcttcatttgtgtacctgttgggcccatttgaaacatagaaagggaaatggggagggaacggattcttgcctaactccagaaaggcctgaagcttggctggagtgcagatgttttaccccgctagactttctgacgtccaagaccttctgacgtccagactcttcctcaaaaagttacttattagtattttatgtgtctaggtgttttttttttttttctgtatgtgtgtctctgtaccacggaggccagaggagggtatcagatctaccccccccccccacgcccctggaactggagttacaattgtgaggcacaatgtgtgttctgggaactgaacccagagcccctggaacagcagccagtgctctcaactgataaaccatctctctccaccctgttaatgatagtaaaatgtgtgccttttgctgttgttgcttggttggttggtttggtttggtttggttttgtcactaagtttgtgtctcagcaacagaacgcatccagaagccaaggaatgctttttgagcaggtagctcgtttggtcaggcattccagagtgcaccagaaatgatggcaagcacttgggattattctagcactagggttattgcggctgaggcaggagaataacaggtttgaggccagcctgagcaacgtagtaagatactgtctcaaacaaagtaatacgttgattgttctctttttatatggagacgtggtttcaccacgtaactctggctggcctagaacctattgctgtatagtccaagctggtttcaaatcagaggtccttcagcatccacctttcaattgcgggaattaatagtgtgcacgaccacacactttggaagccatctaatttgtgtacccaagggtgttttttttatgttatctctctaatctccacttgtggataccatttatggaaatctcaattacaaagatcccccccaaggtcatatattaaaaaataatcaggaactaaaattcaggagatttgtgttcattttaatttgcaatttgaggaaaatgcattttttttctcaataggattttttttcttaatgtttttattatttaaatgcattttatacatcaagcatattaataatattgagaattttgagaagcaaatgatacataaaatttgttcaacttttatattcatatcctttcataccctaaaaataaaattaatgaatatttaatactatccataactgatgatcctatatctaatgttgaatactaaattgtttcaaaacatgcaaaatattctttgggaattaagcatagtaaaagagcataaaatattaaaaatgaattattaagaatatgttcacaagcccttatatgataacacctgacatagtaagagagtatttaaagtgtattatatatatgtgtacattgtctaactgtaagtttacttaaggaaaattatcagtgtttctaggagagaattatttttaagatttatttatttattataagtaagtacactgtagctgtcttcagacacaccagaagagggcatcagatctcattactgatggttgtgagccaccatctgattgctgggatttgaactcaggatctttggaagagcagtcaatgctcttaaccgctgagccatctctccagtcctgagagaaattattttattagtaagtatattttaaaaatttcaaaatagcaaaaaatctttgaagttaaacattaagaaaattctaattttgagcacagtgagaaaaattatcaataatatttccatgtttgtaggacaattttaatatttccaactgcaaatattcaataagcagaatcattattttaagatatattttgttgttatcgcttccttttcatttctgattttattaatttggatactgtctctgtaccctctggttagtctggctaagagtttatctatcttgttgattttctcaaagaaccagctcctggttttgttgattctttgaatagttctttttgtttctatttcgttgattacagccttgagtttgattatttcctgccttctactcctcttgggtgaatttgcttccttttgttctagatcttccaggtgtgttgtcaagctgctagtgtatgctctctccattttctttttggaggcactcagagctatgagtttccctcttaccactgctctcattgtgtcccgtaagttttggaatgatgtgtcttcattttcattaaactctaaaaaacctttacatgtttttattttttccttgaccaagttatcattgagtagagtgttgttcagcttccatgtgtttgcgtgctttccattgtttttgttggtatttaagaccagccttactccatggtgatcggatagggtgcatgggattatttcaatcttcttgtatctatctgctaacgcctgttttgtgactgattatatggtcagttttgaagaaggtaccgtgaggtgctgagaagaaggtatattcttttgctttaggatgaaatgttctatagatatctgttagatccatttggttcataacttttgttagcgtcactgtgtctctgtttagttggtgtttccatgatctgtacattgctgagattggggtgttgaagtctcccactattattgtgcgaggtgcaatgtgtttgagctttggcacagtttcttttatggatgtgggtacccttgcatttggagcatagatgttcagaattgagagttcatcttggtagatttttcctttgaccagtatgaagtgtccttccatatctttttttgataacttttggtagaaagttgattttatttgatattagaatggttactccagcttgtttcttgggaccattttattggaaaattgttttccagccttttactctgaggcagtgtctgtctttgtcactgaggtgcatttcctgaatgcagcaaaatgctgggtcctggttacatatccagtctgttaatctatgtcttttcattggggaattgagtccattgatgttcaaagatattaaggaaaagcgattgttactttctgttatttttgttgttagaggtggaattatgtttgtgtggctatcttcttttaggtttgttgaaagattactttcttgctttttttctagggtgtagtttccctccttgtgttggtgttttccatctattatcctttgtagggctggatttgtggaaagatactgtgtatatttggttttgtcatagaatatcttcttttctctgtctatggtaattgagaggttggctgggtatagtagcctgggctgacatttgtgttctcttagggtctgtatgacatctgcccaggaccttctagctttcatagaagctagagaagtctggtgtaattctgataggtctgcctttatatgttagttgacccttttcccgtactgcttttaatattctttggttagtgcatttgttgttttgattattatgtgacaggaggaatttcttttctagaccagtctatttggagttctgtaggcttcttatatgttcatggtcatctctttctttaggttagggatgttttcttctataattttattgaagatatttactggcccttttaagttgggaatcttcgctctcttctatacctattatccttatgtttagtcttttaattctgtcctggatttcctggatgttttgggttaagagctttttgctttttgcattttctttgactgttgtgtcaatgttttctatggtatcttctgcccctgagattctctcttctacctcttgtattctgttggtgatgcttgcctgtattactcctgatctctttcctagattttctaatccgagggctgtctccctttgtgatttctttattgtttctatttccatttttatatcttggatggttttgttgcatttttttaaaatcacaaacacttcagaactgtaaagattttggggcgattttgacacatttatttaaaatgctttttttgttgttgttgttgatgttgttctctttcatgaatgaagatgtcaagttttatttcccctgggttgaaatttcttcagcctttagcagaattgcataaccagatgagttcctagatcaacagcacatttatattacaattaacataattactcacaggaaaacagtgaacagaatggtgtttcatattacatatgtttctaaccatttctcattctgtgcgttaggtgttctctaggacataaaccagtttgcaagaatttgtaaatttgattttgtagtagtgccctcttcctttctttaaaaataacccgttatcattgcaaatcacagcgtttgtaattttgtttctatttttgtcgatgaatgaattcaaattagtttatgtgtttgcagaatccagaacattaggttcccacaaaggtccctgttactttgtgctctaataccatgtggtcccatataaagggtgactcatctcattagtgccttgggcatgcggatgatgaaaccttcacctggtgtccgctggggcaacaggagactctttcctgagctgtctctccagtcccaaatacagttctctttcgctttaattttctttaggaccctgtcaccagtcccttcatgtatggtctgtttcatcttccaagccgccatttttcgaagtgtggccagcattcaagcagcatcagcgccatctgtgggctggacagaaatgctcatgctctggtctcagcctcgattccacccaagtcccatggtcaaatccaaccatagcgcatagaaaaaaaaaagaaaaaaaaagatttataggctgctgtgtagttgcttgctaagcatgcacaagtcccggaatccaaagacaagaaaggaatgtaaatctgtagaacaaaatttctaaataggaattaaacatgtttatgtgtatgtgtttaagaatatgtattaactgtaaatggaccaaataccccagttaaaagacagggattgtaattcaggaacatcaaaatcaaatatattatagttttaggagtaacactttttttttttttttaagcagggatattgagagtaaaagtgaagaaagagacatgtgccatactaacaaaaggaacaaagtgggaacaaccaaatagagttcatgtatgtgtatgtgtgtgtgtgtgtgtgtgtgtatacacacatagatagataggtaggtaggtaggtagatagatagatagatagatagatagatctgtattttatgacttgggctttgctgatgtggctttgaaggactttgccaaacccttcctctcagcctgttatgaggaggtagaattgctttgaaggttcagactagggaggtaaccaagtcttccttcaggatatcaaggaaccggactgtgacgaccaagagagtgggatcacaagtgtatgatacccttggaggaagtctgagtcagccacaatgggaaggtcacaagccaaaccctagacaaacacgctccccacttgtgtgacttcagtaagactcatcacccgagtgagtagtggaaatccaccaaagaactccaagaccacaaaaccaacttgtgcacagtgcagagtccctgaagtcagcatggagtgagtgtcaccttgacaagcttcccgtgggacacagtaatgaggggagctgagcttcggggtgtagagtgtcctcgctggtcaccatggcaacacatgcatattggaattatctttaccctttctgtaagttgtaccgaaagaaacatccaccgagatcctttaatttgtatcatttctttttcaaataaggaaatgaacccccaacagacgaacaagaaacgatcagctactaaaccactgaaggccacgcgttaatgtttttaatattgaaatccgtactctgatttattgactgaaagtgagttcgtggagacataagagaactcattatgataattaatggatagaggtgtctttggcataataataaatgtttttaaactgattgtagtgatagttgcctctctgaatgactaaaaatcattaaattggacacattaaatggatgaattgaatagtaggtggattgcattttaatgaagccattaacacacaaaggaattactattttgttttgcaaatttcagcgttttgcataagttgtaaggatatcttattcagcagatgatcctaaaactgacctgttgttttgggggaaaaattatttaaaagcagcaactcagtaagaattacttggggtctggtgagatggctcggcaggtggaagctgcaggagcctgagcatctgcagtcaatcccagcatcccttagtaaaggagaggcctgccttgcagaagttgccctctgacctttacaggcacacttgtagcatgttcatgtccccacatagatcatacatacacatcatggtcgttgtcgtcatcatcatcgttatcatcgtcatctaaattacaatgcataatttacttggaaattttatttgcataagccagccaaaacgagacatttaatttaaaatcatggttttagtgtaatgtaattgtacagttacagaattaaataatgaaatcatacctaacgtataaatatatagatgacttttcagggtgagcaaaatctttctaaacagaacaccaaagatagaaatcatgaaggtatatttaattacataataggggaaaacctacactttaaaaatatgttgaagttcaactgaaaaaatgacaaattttagagaatatttgcactgcagtagggaaatgattcaaaagtcaataagggcttgtggccctaaaagaccatcttttcaatagaaaaacatacgaacacctgcttagacaattcgatgattacccgtaaccaggcagaaaaattctgcttgatcccagggtggttgagagatattgatcgatatgtgagaactgcataagtatttggagctttggcctggaaaagccattagtgctcaaagcttaatgggccatgcggttggagcttgaaaggtcagaattctaagagccgtggaggcaatggaggcctggcttgtgaagtctctgaggaagtttgacagtccctcaaagactctgagttctctgaaggatcagaattgacagaagcaatgcgtatgaaaggtggtctctcagagtggcttacaggctggggttcaggtagtccgacgatggctgtcgcctgacaggaagactaaggatccatgggtaggcttgtttagcccacaggactggatgtcccagcagccccgtctgctgctggagtctgggaggattttctgcaggtgttcgggctacactggaatccagctgcagttaacagggggcaggaacttgtcagcgagagtgagggcaagcaggcataaggcagagccttccctccgccatgttcttttatgtagcccacctttagaatgggctttcccaatgcaagttatctgatgaaggaaatcccttgcaactctacacagcagcctcagatttaatggagtccaggtgccgtatcgctgacaaccgagatgagccatcaccatgagagatgactaagtagttcacagcactggctgcccttccagaggacttgggttcaagtcccagcacctatttaggaaccatttggaactccagttcaaggggatccgatgccctctctggcctaccagacacacacgtggtacacagacatgcttgcaggctaaacgcctgtgtgtgtgtgtgtgtgtgtgtgtgtgtgtgtgtgtgtgtgtgtgtgtgtgaacgcgcatgtgtgtgtgtgtatatgggttcaaaattatatggttaaatattatacattaaatttattgaagaaatatttctccctaaattgatgtttataatatattattctcaaaagtaggttaaaaaccagtatgtttcatattatgtaaaacataaaatacatgcttttgtttttgtatactcgcatgcacgctaccaattttccatcttttcaaaacctcttttcattaaatgtggttctcatgatgcctttttacttagctacccaggcgtgttgtttgtcaataaatagcagggcaagaaaatctcctccatctccgtgggctctcagtcaaagccatcatcacagcctgagttaacagcacaaaggcctccagaagagccgaacaggcgagttgaatgcagctgatacggggttaccccctcgctcctgagcgacccactgtggaagggatgtctccttagctgtccgtccgccactatgtccttcctcctagggataagaggtgaaaggtctaattggggaagttgtgggccacagctcctcgttctgtacatctgtatgtgggtagcaagtgtattttcaagacgtaaagaaacaagcctaggggctggagagacggctcactggttaagagcactggctgctcttgcagaggttctgagttcaattcccagcgaccacatggtggctcacaaccatctgtaatgggatcccttgtcctcctccggtgtgtctggagacagcaatggcgtacttacatatataaaataaataaatcttaaagaaaaacaaaaacaagcctaggaaaattagaggactcttggacttaccataccacaaaccacagcttacttcattcatccactgtacgaactcttccttctgagtgtcgccttcgtccaagtccccagggctaaggttagcatagaacctgcatccagtagcactccgtgcagctgccgttccccactgtactggtgttccggtcaacatctgcatgcttcatttggggaaagtcagaatgtgttcagttgtgaagtcttgccacagggtctttcctcaaaggtaagcattctccccacccccgcccccgccccaccccacccccatcccccggcctagctcattcaatcagatttccatctgggagtaaatgaggagacgtaccttgcatggcgctggttcacaaggtccacaaattttatatagagatataaatttcacatatatgtaaattttatacattatatacatatgtatacatttcatacatttatattatatataattatacatatatatacacatatgcatgcatacatacatatgcatacacctacacatgcacacacatacacatataaactttagtagtctgaccatctaatttgcctttagagagtcctctaactcctaagctattgtcagagatccctgaaggtcaaattggttttgccatgttcacaaagtttgagggttaggaaatcgggcagggcacaggaaaaccgtgacctctgctcagtggtatctggggtctcaatggagagctccaaagcctggacgtcagagcccttttaagtctcattcactggcatgtcaggcagctgctgcctcggggttgactgaagtcctcagtcccaccacacacaggtcttgccgtgcggtcactgctctgtgttaatttgggtctccggtgtagaactgcattgtggcatcgaggacaggtgttctgacgagatgcaaggagaaactctgtcaccttttccgatgtagctgtaaaagtcacaccttaccatttctgtcgtaatcgctgtctcatccacagtctaggaaagaggagacagacagcccaccccctatgcctttccacagagcgatgccagctgcaccctgcaaatgtgtggacgagatggaatagggagagaacatgcattctgccacaaataggagcacattttcatcagtacttgctggtcaccttcatgaagatgtggtagtcacagtgtttgaaggaatatgcacccacacgtgaacacatcaaattgtgtaccctgcagtatccagtacaacgccctgtgccctcgggaaggctgtctgaatgtgtacgtgagcattacaaattctgtattccctttccctgttcaatatgggcataagcgtatcgcccatctccgggaagaatttattctaggacttgaacccagggcctcacacatgctgaacacacactctgccactgagccacaccccaggtcttcctcggggatttgaacatatgaccataagcttctaattgtcctagcatgattgttaaagtaacacctattgaacttcacccagattaaagtctcttttggtctggctactatttccattcagtgttttgttttgttttcttttttttttttcaaccaaagacagggtgatttttatttcctaacccttaagctaattgagttattttctcttgaaggtggtttgtcattctgaattttgctgatttgtaatagccaccagagttagcaatttgcacaaatctaaacgttcagtggggatcattattccaaattcccgaaaattagctatagtcacagcctccttggtgggtgagtggacatcctccctgggcaggagtgagaattcttaatgggtacccggaaagtgtgggcattttctggtgccatccccggtgcccctctctctcaggcacattaggtgactcactctttctggaagatcccttcacagtcttggcacgtttcatttcttcttggaatgtcaccttcccaacccattttctgacgagcacattcccactcaaccttgatgacacaagtccaaagtcaccactcccgagaagccctctctcacacaccccactggtggcgcaaatgaccccaccctcttttgaaatcgtaagtgctttggtgaggatgccgcagtcactacgctgcctgctcctgagagatggaaaggacgggctggggcagtagctggtctctgcctgtgtcctatccaggactcagtgatcaggaaagccttgttttgcaaactatccgttttaaggctctgccattccactgtggaaggaccgttaggacagcaaattcccagccttgatgcggccggcccaacaggaggggtgggtgtgtctttttgataagcaactccagttttctgttgagcaggctttagcaaacagaattctaggctgagtgtcacccctgcatctatcttcacagcctgcagtcctcaagagttcatgttagcttccgttcttagcctgactcgttctgcacatttcctgagccgcttatttgaccttcagaggcttccgtaagacacagacactcatgctggaacctcttgccctaaaatttaatttcttaggtgacatataacctcacttgtgtttcttcaatgaacctacatttacctgtgcgtacacaagcattagagacattgtggagtttgcgagtggctcaattttactttaacttccacagaggtttgatgaccagtaaaatcagagggccggcaaggtggcttcgtgagttggactttcttcttcttcttttttctttttctttttcttttctcctctctctctctctctctctctctctctctctctctctctctttccctctctttctctctctctctcttctttctctctctttctctttctttcttttttggtttttgttttttgagacagggtttctctgtgtagccctggctgtcctggagctcactctgtacccaggcaggccttgaattcagaaatccgcctgcctctgcctcccgagtactgggattaaagacgtgtgccaccactgcccggctgagttggactttcaagtatgattaacatgagtttgatcctcaggacacacacacacacacacacacacacacacacacatttttaaaaataaattttagaaattgccagtcagaggagacatgtttggtggtttgagtaagagtggcccctataggctcagatatttgaatgcttggtccccagcgagtggaactgtttgggaaggattaggaggtgtggccttgttggaggaggtatgtccctggggtaggcatctaggtttctctgcctcctgcttgttgatcaggtggatgtgggctcccagctgctgttgcagcagtgtgcctgcctacctgctgcctacctacctgcctgcctgcctgcctacctgctgcctgcctgcctgcctgcctgcctgcctcctgcctgcctgcctgcctgcctgcctgcctgcctgtttactgcctacctgctgcctgcctgcctgtttactgcctacctgctgcctgcctgcctgttgactgcctacctgctgcctgcctgcctgcctgcctgttgactgtctacctactgcctacctgcctatctgctgcctgcctgcctgctgccatgctccttatcatgatggtcatggatccatcccctgaaactataagcaagcccccaattaaatgctttcttttatgagctgcctcggtcacggtgtctcttcttaagacaatgtattaataacttgttttccagccaaatttatttggaaaaatacttaaccgttgtctgtgtgtgctgatcaagcaatgaaggaaacgaaggaaaacatttttttcctctactttttttttttttttaaacaaaatgtttcacgtagaacacagccccagatatttggttaaatagacgccatgatttatgcaataatttttaaaatgactcagtgaagggagaaactgaattctgcctactctacctgtgtggttgaaatgcactcctcaagactatgacaaagaacctactccagcaaggttctattaaagtttagattctctgtggtaggctacaaaacgagtgctattataaaccttggcaaaccctaaaataggacaatggaaaataagaactaagtatgcaatcaaacactcgatgtcaaaggtgatgattatgtcttttcttaataaatcccctggcccccttcctgttgtgcttctcacagcagctccctcctcagcagctttgtccgtgaacctgagcgtcaacacccccttgtctatggcacagaccttagagcctggtgcgtggtgcgtgcctatccttccagccctagagacgtagacgcctgaggatcggaagttcaaggtcatcttcagcttgcgtggagtgttcccagccagcctcagctgcataaaaacccaaataaaagtgaagatggacatcagacaagtgtattcactagagcttcatctcaccccagacttttgtttggcagcttatttttaaaaagtgtgttttcaagttagcatacagagggacgtgtttccttatggcacttttgtacacatgtgtcactgtgttctgattcgtcccctctgcatcggctgcccccatctccctcacaactcttcctggttcccatctcaagcagacccatgctttgatttcatatcgtatcttctccattactctccccttttcccctccttggtccttagaacctctaccacccctctcactgtcccttttctattttcacaacctacatgtacatgaactcacatgtacacatacatacatacatacatacatacatacacacatgcacatacatacacacatgcacacacttgcatatatatacacacatgcacacaatatacatgtatacctacatacacatatacatgtatataaacatgcacacatatgtgtacaaacatgcatacatacacatgtgaacacacacatacatacctgcacacatgtgcacacacatatacatgtagacacatgcacatacacatgtgtacacatacgtgcacacatgcacacactcatggacatatacacacatgcacacacacacactcccctctaaagtccacatataagaaaaaaagtatgatattcatctttctcagactagctatggcacttaacataatgatccagccttttttctgcataaatatgaataaattctattatttatatgtactacaatcatccatcttttggtggatatctgagcttgctttcagtcctagatacaatgaatagtgcaacaacatagacggatctctgaagtatgttaacttaggttcatactcgcaagttgtatagctgcatcatcataccgtacttctatttggaatgggtataaattgtttcatgtatttatttttattatgtgtgggtgtgcatgtcacagtgactgtgtggaggaggtcagagaaccaatttgtgagtcgcctctttctttccacctttacgtgggatctggggatcagagtctagccagacttgcacagtgagctgcttcaccggctgagctgtcacaccgaccctactggtactatcttgagaacccaccacactggcgtacgaagcatacagtacatagtggctgcagtctctgtgttcctaccagcagggaggaagtgctgctggagccctctccacttcccctacatccttcccagcctctgtctgttctcttgagtcagtggactttcccagtagcagacagacactgcatgctacagtacatatctgccagacaaggtgtgccgattggcataatagtgggtaactgttggagaggggaacgcgctgctttttttttttttaattgagatttgaagctacatctgcagatgggaatgctactgtaaacctggttcttgaagcccatatctgggaaggtcacgtatcctggctggggacctgccactgatgctttgctgaatgtacctgttgtcagactgtcccctgggtatttgtatttgtacccatagacttagtcctggtcagggaagcttctctgtgccatgggcagaaatgattgcggaggcacagaactggtgaaagtgctgtgaataaccaatggctgttgggtgtgcagccttaaatgcgacatctgcctcagttgactccctcgaggctcagagaagatagtgcaagaggtgacaggaacaatatacaagttagaagatggggaggattgctgagaaacgccatcttctggacacaacaaggccctcgcactcaggaactcacaccagctatggccatctgcataagagatggacaaaatcaagccagtcagcattcaagcttggatgagggcagggttcctggggcaccatccctaattgaagagctattgataattggtggcctctggggaacatgataatttttctttgggagtgtggctaacgttagattttccatggtcttatggatggccctgtatctctcggtgttcaggtagcactagttaggctcagtggttatgaaggagaaggagaaggagacgaagaagaggaggaagaaggtgatagtttgaataggtatggttcctataaacttgagtgtttgaatgcttggcccaatagagagtggcactattaggaggtgtggccatgttggagaaagtatgtcactgtggggtaggctttgagatctcccatattcaagctatgcccaatgtggaacacagtccccttctgctgcctttggatcaagatgaagaactctcagctccttctccagcaccatgtctgtgtgagtgctgccatgcttcctgccatgatgatgatagactaaactgtaagccagccacaattaaatgtttttctttataagagttaccacggtcatggtgtctcttcacagtaatagcaaccctgagcctaagaggaggaagaggagcagcagcagcagctagaacgctggcttagcaatcaacagcacttgttgctcctgcagaggactagagtttggttcccagaatccacaatgggcgcctcacaacctcctgtagtttcagctcccggagatccagtgccctctgctggcctctgtgggtacctgcactcacgtgtgcatgtcctcacttgggcgcacatatacacaattaaaactaaaaattaaataaaaggagaggacctgaggctgagagggcaagtgttgagggagtgggaggattggaaaggggacttgtaatccaagatacacggtatgcaagtatgaaatctcagagaatacatttttttattctaaaaaatattaaaacatggtgtattattattatcattattaatttttaaaaaaggaacaacaaaaattacttaaagtatgaaggaataagtgtagagcaagcaagataatattttataataaaatgtaggcaaacaaaaataaatgcttgaaggggaatttaagaggcacataattttaatatgaagtaaaagtactagtggaggtgtgatgaaaaatgggggaggggtaaagaagtaagaagataagaaaagccaagatgaagtgctggagcagctttgttctggattctcactctggaaactgcccagtacacggtcagtgaggccatcaggcgctcttgtggactcacgtcatccctgtggcttgttggtgctgagcttgtgtcatcctctgtcatatctgacttcactgtaatagttctccatacattcacaccaggggcctctgctggccacacgtagcttttcttgttggtccaggcacctgggcgactccccagagtggctaacgatggagttggtgagtgtctcccagtgtgttgagtaccagaagcaagcacagcaccttagagactgacagcctgtctttgctctttgaggattccttaggtgttaattatcccacaagagggtcacagcttctgttgagtagaagtctggagtttcagacgttccaggctctggtggtggacggtagatcgttggctgcagaagttggtctacccctgagctgtcaaactgcagggtctagagctaggctgcctttccctcagcaattttcgatgtaagtcaagcctcaagccacgggtgctttccaacttgatcccttccctcccctccccatgaccagacaccactctgcacaactgccttctatggccatctttcactatagagctgtagcaaagtcaactcaggctcccttcctttcatcactgtggtaggccactcactgctctcccagtcacacggggtgacaaaatggggttcctccttattgcggacccatttgctggaggagcctcagtctcaccaacaaccaaacttgcctcaaggcttgtaaagggttgtaggcttgtcgtgaagataagactccccatagcttctacaagccccaccccatcgccacatactggaggtggctgggcaaagatttgccattagctccttccatcctggagttgtgatcagttcatcttggcctcttttcctgctgacaccatttttttctacactgccactgcctttgggaacttcagatgttccttcttgatccctctttggagtagagttttctacctttttttttttttaagatttatttatttgatgtatgcaggtacacagttgctctgtttagacacaccagaagaggacatcagatcccattacagttggttgtgagccaccatgtggttgctgggaattgaactcaggacctctggaagagcagtcagtgtacttaaccactgagccatctcttctacctttttaaagagagcagtctcctctcatttcaggtggcaggaacaaggaccccaaagagggttcgtaggtgagaatgagaagttagttgcctttgaaagtgagaaaccaaacacgtcaggaccccaggacgaagtttctctaagaagatgcttattgtctgatggaaagcattgtgtctaaccattcccctaagtggcattatagccatgctgccaggaactgatcctgagtcagacagagcaggaggaagacttagaaatgcatttctctgaggatggagcagggtcacaagccgttgcagcatactgtctcctcgccagttcttgaaagaagcacactgattgcagagatgcgaccttggttttccaagagagggcacaagaagcagggcatgtccttagctccaaagcaggaagctcggaatagggagaactgggcatctggacaagaagggagtgtggggcggggctaatactgtgtaaaacaggcgtggagacacactgctgtcagccagcgcgtgggaagcagaaacaggagcctgaaaaggtcaaggatatctaactttataggaagcttgacaccagtcatagctcggggggttccactccagagtgagacctggtctcaaaccaaaccaagaacaaaaagcaacaacaagcacagcttgtacgaaggatgccgcatggaccactatgaccttgaacaacttcaacctctccatctctcttccccgttctttttaatgtttaaaacgttgtttatgtccggggttagcatagacttgcatatactatgtcccactaggtcagagggcaacactttggagttggatctcttgtcccacctttttgtgggttctggggagcaagctggggacatcaggcttcacagcaagccctttgatcggctgagccacttcactgcccctcagtctcctgctgctgctggagatgatgaagcttgaacacccggattaattagaccctgacattggccagcggcgctgtccgtgacaacgatggtgctaagccgtggatttatacttaggctctcgccccaaggagatgctcaggtcagagctctaaagtttcaggcaaaccctccagcctgagtgcctaagagacaagggagtttgggtgacagcctttttttgcatcctctttgagaatgctgctttttaatggagtttacatttctattcatctataatgatcttccacatagagctgaggactctaggaaggacctgagatgggcttcagaaagcatttagacataaataacctgggcggtcaagatgtgagaaaaggggaaaaatgatatttctaagaacccgagaatagccctttaacattatccttcctttcatggagatattgactttgtcaactcgctagagtgtgaaagacccattatttaacctatggaaagaaaggagtccatgagaaatgtaccttggggctacttttcttcgtatgagaagaatgtaatttgcagtcagaatccatgtgtgcagaaagctccacccagccgggtaattcttccatttcacacgaaatcacagctcgccggccggctatgagatttgatgaacatttctccctgatgcctccagaaacatgggtgtgactcccagaggtgccatctggtagagagataggtcttttaaacctgtttcactccgaaaaactgagtagtaacgaattcacactgagttaagtgaggggtgtcttaagtatgttttggctacacttggttgcctcctcctgaaatgtttgatgtgcctgttgggtcagtggtgccggttgccgaaagggttctgttgagttcttagatggctgcacctcaccgattctgcctccaagactggaactttctactcccttgaaagggcacagtaagttgtctcataagctctcttggaccatgggtaggaagacgggaagggaatatctaacgtggtttattaagtaggaagtggaacagccatgcaaatatttgctgccatagaaaaagtatcagtctcagggcaggagcggtcatgctggcccttttggccagcagcaatggtggctcaattaagttttcccaccatctcccgagtggcaggatcgcttctggtggaaaacgctgtaatggtgtttgcagtcagcttctggctgggttgtttcttgatgtgcctccaagagtagagtcagaagcaggagctaaaaattattttggaggttatacagactagaaggcgggggggaaggatatgcagaaaaagcaaatttaccccagactaaacaccaaaaataaatcacaagactgaagccccacatactggtacctgtggcttctgagaaaacctcagaatccagacacttccacaaaagctcccttagccatagaaggaaaagctgtgtgtgcatgcaaatagtattctgctattcagtggctaaaatcctatttcatgtaacgtggtggggaatgatgaaagctactacaatttgaaatgcatttgcattcatataattctaaatgtttaacttgggaaagtagcttcatttacttgaggttgtgtccgatcaacatgcagaaaccattgctaagatcatgtacaatccctagggcgaacataaagaaaaaaaaaaaagagcccttagtatcaactcaccagccagagagggagcctgatatgagcagacaagtgtgctactgtatgagtctagctgtgagttcatgggtttgactcctgccctggtcaacacagggaggggcgtttgatgtggcacaagaagatggtaacactgaagaagatgacccaggagagagagagagcactagccggaggcgtgcagcctgcgctgggtggatcaatgtggcagcatgcggcagacttaaggatcaagtgcttcctgttcggctctcccaggattccatgaggatggactagcaggggttagagtgacgcgctgtatgcatcacgatcaaggttttgaattgtaacagaaagcgttgtgaaattggatgctgcaactaaaacagtagagccaggtttggtggtggcacatacctggaaccctagcgctccgaggagtgccctgagttcaaagccagcctaagctttggagccagttccatgccaaccagagcttcatgacaagagccccatttcaaaaagacagaggaaggagtgggcagtgctgggaagatgtttcagtcagcaaagcacctgcctagcaagcgagaggtcataagttcggatctccagaacccatgtgggaatctggacctggcgggatgcttttgtaacccccagtgatggtgagataggtggtgaagaaagatggatccctagagaccgctggtcagctggtctaggctatttggcaagttccaaacgaaagagaaattctctcaaaatgtggaaggtgtccgttggaggacgtggaggttgtcctctgacatccacacaccgagacatacatatagacaaaagcaaatgaataaacgaatatgcgaatgaatgaatccgtgagagtcaaatcatactataaaaccagcgttctcctttctgttccttaacgtcaggcaccttggcagacaccttggaggagcctgtcatggaatctcccgggtctagttgcagagctaagaggaatggcagtgttcttatctgtaaagcagagatcgtgtgtgtgcgtgtgtgtgtgtgtgtatgtgtgtgtgtgaagtacacaggttcaggccccttaggtctttgctaggatgtctggcctactattaacagttggtagaagctggaatgttcgcctgacatggagaaagcggcttcagatgctgagccttccctttaacatctggagccaagagctttgagtgctgagccttccctttaacatctggagccaagagcgatttctcagtgttgctgaatcttatattgcttaatcaagtccatacgagggaatgactttgtcagctcctggccagaaagtcatccgttagcaaagtccattgattatagacttgagagacatctccactgattccgttgttcaagagaacgtaggaaatgaaaacttacgtgggtaaagtgatatcccaagagcagccgggagctgttggttagttggagaagatacaaaggctcacagataggatcgggaacgctaatgatccctgcccagctttgcctcctgattttgaccgacaggcctctacaaagacaaagtgtattacatttttaatttgccgtaaccttataactcacagttaataaaatgtccttacttcttagtgactggagatggttttgttactagattggggttttctgtttgtttgtttgttgccattgtttcaaatcgaaaaaattttaaatatagttaatttggctatatctaaagattatatcaaaactagatttgttgtctgtaaaaagcccatcccagtagaagaaagaatgactatgggtccccatgaacagccctagccaaaggtgctttggacaatttcagatggttttctgatgatttgctcataggaatgttgtcttgggtgctgttgagacccttttcctgtcttgataacgaaatggtgtgtagagggtggcagggaaaaccacgacgcatagtagggacactggcacatttgtgggcactgggatgggcatcccatgctaaccctgactgtggccgcctcctcacccgtcccaagccacgaactataatcaagcaaagtatttgaggacgagaaggactccctttgaataccctgtagaataaccggtgtcctctctgtgttctgtttgaccagtgctcctatatcccgccctgtaagagagaaaaccagaagaactcggagagcgtcatgaactggcagcagtattggaaagatgagatcggttcccagccattcacttgctattttaatcagcatcagaggtaaaccgaaattcgtacgcgcgtgtcaatgttggctggttgtgtgatgtgttacgtgggtacaccatggtctgtgcccacttgaagggacgtgccactgggagataacctcaagttatttttagcctgtaattctccattccttccagtattaaggagctacttcctgctctactagatgggagccatatacagaacacatggaacaaaaaaatgagaggagagggacggagggagggagggagggagggagggacggagggagggagggaggaagggagagggggagggggaaatgtgtctagggtggggggtggtacccaagggggcttccccttctccttagagaaagggagatgataatgggggaagggtttgtaaggacgggactgggaagagaagagggaaggggctgcaatcggaatgtaaagtgaataaacaataaattattggaaaaatatcaatatgtgttcataccatcaaagcttcacctgccttagaggcttgctacactgttttttttggtgttttgttttgttttgttttgttttgttttgttttgtttttaccatagcaagatgaccccatgaatcagaacacttgcctacccacctagagtaagctgcactaaactaattgtcaatgtgtattgctgggtgctccacagttaacccaagccttctcttcctcccctaatctctctcagtgaacggcctcgtcacgcatttgtctccctaacatagatggttcttttcttcgttattctctgtcttcaacatcctgtgaccatccctctgtgtgactcttggatcagatctggattttttttgtgtctaatatggcctgttccctctccactgtagcaccccaagccattctccatgttgctacctaggccggctctctagcacaggagtctaatcaggtcactcctgagagttctcagcataaagtcttgcctgcctcggcatggtctctatgtcaggtacatgttgtcgagtagcaaagcacctgaactctcatggcttacggcagtgaccatgtctcatgtgtctgtgagttggcgggactcacgtgcagctaggtgcaaactcagctaggtgtttgatgaagatcctcatctctcctttatttattgagaacactggatatcggtgctcagattgctagaatatcttccttacggcaaggcactctagaattagaagatgcctcacttctgacacattctattggtcaaagcaagcgacaaagccggcagcgttcatggtgtgttgacagagcttccccagatgggggctccagaagatacacggtacgtttatcaatagggtgtagttcccacagttccacatgttgcagacacaggagaatccacctgcagagggtgtcattccaggaattagcaaatttcgcatgatcaggtccttcctctagccctaaacaaatcataggaaagactacccagaagatacccttgaaatacagcagggcagtgccactgtggtgtgaggggaagggcattgcctgagcagatgcaagatggcggaagatacagaagaaataaaaggaactttttacagagcgagcctcactggggctggagaggtggctcagctgttaagaccgctggctggttttgtttgtttgtttgtttgtttgtttgtttccagaggacagggccttggttcccagaacccatatggcagctcacaatcacccgtcattcaagttccatgggatctagcgccctcttctggcctctggggcagcaggcattcaagtggtgcacagccacacaggctaaacactcatatacataaaataaaaacttgaaagtagtagtaataataaaaaagcatcattggctaattacaggagaatcgccagtggtcagcccaggccgcagcgttgtgacaaacatccgtcacatacatctacgtcctgtgcgtgtcctgtgcccggctccctagcccaactgtgcgctcgttaaagagcatgcccggcactatctttgttcctccatgcctgacccagtgcctgtgtctcagtggatctttggtgaatcaacaattgaactcagtgatgacttaataaggcggtttctctgatgccaaggaatgtgtattcactgatgggaacagatgtcaggcagagtcaagtgtgatgtcattggttggggataagaagggcaagaccttgaaatgggagggaggggggcaggggctgtgctgcatcagccagggctcgaaaacagggcatcttaggtacattggaaagacagtgttggttgcaacctgaacaggtaaggtagccttggggttagagttctacaggcaataataataataataataataataataatagcaataataataataaatgctaaagacattgtttttgtaatacaggcaatatgtggtcaggcgaagccttttccaactttattttcaacctgaagactgacataagcaggagttcatattgaggaagtagctgagtttcccgtgtcggttgctgtgtgaatgctgaatgcatgttggatatggagggtgagtgaaaggcgggcaggaaggagaacactagactgaagacacggtctctatagtggttgtaaatattagttgcatttacctcacggaggaacctgaggcttaaagaattcatgtagctaacccggggcatctagccagccattaaaaaaaaaaaaaaaaatcagctgggcagtggtggcgcacacctttaatcccagcacttgggaggcagaggcaggcggatttctgagttcgaggccagcctggtctacagagtgcgtctcaaaaaaaaaaaaaaaaaaaaaatcagtttgtctgattcccaacagccaccccttagccacctgctggttcagataaacatctttgggggcctaagtgatgatggtggtggtggtggtgctgctgctgctgctggtggtggtggtggtggaggtgatggtggtgatgatgtagccaacagggaataccatatccaaacggcatttcagaatgaggaccagcagaccttccaggcagtgtaccagaaaggacggtgtcaaacttctcctgggagaaaagtgtagtccaattgtgactgtgctgagttccagatgctcgatcctgagataccccgcgggtgctggaactgaaagttcaggagggagagatgaggagcaggggccacacagatctgtaacccctggggcacacaagctgctgttgaggcaaagaggccaagtgcatgctgggaacacaatgttgagaagagaaatgctgatggaccacacttcagtcatagacaaggagacagaggaagaatggctggagggcgagaggggattcagaagggaacagggagagcgatcctgaaaggaatcctggaagaggaggaggctgctagcagctgtcctcggaagctctggctttggccacagcaggtctcacctcagaggacggggatgggaatcattttatgttcgtccaagttgcgactgtgggggcgaatagccagtgcacacgactgtaacgctctctgcattcagaagaactcaggcttgagttcggtatcgggaaatctcatggcagagggcgagagctgactcctgcaaagtgtcctttgagctccacatgcacaccgcggtgagcaccccccccccgcccacatacatacatacatacatacatacatgtgtgtgtgtgtgcaaacaatacacaaatgacctaaagtgtaaaagaaggaaattctgccgtgtggtgacacggggggaactttgagggaatcatgttcctcgaaacaagtcagtcacaggaaagcaaacactgttgtgttaggtgtttgtcgtagtccagttcgtagatgacagagtgaaatgacagtcgtttctagtggctggggagggaaaagcggggagttattaacctacaggtgtgacggtttcctctggtgaggagtaacagctacagagctgggtacagccggcattgtacctacagtcaaagtgcagggtagcttaggcttaaaggtttgtcgggctacagcagggcacatgaacataaagacttgtggcagctcatacctgcacaagtcagacccctcaaaatcccggcacagagacaggaaagtaggcgcaaagttccacccctaaccaagatgctatttgcctttgatacccacgggggggggggggatctgctttctccaagggagtgacaccggatatataagctatgctaggcagatcccatgttcaggagaagttagccaacacgaaacagacttcagactgcatctctgtctctgtctctgtctccgtctctctctctccctctctctctctctctctctctctctctctctctgtgtgtgtgtgggggggtttgaggtcgggggagtggtggtgtttgttttgtcggttttttttttttttgaagagggaacataagcttaggtgggtaggtaagtgggcaggatttaagagttgggggaggggaaagaatatgatctaaatatatcgtatgaaaataattcaagccaataaattactcgttaagcagttagagctcgtgttaaaacccttaccactatacactaaaagtttgtggacgaaccgagcactgggaaagagcagcaaaaacgcaagtagagaaaggagcctgctacagagtcaaaccgaccggggagtgaaaggaaattggacgtgtggcgtgcacacggtagaactggaacactgcccgaggaaaaatgagacagagtttaataagtaggggacccttttcttgtgaggtgggagccgagacagggaacagttcccagggggtcagcgagattgtactgagccatctgaacaactgggagactccgaaagctactactcctagccaggcactgatttcagaatgcaggtggagacggacctcccagtcctgcctgctgccccgcctgctgccccgcctgctgccctgcccagctgatgaagctcctgattcctttcccactctgctctgttctgcctctcatgcaggtatggatcctgaatccccaccatcaccaccaccagtccagaaggactgtccttccccagtagtgacaaccgtcttgataggaacagaccccataccacgcactcaaaagaaaacagtgcgctcattattccgtattgtagtcaccacactcactatacccccatgccagatatgcagggtcctcagcctaagcagtgtcttagttccttcccggtaccacaatgccctgcagctctatccaatttggcaactgcatacctggacttagcatcaaatccccaagttcaagcgctcactcaaccttcccacgcttcctcaattctgatgccaaagtgttgtaccaagtacaacacctgtacatttgaccactgtgcagagtcggggggggggggagggggagagggaaggatgtcctcctgcccccccaccccccatgggctcagttttgtgttggaaggctcacgggactcagagaacactcactcataacgccacgttattacagaagacacggctcagaaactgccgtgtggaatgcagacggagcaattagacactctgtcctgagcgccagctttgaggctcagggttgtgcttgccggttctccgaaccttggtcagggctctcccattttgtaggcataaaatggtgactggatcaacctgtgggctcctgtcccttcctgaaggtcagagggtaatgcagaaccttctaactgtgaccacaagttgggtcctctgtaagcaatacccctccctcccagagccacctcagtaggctaggaaggggcttccggtgaacaaggagaggggcttctgtcacctctacaatcgggataccccttgtggtaatctgagcacgggagttcaaacctgccacctccccatcggaatgggcacacatcctctatccctcctgtcaccaacctgtctgcagactgtcgagtatagctagaagtgaggctggcttatcactattctcaagtgactctggggaagcaggagtttcagtttctcccctcctggcataagcgagatgaaacaggggtgtcgctgggctcgtgagatagcagctccctggtgccatccactctgggtgcagtttcttactacggctacaggagaagttaaaatagactcacggcatccactcccagatgctcctgataaggtgaactttatatttaaagcgacctttagatttcacataattgcaggaaattaagaggcatagctaccaggaacttccatttttcaagaaacgtgtgttatttttaaaatgtaaggtagagattattggagtcttacgatttcagcctgtgttctggaggggaatctgcagggccagacagccaccagaaatggaagtttttcacgttctctagggcaacctcatcccagggctatatccatcgtgatctcttagtacctgacattagtctgcctccctaatccatggtgcccgccatctttctaatgtgtagattttgtatgcagagtttttgtgtgtagatgtttatctatagtttttgttcaggtgggatgacttattatctgaattccacactttccttgttattctccattgccctgctaattaaggaaggtcgaagcctactgttgacccggtagtgttcagagcttggcgaatcgtggaggactccctttcactgggcagggctcccccttctctgaccttgtctggggaattcaactccctccccacgcctctacctgcagaaagtcacgtggttagattacaagtttctccggagtaggacctgtccagctagcactctcgattcctgaaatgcttccctgtgctaacgaggcatttccaataaaccctcagccaatgaccttggcccatcttggatgttccttccctcccctcctccccaaaattctataagccttgaatcagcccaaataaagttgacctgcctccctgcagttggtcctggtgtgtcttctttgtgtacagactcaacagagttttcctccctgctccctttgcccttgagggcagggaggggcatggttccaggctttttcagtaaaagccacccttaacaagcacgctgtaatgatagactggggattctacggcaagcacactgaagacgccttcatctttgccttccctggtgagcgagcacctggagaggagtgagttttcttgcagggtttactcattccataggtacaccagaaaggatggaaggtcacagctcacgtcttagacctgtgctcgcaaaccctcgtcaaaggaaccagtttggccagagcatttgtgtcatctcttgaatgctacctgcagggctgctgctgctttggttcagatgcctacatggccgaggtgaccctcgttggtctgatgagccttgttccttgtcttggctgtcttctcttgactgggttgggtctcacttttaagactcctaccgttgaaagaccatattctgactcaggagaggcgacaccccaaatcactcatgagaaacggccttgatgcaaactgcaagaggactttttattccaagagcgctctggggcccacagtcatacaccacacaggggtagaggactgtggcaccctgagtagctgggtaaggggtatttaaaggaagaaaccacaactcaaggggatggggagggcgttgttggaaaataccaaaaataccagttaagagaagtggaaagtcaagacagttttctatgagcctctaacaatagcacatttgcatagcgggttccagcaacattcagggtgggtcagggtgactttctttgaatgaacactcctggaacccaggaagcgggtgggtggaggaatgtcactatctgttttatgattagcatgccttggagcactgagtcacaaaggtcacattctcaagcctgggcctgaaagcctagagtttttttttttttttgttttttgttttttttgttttttatatgtttcacttttcatcatcatcctcttgattaatttcttttcctacttcctagccagcttcaagttctgttactgagttacatgccagtcatgagccaatagacagacagagatgaaacaaccacaaaacaaagcagacaatgtctcagccttccgtggaacgacaggattgtataatttaaaagtcaggtgatacagtgaaggaagactcgcaggtcctgctttgagatcttattgacatggtggagaactgcagacctgagtgagccacattggtagagacagaggtgtggctcagtggttagctaggtataagcaagtaagaggaaggaccatgtcagagaggggtgctgtggggtacatggtttctgaggctgggaagcttcgtatgtgtgataaatgtaaggccagtgaggttggagagccgagtgtgagagagcaagtgtgtgttttattgacccaagagaagtggggactgtttgagttttcccattgcctgctctctcctccatgccaatggctctgttttccatgatgcttttgtacctctcaccttgtcccctcatctggggacaccttcgtcattgtcactactagacattggcacagcacagtagttctaggaggaagctggacccaggcgtttcctcatactgtcattctgggagtattgatttatttgtgccttggttgtcctcatatcgccttacaccttggctgctgtctctccctgcttcctttctgcgtcccacaccaccaaggttgctttcctcatactccccagagttagatgggtgagctcgttccacctcgtgcatcttaagagttgcttaacctcagccaccacgtgacactggatatgtgggcgtacacttctctacctttgattcactgtatatcttgggtgaatgtctcagcttccccatcttggttttcctagcctgcaaagcaagagtgacattgtcttgcttttatttgggtttggataaagactgcatctgcgtcctaagtcgtgatatatgtttgtctctgtcttatccatttgtagcaagtaaggaacagtaacgagtggtggagatgtcctctggttggaggcttggacattgcctggttaaataattggagttttattaatgggtaaagctatatacatacatacatacatatatatatatatatatatatatatatatatatatatatatatagtgtgcgcacacacacatacacacatgcacgaggtggggaagaaagggagggagagaggagaaagagaaagagagtctattgctcagaaaaaagtaaatatgctatacttacgccactgaatggatatattctaattctggggtgtatatttttacccttagcattttaaagacagatgaacataacagcctgagttcaaatgagtggagagctctgcaaaacacacttgaaaagccactaaaacagagaattaaaagcaattgatcagaaaaatgccactcgctcacacgaggcttggttttctcgcctataaagtttgatagaccgaggaccggccgacctccacacacatccttaacactcccaagctgggtgattttacgacgctcgttctgagccccatgcattcagaataacttaggatgccttataaaatcctaactgtgcaagagagacaatgttaggaaaaaaccaagtgatgagtggtctggagcccccgttcaatagaggagcatgccgtgcagtcaccttatggtgagtgagtttcgtgagggtgatgctgtacttagatgtatccttctgaatacgcttataaccaccatagtgagaaatgctcggtcagttgtaaacggttttcactatgtctttgcattcctgaaacagatttgctctaataacacctttattttaatacatttacagattgaatttaagcatatcattgctatgagatttttccttgtttttcttcagtttttttttttttttctctctctctctaggacaaattactgagaaaaaaaatcctctcgggattaatttgcatacaaaaatggaacctgggcttgacagggtggggtgagagggtaagtttatgccatggcctgcgtgtggaggtcagaagacaatgctcagggatcagtgttccccttcctccttactgaagcagacctgtcttatttctacttcagcactgtgtaccccaggctagctggcctgttagttagctccaccccctgtgtcaaccgaggagtcccgggattacagatgtgcgctatatccggctttcttctgtaggttctggggcttgaactcgggtcatgaggctcgcgtagctgacaccattacttcctgggccaccgctctggctcagatctgagtttcgaataaaccgttaaattagataatgactgttttatgttactaatgttgttttctattttctgtgagagacttttttttccccctaatctttgattggagaagggcttgacgccatagttctttttcttctcaaatgatcgcgttagctttctctttctacaccgagttcagtgacatatcatgaacaaagcagtgcatctggagtctttcgcatgcacatttgtgtctcgttccatattgagagattacatcagaattgaaggctgtgtttaatctccaaatctgtatttttaaaaaagtagtgtttgctgtctccagcaagctgtgggctatgggcggaatccgtgccaacattccttctaagtctgacatctaaacaccatgcattatttaaaaaacgtgaaattgagagcctattttctgatgattaatcagaaatgcctctctgctggcgagtccagttcatcttccgatggcctttatcatcgtggcaataaaaaggaagtcacaaatgtgatgttatcaaatcacttttcatttaagatgctttatgcagccttcaaagagagccctgaggggagtttgggaggaaaaataccaagaaccacaggacaagtaggtcacagagtgcagtgccatcagctgcaggaatgcagggcagggctgcgcgtcaggagacttcagttctaagcatagctctgctctaacctcagtgggtgaccttggactacttacccaagagcccgcacctcagtttcctattaggtacaatggggccagacgaatgtttgtggcttacggtgggtttatgtggactcagagactcacagcctctcacatctgggagatcttttcaatcattcactccaatcctttattaagtacaaatttagtgcctgtgagtgtgtgtgtgtgtgtgtgtgtgtgtgtgctgaaaccaattgcctgttgagaagcaagcatcttatgggttggaagggtttattctggttcctagtttaaggggagagggtcctctcatcgtgctgggggaaggcacatcgacaggagtgaggcagatgctagagaggaccagcagattgtgtgggaagtcaggaagccaaggtgagagcagacaggaagtagaaccaggcagtaagacagtggttctcagccttactactgctgcgatcctttaacacatttccacatgttgtggcgactcccctcccccccccagccacaaaattattttcatcgctacttcataactgtaatttttgctactgtgatgaatcataatattttttggagatggaagtttgctgaaagggccgtggcccccaggttgagaaccattgctctaagacctcatggtccatccttactgcccccttcttctggcggtgctccccactcctaaaatttctatagtcttccaaatagcaccaggaaacaaacgaaaggctaggcatggtggttcctgcctttaatcccagaacttgggaggcagagccaaaggcaggcaaatctctgagttggaggccatcctggtctgcataatgagtttcaagccatccatggctacagagagagatggagggtgggggaggagaaagggaggaaggcagctaggcaggtaggcatcgccagttgggtaccagttgttcaaacacatgagcccatggggatgggaggggcatttcatattgaaatcaaaacaaagccccaataactaaatgcctaccacatcctttctctgtattctttctcctcagcacggctatcccatttgcaaacatctttggttgtcaaggacttcttttttgtctctaatagttctttgagagttttcatatctccactaagcaaataaatgaggtcataggtcaccccggggagagggcggtggggagggactgacggctgagtttctctgcagtggtgaagtttctggtgtatggtgttggttgatggcagtgactttaccacagtcagaagacctggttagtgctgcagtctctctcactctgggggcagactgttgtctgagtatcatggcagacagatcaactataaggttctccggaggctcagggagcagaaacctggagctgtaacctctccctgtggggctacaacagctcggccacctctcttggctcctccccctgctcttcctgctgctgttcctcctcctggtcttccttttccaggtccttctgcccttcctcctcgtcctcctctccctcctcctcctggtcctccttttccagctccttctgcccctccttctgcccctccttctcatcctcctctccctcctcctcctggtcctccttttcctgcttcctctgccctcctcctctccctcttttatctcttcctcctctccctcctcctcctggtcctccttttcctgattcttctgccctcctcctctccctcttttatctcttcctcctctccctcctcctcctggtcctcctctgcccctcctcctccttctcctcctctgccttctcttcttcctcctcctcttcctcctccaatcaaatcgagcaatgctaatccctcctccttctacacttaaaggcctatgagcttccgccatcaagttctccataaaacatactgtaggtcattgtaagtcactcctatccctttgagctgtagattacctcatgccattccttctacctaactttattgtggtgcctctcgccagactccattcatacttctttatcagcctggagacctcgctgttcagctcttctcacgattgagatcagcttcaaacctctgccctgtgactccagagtctttcctgctaacatccctgaggaagtccctagcggtgaccaggattcgagcctgggttgggatctgaaagcacaagagtctctgtgaagtctcactgatgaagcattactgtaaacgccttccttttcatggtccctactgatggcaagctaatcggaaatgccagcctggcacaattgagccttccccgtgtgcctgccctttctcggtaaattctttgtgcatccgttccccaaagcctgtacccctgtccttttgtccttttgcatctgctcggagaatatatcctcccccacccaagcacagttaaaccctcctcctcttttattatctgtgcactgtgtgcaaatatccatcacgtcttaaaacaggttctagccagaaacaacaacaagcatccacagaacgcctcaaatcaacgtgccagtatagtgcccggcggtgggtgtatagacagagtgttcctgccctcacgttgactgccaatgggcaagccaacaagcaggggtgtccctgatgcctgtcagccgtaggtgttaagcaaatgccaagtggctgaatggaagagaaccaagtcctgagaaagccttgttaaatgcccaagtgtatgtctagagactctgtgctttaaatttagagatctataacaaggttgctggtctatgggttaggtacagctttaagactccatgttattgtcattgctgtgggcaaaggaggccctatctgtaatattaatactggtcaatggccacagaagtaaaaatggatctctctaggaatatgtaccgctcactgcatagcagccttctgtggatttcttttttacttttcttttcttttctttttctttttctttttctttttctttttctttttctttttctttttctttttctttttctttttctttttctttttctttttcttctttttctttttctttttctttttctttttcttttctttcctttcctttcctttcctttcctttcctttcctttcctttcctttccttccttccttccttccttctctctctctttctttctctctctctctttctctctctctttctttctttctttctttctttctttctttctttctttctttctttctttctttctttctttctaccatgttccaatgaccagtctgctgttaatgttaattattttttaaagatttatttatttatttgtatgtatgtgagtacacagtagctgtacagatggttgtgagctttcatgtggttgttgagaattgtatttagaacctcggctcgatccgctccagttggccccgctcgctcgggtcaattctgcttgctcagtccctgctcgctctgacccaaagatcttatacataagtgcactgtagctgacttcagacacaccagaagagggcgtcagatctcattacaggtggttgtgagccaccatatggttgctgggatttgaactcaggaccttcggaagagcagtcagtgctcttacccgctgagccacctcgccagttcagctgttaattatttacacattatttttattaaatattgggcatcatatgctacagggatatagtcaggcagcagctagcccacatgggtgctatgacttggtcataactcatcactttaataccggtgcatgcttctcaacaatactttcattgcattgacatattgaagagtgacatacaggaacagggcctcaaaacgaatccagtttattctatgattcagaagtatcttactatctgcttgatgcatttttaactaaaagacacaatttcacaacagaggacaatattgagggtaaaaagctactactatttgtgtgccctgtagtgtctgtgctctgtagtgattgtgccccattatgtgtctgccctgtagtgaatgtgccctgtaatgagtgtgccctgtagtgtgtgtgtcctttagtgtgtgccttgtagtgtatctgccctgtaatgagtgtaccctgtagtgagtatgtcctgtagtgtgtgtgccttgtagtgtatctgccctgtagtgagtgtgccctgtagtgatgtgtgccctgtggtgggtgtaccctgtagtgtaatctgccctgtagtgtgtgtgccctgtagtgagtgtgccctgtagtgtgtgtgccttgtagtgtctctgccctgtagtgagtgtgccctgtagtgtttgtgccctgtagtgtgtgtgccctgtagtgagtgtgccctgtagtgagtgtgccctgtggtatgtgtgccctgtagtactgtaatatccaaaataaattcaagactaccccataccttcccccttcaaaaagactttccaaactgtactagcagtccaagtacagagccaaataaaaagctggctgactaaacaaatataaaaacatagttttaatgatcaaaaacaagattaacaattcccctgccctgcctcacactaaaaacttcaaagacagacaaaatgaaagtcaccctatacaaaccaaccaatgtctcaaaaggttattggatacaccaattaaaataagccagactaccctggtgcctatatctggcccttacaaagttacaaaaagtgtgttctttgttctgggtctctcctctggcctgcgtactgagaggaggttccccgacatgttggataagtaaaatcttcatgtgttttgcaatgatagttgtctctgtggtctttgtgagtgagggtcttttgacaaactacaacagtacataatttaggggtccagacacattggtagcctggatagaaagctagcctgtttctcttttcctacatgcagtaggaaatgacttaatttaaaaatagcttctgtgtatcctatacattgtaacaaaacaaggttcctaacagttgggaaccttgtaaagtgataacattattgtaggagcagcccttcaagcttccaggatcaaagattctcactgggtcttttgcaacaaaagacacctacttaccttaatttccatagctctctgagtaatcacactgcaccaaagggaagggcgaggtgtgtaaaagtgaggaaacaagtgggcaagtgggttttcttggttgaggatctaattctaggatactggatttaacttagacattaatggcgatgaagcattgagtacattgtggagggaattgctgtgggctgagtctgggtggtcctgtgcctgcccgagctcccttcacgggcatccagctccaggctggcagccttccatagcatgtgaggccagagtgggggttaccctggaggagaggtttgggggtccatccgatgagggagagcaagcgcttcagcaggatgagctggggagacagaaactgtcacactgggagaggttgggctagatagggattttacaaacaggcagagagggggctgggctcggtcagcacctgaatttaattcccagtaagatgactgtcagaggaccactccccccaaaccctacccccgccctgttgttgtgagacagatgatttcagtctgagcactggggaggcagagaagacaggcaggtccctgggcatctctagccagccaccctcactgcttggcaagttccgtgtcaatgagggaccccgtgtcttatgtaggattcctattgccgtgatgaaacaccatgaccaaaatcagcttggggaggaaagggtttattcggcttacacttccgcagcactgttcctcacaggaggaagtcaggacaggaactggagcaaggctgactggaatgtggaggcaggagctgaggctgagggcttggaggggtgctgctctctggcttgctcctcatggcttgctcagcttgctttcttatagaacccaggactaccagcccaggggtggtaccacccacaatggattgtgtcctgccccatgaatcactaattaagaaaatgccctataggcttgcctacaacccaatctaattgaggcattttcttaattaagttctctcagatggctttagcgtgtgtcaaattgacataaaaccagcgagtatgctctgtcttgagaaatgtggatagcacacaagagatggcccctgagattgacttccggcctacacgtgtgcatacgtgcacacacactcacgtgtgtgtgtgtatacctcttcacacacatggacatatgcataatcattcctaaaagaacaacaacaacaacaaaaaccagaaaggcaaacagcaaagcaaaaatgatcacttgttttggaaattatctgaaaatagttggcacagcccgtgaaaacacaagtaaacacacaggactgtttaggcaaatccatccatggcatttacagtttccaacaaatctaggtggcctttgaacgaatcccctgcaagtctgcgaacctgcttcccccgtcctccagatttgctcagctgcaactcagtggcttcaatcacgctttgaagtctgttgccgccccactaacatttgttgagctcccattttgagcttaacaggatgtaaggctctcttcaaggtccgggaaccccagggagaccagccaagtggatctgagcaggcgcctgaatataccactttactaggaacccacgggtgtggctgagccagcattgttctgccccctccccggccccacccttccgttcttactacataagaagcccttgccatgttgacccccactcctcaggtatcatgggggaagaaagtggtttttgaccttctttaaaacgccatctttggactgcacgcagtacgcctggctgtgttcagacaggaaggagacagatacagtgaaacccgaggggggtcccttaccctgctcatttccttgagaacccaaatgccgaagctcttgccagccctccaagcgcccaatggaatccctgctcgtgtgcttatttttgggtttgtcagcgtgtttgtcatcttctccctggaaacggtttctcacacccacgtcgcgagtgtgcgatctgcgatgattccgtgtcctctttgcctggaacgagggctgagaacatgattcagcttagggaaatgacacaaaatgcggctgttagatctttcaaacctgactctttcttatgtgtttgcagtctctctacaggagcagaccctgctggaagcaagcagatttgagctctaagttcctaggctccgggtgtggcgggtgtcgcggatgtcgcggggagagactagaagacacactgttactttcttgttgccgtgagaaaagcaacttgaagggggaaggatttatttcagctcacagtttgagggttcgttcgtgctatcactgtggagaagcctggaggcagggtgagagtggctgtgaccatgtgataggctccgaggcagctggccacatcacgtctacagttaggaagcagaaagatgaaggcaggtgctaatttccttccttccttttttcttcccttcccctctcccttcctctctccctccttcacttccttccttccttaaggcagaagttcatacccatctttctgcttgcaaaactcgatcttgatgcttgttccaccccaccccccaccccaccgagagaagacaggagccttcacagaggttacacataacaggtgtctgatgtgactctaaagacactaaagtcactgtgtgagtgcagagctgctgcggctccgttctcagaaagtctgttgagacactctctgatatggcccacatctgtgacggtcccaggcataatctagttctctggagtgattgcttatagggtaagcttagtgcatagcttctattgatgttcctaattagaaggttctaacgtcatcaggggcttttttttttccttgcctctgctggacatgcctgtggttgaattagaacacatgatttgcgtgttaaacctgctgtgttggtcagacctcctccccataaacccaccgtgctggatgggacacgggagaaggaagagcaacaaaggcatctctaccaaaaggaagctgctcataggagctgtctgtgactacgtccttatagcattcaggtggaaaaaaagaagtaccggggaagactcagcacagccaccattctggcatggttttttgtgggttttgttgtttttgttgtggttgttgttggtggtggtagtggtgttttttgtttgtttgtttgttttgtttgtctgttttttccccggtggtggcaatcattctcacagcagcctctccttatatatgctcagcatcagaagcaacagaagtgagatacttccacatctcatttagctctcaggagtaaggtagattccatcaccccaccatttgtggtttgattaggaaatgcccctcaccctccccaccccaagctcttgggtttggacactccgtttccagctaacgtcactgcctcggaaagctgtagaccctttaggcgaggcatctcaatagaagggagtaggtttgactgctcttaaataccgtcctgtgcctgcagattatatactaatactttataactaactcagtgctgtgctgctccaagacaacgtacctgcccccttgctagctagctctcctgccgcagtcagatgcagatttttagcttcttccacaattagtaagtagccctgttgccgctctcagtcgacctgggaaggacagtggaggaagactggagggtgtgactcaaaattacagatgtgtggtgagcattttatctacagacaggaacccaggggagctatcacccaggctttttaaagcccataccatagcatcattgctgagctccgatgagtcagaatgcgctggtaacgggggaggggaggaaaaaaccctttcctctgtcagacttgaaatgtttgtcaacttcatgtgaatgaaatcaacaaataatgcatcagcaggagaaaatgcaaactgacttggcgtgttattaattatgttttacgcaaaggacctcaaatcaaagaagtggttagacttagtgaggttaaagcaaaaagactccagcgatgaacagactggcttttcagagggggaagtttgtggtgacgttcacctctgcacccttaagaggacttctgtgaagactggaacccccggagaagaaatttatggcagcctcgggtcccagaagttgtgtggttatgcagatgagggaaatttctggaaggagttggtcctgtctgtttaatcgtaaatgtcttcttcggcttaagctaaccacctccggggttccgagtgtgtcctcacagcagagaagctccaggtgaagagtgctccctgtaaaggacctgtgtgggtagtctctgtctcccaagtgctccccaggagatacacacaagtgctctcctgcagtcacgtggaagacaagtgtgctcttccgacaaggcggcatgattgcttccctagcaactagacatagctaactcctctcaacagggatggcttgtttatactaaactcaaaatcaacttatatatttgttagagatcgcctccatggtcttatacatcttaatatatataatatacactctacaatcatgtatctctggtttccagcattcctattggctggtcttcagtatcttttagtagaaggaaaaaaaaaacttcagcctgacagtggtggtgcacacctttaatcccagcacttgggaggcagaggcaggtggattttctgagttcgaggccagcctggtctacaaagtgagttccaggacagccagggctacacagagaaaccctgtctcaaaaaacaaaaacaaaacaaacttcaaagattattttttttaaatcagtaatcaaattaaatctgggattttcagatgaaaatcccagagtaggttttaattcagtcaccttccagaagggccacagaatatgatattgttaaaagccagaatattcaataacactccgccattgtttgggttcagaaagacccgtatggttccagcactggcaggcatgcttggcaggcatgcttgcttctgagggctggagcctctccaaagggcttgaggccgctgaggctgtggtttagaagcaggttacaggatcttgtctgcctttcccttctgagagcactcactttaccccgtgtggccagcatgttgcagtcccttaacacagacctaagccaactcaatctgtcaaccgggttccccagggtgggagcaaggattaaacagaaaaagacaatctgacaacgctgtagtatgaccccagcctgttctaaggctgaagcgggtttatttatttattttttcccaatctgctcttacaccattttaattgcatgcaaataatcaggtcagctctggattaatgagcaaacaaggcaataaacacaaatagacaaggaacaaacaaagtcccttaatcactgtttctaggggctcatctgaatgaacagtatatccacgcctacttcactatcctagcccaaagtcagattcttgcctgaagcctacttctttgtcctggcccaatgtcaaattcccaccaagttcctagaagtggcccccaaaactctccacacaagtctttctcctccataaacgaatgaccccaagcactttgtatgtagttgtagagagctaccatctaaccacagtaaagcttggcgtgtgcatgtgtgttatgtgtggaggtcaaagggcaacctcaggtatcattcttcagaaaccacttgtcttagttagggttttactgctgtgaacagacaccatgaccaaggcaactcttacaaggacaacatttaactggggctggtttacaggtccagaggttcagtccatcatcatcaaggcaggagcagggcagcgtctaggcaggcgtggtgcaggcagagctgagagttctacatcttcatatgaaggctgctagcagaatactggcttccagacagctagcatgagggtcttaagcccacagtgacacacctactgcagcaaggccacacccactccaacaaggccacacctaatagtgacattccctgggccaagcatgtacaaaccatcacactacctgtcttttcctttttgccttgacacagatctctcactggcctggagctcatcaatagactaggttggctgacccgtgagccccaggggtctgcctgttttggcctcctgagtgctgggattacaagtgcaggccgccacagccagcatttctttcatgggctctaagggatctaacttgggtccctgtgtttgcaaggcagaagtaccagttctccagtcccactggtgatattttatttacattcttgtctacatgtttaagatttatataaaccattttgtaagactatttcataaaacccaccccacacacagattaagttaagctgtcaaagcacacaagggtggctttcatggtgggttttcatctccttgatctggaattgtgaaagcattgttttaactcggttgtcctcaggcgggataaaccctgagtattgctgcaatgcgattcagtcctgcaggtccctaaccttgggctcagtatggtaagaaaccctcaagtgattttcatccttagctttgagcaaccgctatcctggtctctcagaatgtagttcatgccttacatttaggtaaacgtgcacacatttttttttcccttctaggttagccctaacaaaacaccaaagtctcttgttttctttgcttatgtaatagcagttgggtagccagcctttccttccccaccagccatgggtatccgggggctcaggaaagttttatttaaactaaggctgaggctgatcttacttcttcatcctaattatactgcctttatttttttctgtcaggctagggattttagtttattcaaatgtcctgtttgtattatccatttcaggctctttgcgaaactaggccatgttgtaaataataaatattattatttaagcaagcctagttggagcctgctcagaaacgctcatctgatttaagtcaacattcttggtgtcctttggcctggccacagccatgcttgtggaattgttttgaccaaagtagtgatgaaactttcccaaaagtgtaagcaaaagtatctctaatgatacaataagccatgagtaaggtttggtagtttgtaataaataaaccaatatgtaaatgtacaacttccatggcttgggaggactggggtttggcaatgcgtaccttgtaagcgtagagtgtgcacagaaccttgtaaggccctaggtgcaacacccagtacccaaggtaaggataatgagtgggagaattcattaagatcaactttaaatgtatgagacagacaaggtgaggcgagaggaactaggccagcagaaggaagtcttattgtcttgctaaaatgggtcaaagtctatcacagtgtgtaagaaaacagtgagccaacaaaggtgatgtcatcattaccacaacatcctttctgagctgcactggtgttttccaaggttactcttcttttatgatacttacggtgatattttccattacaattcccacatcctccaaaaggaccttcttgcttgcttttttaaagtcctcaggtacagaggaatcatgctcttttttttttttttttttttttggtctctcattttaagagtcctataaaagtaatttattctcctggtgtaattgttgtctccatggcttactccctccatcctactgacctaagcctagtcctggaagcttcttgcctccatgtagtctaatccaggcctagaatgttttcagtttctgagacttgctgctgaataagcccaccctttctagttctctctgaactctggctggctggtccagctcagctgtcctggctcaaactcctctcccagctgacttagccaatctgccttctctctctctctctctctctctctctctctctctctctctctctctgcctctgaactgctcggtttggcctcacactaactccagcaatttttcctaatcttctggctctttcccattctctggttcatttgtctttacctgtgtctagcttgttcactcttcaatctgtctctgtaaaactgcctccttcctctctgtgctgctccactctccctctcaactctactgcactgctccccacgaactctgctgtagcctgcactgtactctcttcctcctgtactgccggtctctcccttaagtagcttccctcctctctctcttttcgtgagagatgggcattacccgttctgtcaaatctttctctgattcatcactttgtctgccactcaatgagacatcactttcgaacatggatgctcccttctacaaactgactttaccttccttgtttgggattaaagacgtgtaccaccacacctagacctaagcttttctttacctgaaacttgcgctatacccaactggccttaaactcagaaatctgtttgcctccatctcctgggataaaagccatgtctgtattcatcccagccagattgcacagacctagaggtcttggaagtgattccttgccagagcagccctgttctgaaagaaaggtcctctacagagttcctcctcagttctgccatataactatgggaaggaaaatgaattctgagccaaagagctttgggccagtcaacctggaggaaagagatatctgaggcaggagggtgtgccttcaattaagatgctgtgagcccaactggaatgagtgaattgtaggccagaagaagccatttcaaggccatctcagtagatcatatataaccaagcgactagtgacctgagatattagattttcttatccaaggagattgtgaaacatacttgagctgtctcaagtagaaagagacatgcatggtttttaaggaaatgtgtatgataatatttttttctacctctaaagaaggatttgttgaagtggttcaaattcagctccaatgagtcattttattttgtcacttaaagctctgaaacataagtgttgcccaagatccaggagatggaattctagaaagtttctgaggaaaacacgcttttggatccaacagtttccggtcgcttccttctctcctgcccgtttcctcccgggttttctccagccagtgctccggggtgtggtggttccagactccctcttaggagctctttcactggctgggttgttccttattgtgataatggcattcagtgccatcctcagtaatgactggagaaagaatacaaaagaagccttttaattacttatgcaaattactcatgcagttactatagtaataaaaacccctggtccctttccttttgtttttcacaccatcaatttctagtgcatggctccttggtatcaagtgtattcatgttgcagtgcagctgacctttatgatgaagaaaatagaactcctctttgtatcaagagtttcaaaggtgtagaatagtgttctccagagagagcatcctgagagacagcttggaccttctcttgcttgcttggggtcacctggcagcggtgggcagctgtggctgggaagagagcagaggcactgctggccgagcagattgtaaggactctagatgtgactctgactgtcttgtgcctgggttattctggggccttggcttctactactccagactggggcataaagtttctttaaaccttacacggagagtaaggaacacaggcaggctcttcagcagcagcaagaagttacttaacaacaaatgggtgcagaatgacagaccaccgacaaagccacatctctgtggcatcttacaggagagaaaaaggatctgaagttaaatgagtgacagcccaggtcttgaagataacgggttgctataagagtaattggagtgatttctgcaagctaagcgtgatttgggcctcatttctacaaagattctgagttaattttatttatttatttagtgaatatgagtgctctatctgcatatatgcttgcatgccagaagagggcatcagatcccactatagatggttgtgagccatcatgtgcttgctgggagttgaactcaggaccccaggaagaacagccagtggtgctcttaaccactgagccatctctccagcccttctgcgttcatttaatataacttttcattgaaatgccaactagaatctcgcttcatgtgcaaaaattggcatcctgcaccaaagaagagaagcacaagggctcggtcatttcagacccagcctgaacaagtgtttctgctggtgcgcaatgataacctaaccttaggaagagagaagcacccagtgtcctttgtagcctcagggaaataagagctatgatgaaagggaacccccaggagtgtgtttcctctcaaaagacactacccttagccaaaaaaaatttttttctaaatatttatttatttatttatgatttttcaagacagggtttctctttatagccctggctgtcctggaactcactttgtagaccaggctggtctcgaactcagaaatctgcctgcctctgcctcccaagtgctgggattaaaggcgtgcgccaccaccgccgggcacctcagaagcctttgatgttcttggggataatgggataaattactctatgtctacatacgtaggaagcatagctaccattgtaggaaacagcaaaccttcctggggatgaaatgccaatctttcatcaaatataagcctctggcaggagagctgaactcccagccatctgtctcatcgccagagatgggcgagcatggctcgtggaacgtgcctcatctttcttgtctatcggagacaaacagtagcaatcgaagcagcgtccactcgggcaagatagaaacctaccgctgacactttgcaggattaaccaagagagtgggcagcggctccggaggacgattagtttcacgcagaaacatgagaccctacattcagctcatccgaggcctgcttattaataaagcctttggttcatatagccaggctcggttgatctgagaactaccttttgaagctatgatgtcgtgctgtggtatttcatcgtactggtcggcagtcatagttatcttgggatgcatgtgacctgcaagtgctgcaggttagacatgcctgtgggagatatatctgtcatcctaacttgaacaatacattatttccccctttaaaataaaatcacttggccaggcagtggtggtgcacgcctttaatcccagcacttgggaggcagaggcaggtggatttctgagttcgaggccagcctggtctacagagtgagttccaggacagtcagggctacacagagaaaccctgtctcgaaaaaccaagaataaaataaaataaaataaaataaaataaaatcacttgggatccatctaaatgccacgtggaatttaggtttgttggggaatgcccacccgtcatttggcctcagcccattggccagtgggattaaaggatcaggaagaaaggggggaagccatttaggatggagcaaaaaacgacagcaaaaggatgctatacttttgacattttgcagcatgcaaatgatctaataagcagtatgcaaatttgcaccaattacttgattcgagagctcacggcttttggaaatgggtgtggagcagtctgggacggtgtctgcaatcagagtcatcactttcaagggtgattattccctacgccggagagcacttgtcgtctgcaggttgtgtagaatgtgctgggctgagagactcactggtcttcctttcctgtcctccactctcttgcagaccagaggacgttctcctacagcgcacacacgacgagattgctctcctgcactgcttcctctggccggtggtggcgtttgtggtgggtgttctcatcgtggtcctgaccatctgtgccaagagcctggcggtcaaggcggaagccatgaagaaacgcaagttctcttaacggggaggaggaggattgtgggaagccgagaccagaggttgcctcgtcggcactcgcctgccctgcagagcccacatttggtggcgcaggagatggaaggggccgcaagaggcccccgagaggcccctccctcgtcggcagcagaaacaggcacagttggaagactggggggacttaactgcctgtattccatgtgctgtagcaacggctaaagggtcaagctcttagctctatggagtgactaactgtttgggaaaccctcaaagaagtcggttttctttggaaagtaacagtctatcatttgtatagtgtagtatacaaaccattatgatttatgctcctcacaaatattaaaagacagtgctctgtgctctctatttcctttttatgcttagatcaccagggtattcaaagggggaggggtggatggctttcatttgattcgctagactaaacccttacttgatcgtgagcactagaatcgacagaaccgttgaccttaagacataaccattggtttccatgagtacatagtctcttgactcctacttgaagaaggaattctatagtgatagctcagtctacagccacttccgtccagaaaatacccccccactgcctgcctttgggtagccattgtttctggccagatgacttcgtgagagaaagacctgattccaaagaaggcctgtcctcgctctggggacccggagttcttacgtatctgtttatgctgtttattcattcatttgaagttctaggaacttaaacaagggcactgagccactgagccacattcccagcctcacttctccccatcccctcctcctcttcctcttcctccttctcttcctctcctctctctcctcctcatccttcttctcttcctcttcttcttctccttcctctcctccctttcctcctcctccttcctcctgctgctcctcctcttcctcctgctgctcctccttgtcctcctggtcctcgtcctcctcctcccctcctcctcccctcctcctcccctcctcctccccctcctccccctcctcctcctcctcctccccctcctccttcccctcctcctcctctttggcatatccttatctctgtgcagtagaacgtacacgacctgaaggacactcttcagttcatggttaaatgttgttttcctttaacaaagtcagcccaggcggttgatttcccttgcctttgtccttgcccccatgttctgggtgtcacagcaggatgactattgcagttcagtttgctcagacagagctaggatgcagcttggctcactccactgctgctgggctttctgtgccttcaaaagtgtgacaaagctgggcgtggtagcacacagggatctctctgtgttcaaggccagcctggtcttcacagggagttctaggacagccagagctctgtggtgacactccaagtgcatccaagccatccatcatctttgcatctgttcatagacggagtttcaaatatcaaccatgagtctcagcagatattcgatcccctcccccggcccctatttaccacctagaaccaagcctcattcagatgagatgcatattttcagtggaggggacaacttagcaatggcctcagctttcttctaatcccgcaggcagacgtgctacccttagcatgaagttgggatttaaggacaggctcccctcgggtgtttccacggagttttgaaaaggaagtggagggatgactgcctctctcatatccacacatcactgttctctcagcctcagagtggaagctgtcaagagcacccttgtcccctgaataaacactgaagaacacaagtcttttcttcttctctctcttaattcagaggttgcaggcttcactgtgaatagagcctggcgcacactatttatgacatcctttgaggctgctgttgcagggccttgacttcagttcccattttcttttgcagtatccttgttgtcttagcaacacagaaactattctgaagtgccgggtaccatgaaaccaggaatgagagaaaaaatcgtcgtgttggcatcacacagaggacgatgaagtctgttcttatgctcatccaattatctctgattaactgatgataaagaacacataaaccctaagagctcatgagtgcatatggctgtgctggaataaaaggaggtggacactgtagtcaacccaagttttcatttgtcaatttgatactcgtgatttatattaagtacatgcattcatttaagcccaaagaacatgcatacagttgtatgatacagggtgatttggggaacaggataaacacacgaaatccatgaagtcacatgtagttttcatgtcttgtttccaaacagttcaatctgaggctccttatttatactaagatcattgaagataagcttgacttcttaatgttctctctccctctccctctccctctccctctccctctccctctccctttctccctctccctctctttctccctctctccccctctccccctctccctctctctccctctctctccctttctccccgtctccctctctctccctctctccctctccctttctccctctccctctctttccctccccctctccccctctccctctctccctctccctctcccttcctcccctctccctaagtcagaaacaggaaggaccaaactgctgtaacacaaaccccgagatagggcaatttatataaggtgcaagtttatttcttccacagcaatccagaggtagttgataagttgagagtgagtaggcaagctgtttgaggtttgtctacatgtatttctcttacagttgaagctgtctcaaaaaggcatgtgtacctaccagcctggaaaagaaaggatgttggggattaaagctgttgcccttaaggatattggaccatcacttgtgcctatccgtatttaccgcacagttttcagggatgcttgaacttgttctgcagatagacacaaaccttacaaaggacctagggggcaggggagccactatcactaaagcaaagaaggaagggaattaatggtaaaggaaacatgaaaagagatggagagaagtaacaatccatgctggatggagcaggcatggacagaagcagggccttcttggctaccccaccagtctcctctctgggaagggatgctgtagtctgttgttcctgtggcctctattgggagctctaggaaatcaatgacagcctactccatgcaactctgaaaaattgagggacatcccaggccatctgccgccttagggacgaaggagacttttctaggctagacatatagtttattcagctcactgtaataaccgccgaaacccaactcttgatgtcaccgaacaccttcaagccctacttcaccctcggactccacattagttttacaagctcttggacagccagtggctcttccttgggccccagtaggaagctgagatcacatacaccctgggctgcttgtaacaacactcagccaagcctaaccacctgaaaaaagaaaagctaagccagcgaagcccttgatggatccaccaggagcctgctgtatctccctgggagcccactgtatctccctgggagcctgctgtatttccctggaaggtatatagaaaataaaacttttcatgctgtcttggtgtgtatgtatgcgtgattatcaacacctgaacttaaattcccagcaccttgctgcatttttgggtggtggcgatagcggcatttaaagtcgaccacagcatcaacaatataatctcattaaaaaactcggtagagggctagagagatggctcagtaggttaagagcattggttgttcctccagaggaccagggttatattcccagcacccacatggcggctcacaactgtctgtaactccagttccaggggacccgacaccctcacatagacatgcatgcaaggtacaacaccagtgcacatcaaataaatcgttatttaaaaggatggtcacagcattaaagagacaatgtcattaaaaccatagcagcagccgggagaaatggctcagtaggttaagccatttgctgacggcctgaagatctgtgtttgactcttagacccctgtggtgaaacaaaagaatctacttccacaagttgcccactctacacctcccccaccccaggcaccgtagcacatgcatgtatctcactgaacagatgcatttaataaatatatttcttttaaacccactagcttacaagtctatatcctttcaatcctttcatttgagaataactgagagagagctcaggcccagttcttgccggcagcccttgtgtgtggcctgtgtctctgtccttccgtttgatggcagccaccttgaaaaaaaaatgaatttaagtaggaatggagcacccttcctctcatctattctgagctgagtcccactgtctgatcaaaaattcttaatgaggctgggctgtgtggcacacacctttaatcccagcacttgggaggcagaggcaggcagatctctgagttcaagaccagcctgcgatacatagcaagttccaggacagccagggctacacagagaaaccctctcttggaaaaaaacaaaaaaacaaaaaacaaaaagaacaaaaacaaaaaaaaaaaacaaaaaactcaatgaggagtttgagaaagactgactgataatcagaacttgggctgtcagactacagaagcagttgagcttcgggcaaaggcagagacaactaaaagctttgtcacctacagctggcctgtgtttattttatttttcctcttgttctagttttttcatagctcctgccggggcttgaatatgattggccaaccagaggttccttccattatctcattctccaaaaattaaagttaattaaactaccttgcttgagttaatttaatgattaaaattgttttaatcagtattttcataaaagccgaggggatgggtgcgggggaggagaaaccctgttcttctgctggagtaagatacttcagaagggcgaggaatggggtttcctcaggcaggatgatgttggggacagccagcagagttggggctacataaaggatatgagcaatgggatctgtaggtttgtttttatgtctgtattcggagttctccatcacctgccaattgccgctgtagtcacaagcaagaaaacagaactaacccggacgtccatcagaaggtgcatgcataatagaacatagcgcatttgcacagggtaatctcattcatctggaaagagaaatggacatcacaaaacactcaggaaaatggatggatctgggaaggttaatatccagcggcatgacccggatgcagaaagataaaaaccatatgtgctgtttcatatgcagattgtaacctgtaaggtacacattatatgtaaatggcgcaaatatcagtaaagcaagtatcagtaaagtctaagaaaaaccagaagggagagcaagagggtagaaatagatgctaaggaacgatggtatggtggtacaagataaaaattcacaaggaagatgtaaggaacggggaaggggcatgctgggaagagagaaggaagcaatttgctaactcgcactttgagtgaaaatgccacaatggcacctactgtctggtatgcccattaaagttaccgaaaaaataaagtacaaacattaaaatgcattctaattgcaggaaaagaacgtattctggaacgtgaacatatgtgttggctttggtttgtatgtttgtttagtgtattttaaaattttattttggcaaaaaagagtatcttcggtcgctcagcccatccttatcattaatatgtagctgaggctggcttcaagtgtgacgttcctgcctccattgccggagtctcaggattacaagcatctactgccacacccagttttagaacgagaagacttaaaatattgtaggaaataagaagagactcagagggtgacatttcaggaaaggacaaggatccagcagggggttattagaataaattctccctcttgggagtaattatcgaagaactaaaaaagagcgtgagattctggacttggcatctgggctctccttgcctgctggtctttgctctggggtaagatggcctgtttggacagacatctcaattatggagcggtgctgactctggatccttagtgagggtcaagggcgagtgtaaggcattagtgcacagctctgtcagtaaacgctaaccataacgctgatgattgcgcttgattgcagtagtgcgatgtcaataaaaatgaaaaaataacggtctcaaagcagattcaggagataaaattctgggcctttggtcctctggttcttcttgcttagtccctaccaaggtaaaagatcagtgctgagttttgtccttttctgaagttctatcattagctccttttatttctagaactcaaactttaaaaaaaaaaatcacctctgatatctatttttaaaagaacagatactcctaagttctctactttgttcagccctaatacattgatgttattgaaaaggtttggcctcaccgtacttctcaatttccagaattattaaaagataagtcatctctttgatgaagagcaattaccggcattctttcttttcttagacgtggaatccagagagcaccgtcctcttcgtccgttcttcagagaacagagcaaatgactgcggtcctttttgcatgattaatgcaccctctaaaataggcaaaattcctacataagtccaaaaacatctggaatatataaaatatatttgtatctccttagcaagtctctgacccaggataattcttactctcccaaaacactgctaatgtgcttgatggtaccactctcccagcactgcaagacagttagaaaagatccaattaggatcttaagctccctcacagcatttagaagtgacgataaattcaaacgagaccaccccgagtctgtggaggacttggaggtgtttgaagtctgagacaaacgcttttcttcttgtaaaagtcagcgatagttaaaggtcagaaatatagtaacctctgagaggtctagcattcacggtcacggaggggcagtgagaattaatgagataaagtcaaagcaagagtcgtgctgacgacacaggatgtgccggattaaatgccagttgttgctcccagttagtaaaggtctctagagcgtcaaagtcactgccaaggacactccacacagttctcctcatctgaagctgagctgtgtttccactttgcccaggtctccgtgattcacagcacaggacatgagtcacacctatagacacttgttccatttagtgagtggtagttactggacttgaatctgctctaagcttagtatggccttgtggaagcagccctgttccagattctttgtattctacatacagcattgaaaagcaagattccaggtagaatccaggcaagcatttctgagactgggatggggaggtgagtttatatagcatcttatagcctgatgcaacaaagctgactcccccagcaatggcacctctcaatggttaatgtcgactgtcaacatcacaggatctagaatcgtcttggagagaaatctcagagcaggactgtgagagtttctagattaggttaattgaagtgggaaggttgatcttaaatgttggggggcggggcagcagcatcctatggcccagggtctcagaccaattaaaaaaggattaaatgagcggagtagcatttacctctccgtacttcctgactgtggctgcaatgtaacctgctgccccaagtacctgtcattatgccttctctatcatggtacccccagacccatgagctgagggggacccgcacttcctcaggctgtttttttgtcaggtatcattttatcacagaaatgagaaaagtaactaaacacacacacacacacacacacacacacacacacacactcactcactccatttctaagatgtgtggctgaaataatacttgactggccatgagaacagagtgggaggaagtctaggctagatggaccatgagaaagtaagactcaagttcatggttgggatgacgtggatatgtttttgaagaagtctttctggaccaactaacctgtctgtccttgtcacagggggctatagagcataaccaacaaaacatttgctgaccgactgtggggtgcatagcaatacatacatagactattagacagttgatattagatgtatattgtctctacagtctttctctggcctcatgctttctctggctttacttatgacctcagctgtgattcccaggctactcatccttgcgttcagccattgttactctatgttgtctggcctttacttaccccaagcccttcccatatggccttatctctgatacatgcttaggtctctgtttctagttttgtttttttgggttgtttgtttgtttggttggttggttggtttttcgagggtttctctgtatagccctggctatcctggagctcactttgtagaccaggctggcctcgaactcagaaatccgcctgcctctgcctcccaagtgctgggatcaaaggcgtgcgccaccacgcccggcttgtttctagtttttaaacaaacagacattgacaggaaaaaaagtgtgatacatatcagacaacttgaggaataacggtctgccttggataacttgttctggaaacttgttcacagcatggtgcggccatttcctgatatcccagcctttgtcccgtatatcctcgagtacaagtgcactgtttttcttggggcccgtggatctgtcccgtggttcggtactgacttctcattgtatttgcatatctgagtcttcacatctatcaattctggctaaagtattgactctccccaagcattttgtaatcatccatgcaaatagacttacctggctctcctacattctgcatttctcctttctagtttctattggtatttatacttagttgtctagtcttaccttgcccagtagattgtaggattcatgaaagtaggacagtgttggcatattttcttttcattcattgggcatttatgaatggacggatggatggatggatggatggatagatgaatgactctccagcctaattaaattctttatacacgtcatttcctatcttctcctctatcttgagaaacttatgcccacctgcaacccattattcttgctttaaaaattaacacttggtcctgccagatgccatgaaaacatgtacacatctctattactgtaagaatgaactatatgctatatgactgtttgttaactaattgattcttccttgcctcctcatgtcaagaaatatatctcactgacctcctgaccccctaatcacaataacaagaagtaacttctagctactggtcaattgtttgtttattttgtttacctgagagttctttgtctagcgccacttaactttcctcagaacttccagtgttagttgcttagcacagagtctgagacaaagctatccctagaaatgtaaattagaacaccacaaatagatactgaggtgagcctttatgtgaaacctcatagtcagatactggtgacgcacacctttaatcccagcactcaggaggcagagccaggaggatttctgagtttaaggccagcctggtctacagagtgagttccaggatagccagggctacacagagaaaccctgtctcgaaaaaaacaaaacaacaacaaacaaaaccagaccgaaacaaaacaaacaataaaaagaataaggaaatattttgtttttaatatatagcactcttgaaactaacagcagaaaagggcactgtgttcaccaccaaattacctcagaatttggcaatttaaaacaacacaggacatttattatcttttgcaacttccgaatcaggaagtcaggaatcagaaaggagcttcgctgtaactctgaattactcctgattgtccaatcagtgcgctgatgtgttgccttgcagtggaataaacatgagaagcaggtggcacagaagagctccaacgaggagctttgataaggacacagccactcatttggcagaaaaagcagacaaattgcagttgtttttctcttgacgggcacggagagatttctaagagatattgccagagacttggagacggcgttttctgtgcccccggggagcttctgggagcagaactagaccatgtgtgacctctgctcacgcctccctccctgtgaacagcctgcagccagaaataagaaagctaacatataaacggagattgaaattagggtcggaaatagccttgttgctggatctttaacacctcaccgaggtttctcaaagagtcctcagaataacccgacgcttttacagatggaactgccagcagcatccaaggcatgaagcctcgatgaaggagactgcaaataacggagccaggagaggtactgggaaaaggactcgtgctagctccaaactgaacaggaaaccgtgtgtggagactcatgctggctccaaactgaaccagaaaccctgtaagggtccaacagaggggctcctgaggggcaccagggacctggttatccattttatcctttgaaatgaaaaaaataataataaaatagaacagggaaggacatgactgctcctaggtatggtggaggagaaagtttactgtagatgtgagggagcgcataggcagaggcagagttgtctgggagaggccagggtgaacatgaccagactgagctgggccttatgaacagagaatgggagggagagccagagaggagtcacccaccaaaagaggcggcctggaccaagagactggccaatagggtaaagggtaggcctagaggagaaggaccagggcagtaaaatggatggaagggtagctggaagaagggcagcccagccccggggctggagaagtttaggagagtgggcggggtatgccagccatatagctagggactgagggatgctgggagaagctggtggccaggtctgctttgatattttaaataggcacctcagccttttgtcccaggtttaagacctgacacccttaacttcacagggtgaggtgtttgtttgtttaatactgtaagacatccttgtgaatgtctttgatattgtgtgtcacagcagcactgtcttgtcacctctccctccggggtaataagctactaagggtgatgggcagccctgataaccctgaggcactcctcctatccctctcaaagatctctcacctttgtcttgtaactaagaaacattcctccatcctttctgatgctgtctgccaactggattgggagagatcagctgggcaggcaagtgcattagattcactcctactccgaatgtaacttctggaaaagtctatggatacacctagtctatggatagcttggaaactactgacttactggtgtgcttttgtcaaaattaaaccccaattgaagatacccatggaatgctagacttgggatggactgatggtacagacttaggagagaggaggagaaacgattctgtatcctccccagtccagcggctgagccctgcatactaaactgacaagaggtttttgttttgtttgaatgctgctgcaagcttctttaatgtgcccattggtcccagttcccgattagctaccattgtctgagtctgcgatccttggtctctcaggcagtcctcaactcggtcttcctgctcttccctggcgtttacatagaggtggacccgccctgtgtgtgtgtatatatatatatacacatacatacataaaataagagattattaacaagagaaacatatatgtgtttatatctatctatgtctatacctatgcttatatctgtatctctatatatatcatatcacatatgatatagagatagagatgtagatgtagaggctttcacatggggaaaaaaatctatgtaagaaagatgaggtgcaaagaagccattggccatcagagctctcaaccaacagcattgcccagaggcgagaagggaggagacaaagggttaagcccttaggagtgggaagttatggacttctttggtttgagagagaaagtagagagctagtctatctgctgttcttcggttgtattgagctcaaaataattcttaagtccaactggcatcttttagagtggcaaatgctgatccccacgagtagaagcgtcatggcttaattcatcaagattcacgttgtcaccaaccttcacagcgacttctaaatgataaagggcacaagtcagtagttgaaatcccaactgcaaatcaaaaaggccacatgctcatttatatctgttctaag

SEQ ID NO: 68 - DNA, 79656 bp, Mus musculus
cttagaacagatataaatgagcatgtggcctttttgatttgcagttgggatttcaactactgacttgtgccctttatcatttagaagtcgctgtgaaggttggtgacaacgtgaatcttgatgaattaagccatgacgcttctactcgtggggatcagcatttgccactctaaaagatgccagttggacttaagaattattttgagctcaatacaaccgaagaacagcagatagactagctctctactttctctctcaaaccaaagaagtccataacttcccactcctaagggcttaaccctttgtctcctcccttctcgcctctgggcaatgctgttggttgagagctctgatggccaatggcttctttgcacctcatctttcttacatagatttttttccccatgtgaaagcctctacatctacatctctatctctatatcatatgtgatatgatatatatagagatacagatataagcataggtatagacatagatagatataaacacatatatgtttctcttgttaataatctcttattttatgtatgtatgtgtatatatatatatacacacacacagggcgggtccacctctatgtaaacgccagggaagagcaggaagaccgagttgaggactgcctgagagaccaaggatcgcagactcagacaatggtagctaatcgggaactgggaccaatgggcacattaaagaagcttgcagcagcattcaaacaaaacaaaaacctcttgtcagtttagtatgcagggctcagccgctggactggggaggatacagaatcgtttctcctcctctctcctaagtctgtaccatcagtccatcccaagtctagcattccatgggtatcttcaattggggtttaattttgacaaaagcacaccagtaagtcagtagtttccaagctatccatagactaggtgtatccatagacttttccagaagttacattcggagtaggagtgaatctaatgcacttgcctgcccagctgatctctcccaatccagttggcagacagcatcagaaaggatggaggaatgtttcttagttacaagacaaaggtgagagatctttgagagggataggaggagtgcctcagggttatcagggctgcccatcacccttagtagcttattaccccggagggagaggtgacaagacagtgctgctgtgacacacaatatcaaagacattcacaaggatgtcttacagtattaaacaaacaaacacctcaccctgtgaagttaagggtgtcaggtcttaaacctgggacaaaaggctgaggtgcctatttaaaatatcaaagcagacctggccaccagcttctcccagcatccctcagtccctagctatatggctggcataccccgcccactctcctaaacttctccagccccggggctgggctgcccttcttccagctacccttccatccattttactgccctggtccttctcctctaggcctaccctttaccctattggccagtctcttggtccaggccgcctcttttggtgggtgactcctctctggctctccctcccattctctgttcataaggcccagctcagtctggtcatgttcaccctggcctctcccagacaactctgcctctgcctatgcgctccctcacatctacagtaaactttctcctccaccatacctaggagcagtcatgtccttccctgttctattttattattatttttttcatttcaaaggataaaatggataaccaggtccctggtgcccctcaggagcccctctgttggacccttacagggtttctggttcagtttggagccagcatgagtctccacacacggtttcctgttcagtttggagctagcacgagtccttttcccagtacctctcctggctccgttatttgcagtctccttcatcgaggcttcatgccttggatgctgctggcagttccatctgtaaaagcgtcgggttattctgaggactctttgagaaacctcggtgaggtgttaaagatccagcaacaaggctatttccgaccctaatttcaatctccgtttatatgttagctttcttatttctggctgcaggctgttcacagggagggaggcgtgagcagaggtcacacatggtctagttctgctcccagaagctccccgggggcacagaaaacgccgtctccaagtctctggcaatatctcttagaaatctctccgtgcccgtcaagagaaaaacaactgcaatttgtctgctttttctgccaaatgagtggctgtgtccttatcaaagctcctcgttggagctcttctgtgccacctgcttctcatgtttattccactgcaaggcaacacatcagcgcactgattggacaatcaggagtaattcagagttacagcgaagctcctttctgattcctgacttcctgattcggaagttgcaaaagataataaatgtcctgtgttgttttaaattgccaaattctgaggtaatttggtggtgaacacagtgcccttttctgctgttagtttcaagagtgctatatattaaaaacaaaatatttccttattctttttattgtttgttttgtttcggtctggttttgtttgttgttgttttgtttttttcgagacagggtttctctgtgtagccctggctatcctggaactcactctgtagaccaggctggccttaaactcagaaatcctcctggctctgcctcctgagtgctgggattaaaggtgtgcgtcaccagtatctgactatgaggtttcacataaaggctcacctcagtatctatttgtggtgttctaatttacatttctagggatagctttgtctcagactctgtgctaagcaactaacactggaagttctgaggaaagttaagtggcgctagacaaagaactctcaggtaaacaaaataaacaaacaattgaccagtagctagaagttacttcttgttattgtgattagggggtcaggaggtcagtgagatatatttcttgacatgaggaggcaaggaagaatcaattagttaacaaacagtcatatagcatatagttcattcttacagtaatagagatgtgtacatgttttcatggcatctggcaggaccaagtgttaatttttaaagcaagaataatgggttgcaggtgggcataagtttctcaagatagaggagaagataggaaatgacgtgtataaagaatttaattaggctggagagtcattcatctatccatccatccatccatccatccgtccattcataaatgcccaatgaatgaaaagaaaatatgccaacactgtcctactttcatgaatcctacaatctactgggcaaggtaagactagacaactaagtataaataccaatagaaactagaaaggagaaatgcagaatgtaggagagccaggtaagtctatttgcatggatgattacaaaatgcttggggagagtcaatactttagccagaattgatagatgtgaagactcagatatgcaaatacaatgagaagtcagtaccgaaccacgggacagatccacgggccccaagaaaaacagtgcacttgtactcgaggatatacgggacaaaggctgggatatcaggaaatggccgcaccatgctgtgaacaagtttccagaacaagttatccaaggcagaccgttattcctcaagttgtctgatatgtatcacactttttttcctgtcaatgtctgtttgtttaaaaactagaaacaagccgggcgtggtggcgcacgcctttgatcccagcacttgggaggcagaggcaggcggatttctgagttcgaggccagcctggtctacaaagtgagctccaggatagccagggctatacagagaaaccctcgaaaaaccaaccaaccaaccaaacaaacaaacaacccaaaaaaacaaaactagaaacagagacctaagcatgtatcagagataaggccatatgggaagggcttggggtaagtaaaggccagacaacatagagtaacaatggctgaacgcaaggatgagtagcctgggaatcacagctgaggtcataagtaaagccagagaaagcatgaggccagagaaagactgtagagacaatatacatctaatatcaactgtctaatagtctatgtatgtattgctatgcaccccacagtcggtcagcaaatgttttgttggttatgctctatagccccctgtgacaaggacagacaggttagttggtccagaaagacttcttcaaaaacatatccacgtcatcccaaccatgaacttgagtcttactttctcatggtccatctagcctagacttcctcccactctgttctcatggccagtcaagtattatttcagccacacatcttagaaatggagtgagtgagtgtgtgtgtgtgtgtgtgtgtgtgtgtgtgtgtgtgtttagttacttttctcatttctgtgataaaatgatacctgacaaaaaaacagcctgaggaagtgcgggtccccctcagctcatgggtctgggggtaccatgatagagaaggcataatgacaggtacttggggcagcaggttacattgcagccacagtcaggaagtacggagaggtaaatgctactccgctcatttaatccttttttaattggtctgagaccctgggccataggatgctgctgccccgccccccaacatttaagatcaaccttcccacttcaattaacctaatctagaaactctcacagtcctgctctgagatttctctccaagacgattctagatcctgtgatgttgacagtcgacattaaccattgagaggtgccattgctgggggagtcagctttgttgcatcaggctataagatgctatataaactcacctccccatcccagtctcagaaatgcttgcctggattctacctggaatcttgcttttcaatgctgtatgtagaatacaaagaatctggaacagggctgcttccacaaggccatactaagcttagagcagattcaagtccagtaactaccactcactaaatggaacaagtgtctataggtgtgactcatgtcctgtgctgtgaatcacggagacctgggcaaagtggaaacacagctcagcttcagatgaggagaactgtgtggagtgtccttggcagtgactttgacgctctagagacctttactaactgggagcaacaactggcatttaatccggcacatcctgtgtcgtcagcacgactcttgctttgactttatctcattaattctcactgcccctccgtgaccgtgaatgctagacctctcagaggttactatatttctgacctttaactatcgctgacttttacaagaagaaaagcgtttgtctcagacttcaaacacctccaagtcctccacagactcggggtggtctcgtttgaatttatcgtcacttctaaatgctgtgagggagcttaagatcctaattggatcttttctaactgtcttgcagtgctgggagagtggtaccatcaagcacattagcagtgttttgggagagtaagaattatcctgggtcagagacttgctaaggagatacaaatatattttatatattccagatgtttttggacttatgtaggaattttgcctattttagagggtgcattaatcatgcaaaaaggaccgcagtcatttgctctgttctctgaagaacggacgaagaggacggtgctctctggattccacgtctaagaaaagaaagaatgccggtaattgctcttcatcaaagagatgacttatcttttaataattctggaaattgagaagtacggtgaggccaaaccttttcaataacatcaatgtattagggctgaacaaagtagagaacttaggagtatctgttcttttaaaaatagatatcagaggtgatttttttttttaaagtttgagttctagaaataaaaggagctaatgatagaacttcagaaaaggacaaaactcagcactgatcttttaccttggtagggactaagcaagaagaaccagaggaccaaaggcccagaattttatctcctgaatctgctttgagaccgttattttttcatttttattgacatcgcactactgcaatcaagcgcaatcatcagcgttatggttagcgtttactgacagagctgtgcactaatgccttacactcgcccttgaccctcactaaggatccagagtcagcaccgctccataattgagatgtctgtccaaacaggccatcttaccccagagcaaagaccagcaggcaaggagagcccagatgccaagtccagaatctcacgctcttttttagttcttcgataattactcccaagagggagaatttattctaataaccccctgctggatccttgtcctttcctgaaatgtcaccctctgagtctcttcttatttcctacaatattttaagtcttctcgttctaaaactgggtgtggcagtagatgcttgtaatcctgagactccggcaatggaggcaggaacgtcacacttgaagccagcctcagctacatattaatgataaggatgggctgagcgaccgaagatactcttttttgccaaaataaaattttaaaatacactaaacaaacatacaaaccaaagccaacacatatgttcacgttccagaatacgttcttttcctgcaattagaatgcattttaatgtttgtactttattttttcggtaactttaatgggcataccagacagtaggtgccattgtggcattttcactcaaagtgcgagttagcaaattgcttccttctctcttcccagcatgccccttccccgttccttacatcttccttgtgaatttttatcttgtaccaccataccatcgttccttagcatctatttctaccctcttgctctcccttctggtttttcttagactttactgatacttgctttactgatatttgcgccatttacatataatgtgtaccttacaggttacaatctgcatatgaaacagcacatatggtttttatctttctgcatccgggtcatgccgctggatattaaccttcccagatccatccattttcctgagtgttttgtgatgtccatttctctttccagatgaatgagattaccctgtgcaaatgcgctatgttctattatgcatgcaccttctgatggacgtccgggttagttctgttttcttgcttgtgactacagcggcaattggcaggtgatggagaactccgaatacagacataaaaacaaacctacagatcccattgctcatatcctttatgtagccccaactctgctggctgtccccaacatcatcctgcctgaggaaaccccattcctcgcccttctgaagtatcttactccagcagaagaacagggtttctcctcccccgcacccatcccctcggcttttatgaaaatactgattaaaacaattttaatcattaaattaactcaagcaaggtagtttaattaactttaatttttggagaatgagataatggaaggaacctctggttggccaatcatattcaagccccggcaggagctatgaaaaaactagaacaagaggaaaaataaaataaacacaggccagctgtaggtgacaaagcttttagttgtctctgcctttgcccgaagctcaactgcttctgtagtctgacagcccaagttctgattatcagtcagtctttctcaaactcctcattgagttttttgttttttttttttgtttttgttctttttgttttttgtttttttgtttttttccaagagagggtttctctgtgtagccctggctgtcctggaacttgctatgtatcgcaggctggtcttgaactcagagatctgcctgcctctgcctcccaagtgctgggattaaaggtgtgtgccacacagcccagcctcattaagaatttttgatcagacagtgggactcagctcagaatagatgagaggaagggtgctccattcctacttaaattcatttttttttcaaggtggctgccatcaaacggaaggacagagacacaggccacacacaagggctgccggcaagaactgggcctgagctctctctcagttattctcaaatgaaaggattgaaaggatatagacttgtaagctagtgggtttaaaagaaatatatttattaaatgcatctgttcagtgagatacatgcatgtgctacggtgcctggggtgggggaggtgtagagtgggcaacttgtggaagtagattcttttgtttcaccacaggggtctaagagtcaaacacagatcttcaggccgtcagcaaatggcttaacctactgagccatttctcccggctgctgctatggttttaatgacattgtctctttaatgctgtgaccatccttttaaataacgatttatttgatgtgcactggtgttgtaccttgcatgcatgtctatgtgagggtgtcgggtcccctggaactggagttacagacagttgtgagccgccatgtgggtgctgggaatataaccctggtcctctggaggaacaaccaatgctcttaacctactgagccatctctctagccctctaccgagttttttaatgagattatattgttgatgctgtggtcgactttaaatgccgctatcgccaccacccaaaaatgcagcaaggtgctgggaatttaagttcaggtgttgataatcacgcatacatacacaccaagacagcatgaaaagttttattttctatataccttccagggaaatacagcaggctcccagggagatacagtgggctcccagggagatacagcaggctcctggtggatccatcaagggcttcgctggcttagcttttcttttttcaggtggttaggcttggctgagtgttgttacaagcagcccagggtgtatgtgatctcagcttcctactggggcccaaggaagagccactggctgtccaagagcttgtaaaactaatgtggagtccgagggtgaagtagggcttgaaggtgttcggtgacatcaagagttgggtttcggcggttattacagtgagctgaataaactatatgtctagcctagaaaagtctccttcgtccctaaggcggcagatggcctgggatgtccctcaatttttcagagttgcatggagtaggctgtcattgatttcctagagctcccaatagaggccacaggaacaacagactacagcatcccttcccagagaggagactggtggggtagccaagaaggccctgcttctgtccatgcctgctccatccagcatggattgttacttctctccatctcttttcatgtttcctttaccattaattcccttccttctttgctttagtgatagtggctcccctgccccctaggtcctttgtaaggtttgtgtctatctgcagaacaagttcaagcatccctgaaaactgtgcggtaaatacggataggcacaagtgatggtccaatatccttaagggcaacagctttaatccccaacatcctttcttttccaggctggtaggtacacatgcctttttgagacagcttcaactgtaagagaaatacatgtagacaaacctcaaacagcttgcctactcactctcaacttatcaactacctctggattgctgtggaagaaataaacttgcaccttatataaattgccctatctcggggtttgtgttacagcagtttggtccttcctgtttctgacttagggagaggggaggaagggagagggagagggagagagggagagggggagagggggagggaaagagagggagagggagaaagggagagggagagagggagagagagggagacggggagaaagggagagagagggagagagagggagagggggagagggggagagagggagaaagagagggagagggagaaagggagagggagagggagagggagagggagagggagagggagagagaacattaagaagtcaagcttatcttcaatgatcttagtataaataaggagcctcagattgaactgtttggaaacaagacatgaaaactacatgtgacttcatggatttcgtgtgtttatcctgttccccaaatcaccctgtatcatacaactgtatgcatgttctttgggcttaaatgaatgcatgtacttaatataaatcacgagtatcaaattgacaaatgaaaacttgggttgactacagtgtccacctccttttattccagcacagccatatgcactcatgagctcttagggtttatgtgttctttatcatcagttaatcagagataattggatgagcataagaacagacttcatcgtcctctgtgtgatgccaacacgacgattttttctctcattcctggtttcatggtacccggcacttcagaatagtttctgtgttgctaagacaacaaggatactgcaaaagaaaatgggaactgaagtcaaggccctgcaacagcagcctcaaaggatgtcataaatagtgtgcgccaggctctattcacagtgaagcctgcaacctctgaattaagagagagaagaagaaaagacttgtgttcttcagtgtttattcaggggacaagggtgctcttgacagcttccactctgaggctgagagaacagtgatgtgtggatatgagagaggcagtcatccctccacttccttttcaaaactccgtggaaacacccgaggggagcctgtccttaaatcccaacttcatgctaagggtagcacgtctgcctgcgggattagaagaaagctgaggccattgctaagttgtcccctccactgaaaatatgcatctcatctgaatgaggcttggttctaggtggtaaataggggccgggggaggggatcgaatatctgctgagactcatggttgatatttgaaactccgtctatgaacagatgcaaagatgatggatggcttggatgcacttggagtgtcaccacagagctctggctgtcctagaactccctgtgaagaccaggctggccttgaacacagagagatccctgtgtgctaccacgcccagctttgtcacacttttgaaggcacagaaagcccagcagcagtggagtgagccaagctgcatcctagctctgtctgagcaaactgaactgcaatagtcatcctgctgtgacacccagaacatgggggcaaggacaaaggcaagggaaatcaaccgcctgggctgactttgttaaaggaaaacaacatttaaccatgaactgaagagtgtccttcaggtcgtgtacgttctactgcacagagataaggatatgccaaagaggaggaggaggggaaggaggagggggaggaggaggaggaggagggggaggagggggaggaggaggggaggaggaggggaggaggaggggaggaggaggacgaggaccaggaggacaaggaggagcagcaggaggaagaggaggagcagcaggaggaaggaggaggaggaaagggaggagaggaaggagaagaagaagaggaagagaagaaggatgaggaggagagagaggagaggaagagaaggaggaagaggaagaggaggaggggatggggagaagtgaggctgggaatgtggctcagtggctcagtgcccttgtttaagttcctagaacttcaaatgaatgaataaacagcataaacagatacgtaagaactccgggtccccagagcgaggacaggccttctttggaatcaggtctttctctcacgaagtcatctggccagaaacaatggctacccaaaggcaggcagtgggggggtattttctggacggaagtggctgtagactgagctatcactatagaattccttcttcaagtaggagtcaagagactatgtactcatggaaaccaatggttatgtcttaaggtcaacggttctgtcgattctagtgctcacgatcaagtaagggtttagtctagcgaatcaaatgaaagccatccacccctccccctttgaataccctggtgatctaagcataaaaaggaaatagagagcacagagcactgtcttttaatatttgtgaggagcataaatcataatggtttgtatactacactatacaaatgatagactgttactttccaaagaaaaccgacttctttgagggtttcccaaacagttagtcactccatagagctaagagcttgaccctttagccgttgctacagcacatggaatacaggcagttaagtccccccagtcttccaactgtgcctgtttctgctgccgacgagggaggggcctctcgggggcctcttgcggccccttccatctcctgcgccaccaaatgtgggctctgcagggcaggcgagtgccgacgaggcaacctctggtctcggcttcccacaatcctcctcctccccgttaagagaacttgcgtttcttcatggcttccgccttgaccgccaggctcttggcacagatggtcaggaccacgatgagaacacccaccacaaacgccaccaccggccagaggaagcagtgcaggagagcaatctcgtcgtgtgtgcgctgtaggagaacgtcctctggtctgcaagagagtggaggacaggaaaggaagaccagtgagtctctcagcccagcacattctacacaacctgcagacgacaagtgctctccggcgtagggaataatcacccttgaaagtgatgactctgattgcagacaccgtcccagactgctccacacccatttccaaaagccgtgagctctcgaatcaagtaattggtgcaaatttgcatactgcttattagatcatttgcatgctgcaaaatgtcaaaagtatagcatccttttgctgtcgttttttgctccatcctaaatggcttcccccctttcttcctgatcctttaatcccactggccaatgggctgaggccaaatgacgggtgggcattccccaacaaacctaaattccacgtggcatttagatggatcccaagtgattttattttattttattttattttattttattcttggtttttcgagacagggtttctctgtgtagccctgactgtcctggaactcactctgtagaccaggctggcctcgaactcagaaatccacctgcctctgcctcccaagtgctgggattaaaggcgtgcaccaccactgcctggccaagtgattttattttaaagggggaaataatgtattgttcaagttaggatgacagatatatctcccacaggcatgtctaacctgcagcacttgcaggtcacatgcatcccaagataactatgactgccgaccagtacgatgaaataccacagcacgacatcatagcttcaaaaggtagttctcagatcaaccgagcctggctatatgaaccaaaggctttattaataagcaggcctcggatgagctgaatgtagggtctcatgtttctgcgtgaaactaatcgtcctccggagccgctgcccactctcttggttaatcctgcaaagtgtcagcggtaggtttctatcttgcccgagtggacgctgcttcgattgctactgtttgtctccgatagacaagaaagatgaggcacgttccacgagccatgctcgcccatctctggcgatgagacagatggctgggagttcagctctcctgccagaggcttatatttgatgaaagattggcatttcatccccaggaaggtttgctgtttcctacaatggtagctatgcttcctacgtatgtagacatagagtaatttatcccattatccccaagaacatcaaaggcttctgaggtgcccggcggtggtggcgcacgcctttaatcccagcacttgggaggcagaggcaggcagatttctgagttcgagaccagcctggtctacaaagtgagttccaggacagccagggctataaagagaaaccctgtcttgaaaaatcataaataaataaataaatatttagaaaaaaattttttttggctaagggtagtgtcttttgagaggaaacacactcctgggggttccctttcatcatagctcttatttccctgaggctacaaaggacactgggtgcttctctcttcctaaggttaggttatcattgcgcaccagcagaaacacttgttcaggctgggtctgaaatgaccgagcccttgtgcttctcttctttggtgcaggatgccaatttttgcacatgaagcgagattctagttggcatttcaatgaaaagttatattaaatgaacgcagaagggctggagagatggctcagtggttaagagcaccactggctgttcttcctggggtcctgagttcaactcccagcaagcacatgatggctcacaaccatctatagtgggatctgatgccctcttctggcatgcaagcatatatgcagatagagcactcatattcactaaataaataaataaaattaactcagaatctttgtagaaatgaggcccaaatcacgcttagcttgcagaaatcactccaattactcttatagcaacccgttatcttcaagacctgggctgtcactcatttaacttcagatcctttttctctcctgtaagatgccacagagatgtggctttgtcggtggtctgtcattctgcacccatttgttgttaagtaacttcttgctgctgctgaagagcctgcctgtgttccttactctccgtgtaaggtttaaagaaactttatgccccagtctggagtagtagaagccaaggccccagaataacccaggcacaagacagtcagagtcacatctagagtccttacaatctgctcggccagcagtgcctctgctctcttcccagccacagctgcccaccgctgccaggtgaccccaagcaagcaagagaaggtccaagctgtctctcaggatgctctctctggagaacactattctacacctttgaaactcttgatacaaagaggagttctattttcttcatcataaaggtcagctgcactgcaacatgaatacacttgataccaaggagccatgcactagaaattgatggtgtgaaaaacaaaaggaaagggaccaggggtttttattactatagtaactgcatgagtaatttgcataagtaattaaaaggcttcttttgtattctttctccagtcattactgaggatggcactgaatgccattatcacaataaggaacaacccagccagtgaaagagctcctaagagggagtctggaaccaccacaccccggagcactggctggagaaaacccgggaggaaacgggcaggagagaaggaagcgaccggaaactgttggatccaaaagcgtgttttcctcagaaactttctagaattccatctcctggatcttgggcaacacttatgtttcagagctttaagtgacaaaataaaatgactcattggagctgaatttgaaccacttcaacaaatccttctttagaggtagaaaaaaatattatcatacacatttccttaaaaaccatgcatgtctctttctacttgagacagctcaagtatgtttcacaatctccttggataagaaaatctaatatctcaggtcactagtcgcttggttatatatgatctactgagatggccttgaaatggcttcttctggcctacaattcactcattccagttgggctcacagcatcttaattgaaggcacaccctcctgcctcagatatctctttcctccaggttgactggcccaaagctctttggctcagaattcattttccttcccatagttatatggcagaactgaggaggaactctgtagaggacctttctttcagaacagggctgctctggcaaggaatcacttccaagacctctaggtctgtgcaatctggctgggatgaatacagacatggcttttatcccaggagatggaggcaaacagatttctgagtttaaggccagttgggtatagcgcaagtttcaggtaaagaaaagcttaggtctaggtgtggtggtacacgtctttaatcccaaacaaggaaggtaaagtcagtttgtagaagggagcatccatgttcgaaagtgatgtctcattgagtggcagacaaagtgatgaatcagagaaagatttgacagaacgggtaatgcccatctctcacgaaaagagagagaggagggaagctacttaagggagagaccggcagtacaggaggaagagagtacagtgcaggctacagcagagttcgtggggagcagtgcagtagagttgagagggagagtggagcagcacagagaggaaggaggcagttttacagagacagattgaagagtgaacaagctagacacaggtaaagacaaatgaaccagagaatgggaaagagccagaagattaggaaaaattgctggagttagtgtgaggccaaaccgagcagttcagaggcagagagagagagagagagagagagagagagagagagagagagagagaaggcagattggctaagtcagctgggagaggagtttgagccaggacagctgagctggaccagccagccagagttcagagagaactagaaagggtgggcttattcagcagcaagtctcagaaactgaaaacattctaggcctggattagactacatggaggcaagaagcttccaggactaggcttaggtcagtaggatggagggagtaagccatggagacaacaattacaccaggagaataaattacttttataggactcttaaaatgagagaccaaaaaaaaaaaaaaaaaaaaaagagcatgattcctctgtacctgaggactttaaaaaagcaagcaagaaggtccttttggaggatgtgggaattgtaatggaaaatatcaccgtaagtatcataaaagaagagtaaccttggaaaacaccagtgcagctcagaaaggatgttgtggtaatgatgacatcacctttgttggctcactgttttcttacacactgtgatagactttgacccattttagcaagacaataagacttccttctgctggcctagttcctctcgcctcaccttgtctgtctcatacatttaaagttgatcttaatgaattctcccactcattatccttaccttgggtactgggtgttgcacctagggccttacaaggttctgtgcacactctacgcttacaaggtacgcattgccaaaccccagtcctcccaagccatggaagttgtacatttacatattggtttatttattacaaactaccaaaccttactcatggcttattgtatcattagagatacttttgcttacacttttgggaaagtttcatcactactttggtcaaaacaattccacaagcatggctgtggccaggccaaaggacaccaagaatgttgacttaaatcagatgagcgtttctgagcaggctccaactaggcttgcttaaataataatatttattatttacaacatggcctagtttcgcaaagagcctgaaatggataatacaaacaggacatttgaataaactaaaatccctagcctgacagaaaaaaataaaggcagtataattaggatgaagaagtaagatcagcctcagccttagtttaaataaaactttcctgagcccccggatacccatggctggtggggaaggaaaggctggctacccaactgctattacataagcaaagaaaacaagagactttggtgttttgttagggctaacctagaagggaaaaaaaaatgtgtgcacgtttacctaaatgtaaggcatgaactacattctgagagaccaggatagcggttgctcaaagctaaggatgaaaatcacttgagggtttcttaccatactgagcccaaggttagggacctgcaggactgaatcgcattgcagcaatactcagggtttatcccgcctgaggacaaccgagttaaaacaatgctttcacaattccagatcaaggagatgaaaacccaccatgaaagccacccttgtgtgctttgacagcttaacttaatctgtgtgtggggtgggttttatgaaatagtcttacaaaatggtttatataaatcttaaacatgtagacaagaatgtaaataaaatatcaccagtgggactggagaactggtacttctgccttgcaaacacagggacccaagttagatcccttagagcccatgaaagaaatgctggctgtggcggcctgcacttgtaatcccagcactcaggaggccaaaacaggcagacccctggggctcacgggtcagccaacctagtctattgatgagctccaggccagtgagagatctgtgtcaaggcaaaaaggaaaagacaggtagtgtgatggtttgtacatgcttggcccagggaatgtcactattaggtgtggccttgttggagtgggtgtggccttgctgcagtaggtgtgtcactgtgggcttaagaccctcatgctagctgtctggaagccagtattctgctagcagccttcatatgaagatgtagaactctcagctctgcctgcaccacgcctgcctagacgctgccctgctcctgccttgatgatgatggactgaacctctggacctgtaaaccagccccagttaaatgttgtccttgtaagagttgccttggtcatggtgtctgttcacagcagtaaaaccctaactaagacaagtggtttctgaagaatgatacctgaggttgccctttgacctccacacataacacacatgcacacgccaagctttactgtggttagatggtagctctctacaactacatacaaagtgcttggggtcattcgtttatggaggagaaagacttgtgtggagagttttgggggccacttctaggaacttggtgggaatttgacattgggccaggacaaagaagtaggcttcaggcaagaatctgactttgggctaggatagtgaagtaggcgtggatatactgttcattcagatgagcccctagaaacagtgattaagggactttgtttgttccttgtctatttgtgtttattgccttgtttgctcattaatccagagctgacctgattatttgcatgcaattaaaatggtgtaagagcagattgggaaaaaataaataaataaacccgcttcagccttagaacaggctggggtcatactacagcgttgtcagattgtctttttctgtttaatccttgctcccaccctggggaacccggttgacagattgagttggcttaggtctgtgttaagggactgcaacatgctggccacacggggtaaagtgagtgctctcagaagggaaaggcagacaagatcctgtaacctgcttctaaaccacagcctcagcggcctcaagccctttggagaggctccagccctcagaagcaagcatgcctgccaagcatgcctgccagtgctggaaccatacgggtctttctgaacccaaacaatggcggagtgttattgaatattctggcttttaacaatatcatattctgtggcccttctggaaggtgactgaattaaaacctactctgggattttcatctgaaaatcccagatttaatttgattactgatttaaaaaaaataatctttgaagtttgttttgtttttgttttttgagacagggtttctctgtgtagccctggctgtcctggaactcactttgtagaccaggctggcctcgaactcagaaaatccacctgcctctgcctcccaagtgctgggattaaaggtgtgcaccaccactgtcaggctgaagttttttttttccttctactaaaagatactgaagaccagccaataggaatgctggaaaccagagatacatgattgtagagtgtatattatatatattaagatgtataagaccatggaggcgatctctaacaaatatataagttgattttgagtttagtataaacaagccatccctgttgagaggagttagctatgtctagttgctagggaagcaatcatgccgccttgtcggaagagcacacttgtcttccacgtgactgcaggagagcacttgtgtgtatctcctggggagcacttgggagacagagactacccacacaggtcctttacagggagcactcttcacctggagcttctctgctgtgaggacacactcggaaccccggaggtggttagcttaagccgaagaagacatttacgattaaacagacaggaccaactccttccagaaatttccctcatctgcataaccacacaacttctgggacccgaggctgccataaatttcttctccgggggttccagtcttcacagaagtcctcttaagggtgcagaggtgaacgtcaccacaaacttccccctctgaaaagccagtctgttcatcgctggagtctttttgctttaacctcactaagtctaaccacttctttgatttgaggtcctttgcgtaaaacataattaataacacgccaagtcagtttgcattttctcctgctgatgcattatttgttgatttcattcacatgaagttgacaaacatttcaagtctgacagaggaaagggttttttcctcccctcccccgttaccagcgcattctgactcatcggagctcagcaatgatgctatggtatgggctttaaaaagcctgggtgatagctcccctgggttcctgtctgtagataaaatgctcaccacacatctgtaattttgagtcacaccctccagtcttcctccactgtccttcccaggtcgactgagagcggcaacagggctacttactaattgtggaagaagctaaaaatctgcatctgactgcggcaggagagctagctagcaagggggcaggtacgttgtcttggagcagcacagcactgagttagttataaagtattagtatataatctgcaggcacaggacggtatttaagagcagtcaaacctactcccttctattgagatgcctcgcctaaagggtctacagctttccgaggcagtgacgttagctggaaacggagtgtccaaacccaagagcttggggtggggagggtgaggggcatttcctaatcaaaccacaaatggtggggtgatggaatctaccttactcctgagagctaaatgagatgtggaagtatctcacttctgttgcttctgatgctgagcatatataaggagaggctgctgtgagaatgattgccaccaccggggaaaaaacagacaaacaaaacaaacaaacaaacaaaaaacaccactaccaccaccaacaacaaccacaacaaaaacaacaaaacccacaaaaaaccatgccagaatggtggctgtgctgagtcttccccggtacttctttttttccacctgaatgctataaggacgtagtcacagacagctcctatgagcagcttccttttggtagagatgcctttgttgctcttccttctcccgtgtcccatccagcacggtgggtttatggggaggaggtctgaccaacacagcaggtttaacacgcaaatcatgtgttctaattcaaccacaggcatgtccagcagaggcaaggaaaaaaaaaagcccctgatgacgttagaaccttctaattaggaacatcaatagaagctatgcactaagcttaccctataagcaatcactccagagaactagattatgcctgggaccgtcacagatgtgggccatatcagagagtgtctcaacagactttctgagaacggagccgcagcagctctgcactcacacagtgactttagtgtctttagagtcacatcagacacctgttatgtgtaacctctgtgaaggctcctgtcttctctcggtggggtggggggtggggtggaacaagcatcaagatcgagttttgcaagcagaaagatgggtatgaacttctgccttaaggaaggaaggaagtgaaggagggagagaggaagggagaggggaagggaagaaaaaaggaaggaaggaaattagcacctgccttcatctttctgcttcctaactgtagacgtgatgtggccagctgcctcggagcctatcacatggtcacagccactctcaccctgcctccaggcttctccacagtgatagcacgaacgaaccctcaaactgtgagctgaaataaatccttcccccttcaagttgcttttctcacggcaacaagaaagtaacagtgtgtcttctagtctctccccgcgacatccgcgacacccgccacacccggagcctaggaacttagagctcaaatctgcttgcttccagcagggtctgctcctgtagagagactgcaaacacataagaaagagtcaggtttgaaagatctaacagccgcattttgtgtcatttccctaagctgaatcatgttctcagccctcgttccaggcaaagaggacacggaatcatcgcagatcgcacactcgcgacgtgggtgtgagaaaccgtttccagggagaagatgacaaacacgctgacaaacccaaaaataagcacacgagcagggattccattgggcgcttggagggctggcaagagcttcggcatttgggttctcaaggaaatgagcagggtaagggacccccctcgggtttcactgtatctgtctccttcctgtctgaacacagccaggcgtactgcgtgcagtccaaagatggcgttttaaagaaggtcaaaaaccactttcttcccccatgatacctgaggagtgggggtcaacatggcaagggcttcttatgtagtaagaacggaagggtggggccggggagggggcagaacaatgctggctcagccacacccgtgggttcctagtaaagtggtatattcaggcgcctgctcagatccacttggctggtctccctggggttcccggaccttgaagagagccttacatcctgttaagctcaaaatgggagctcaacaaatgttagtggggcggcaacagacttcaaagcgtgattgaagccactgagttgcagctgagcaaatctggaggacgggggaagcaggttcgcagacttgcaggggattcgttcaaaggccacctagatttgttggaaactgtaaatgccatggatggatttgcctaaacagtcctgtgtgtttacttgtgttttcacgggctgtgccaactattttcagataatttccaaaacaagtgatcatttttgctttgctgtttgcctttctggtttttgttgttgttgttgttcttttaggaatgattatgcatatgtccatgtgtgtgaagaggtatacacacacacacgtgagtgtgtgtgcacgtatgcacacgtgtaggccggaagtcaatctcaggggccatctcttgtgtgctatccacatttctcaagacagagcatactcgctggttttatgtcaatttgacacacgctaaagccatctgagagaacttaattaagaaaatgcctcaattagattgggttgtaggcaagcctatagggcattttcttaattagtgattcatggggcaggacacaatccattgtgggtggtaccacccctgggctggtagtcctgggttctataagaaagcaagctgagcaagccatgaggagcaagccagagagcagcacccctccaagccctcagcctcagctcctgcctccacattccagtcagccttgctccagttcctgtcctgacttcctcctgtgaggaacagtgctgcggaagtgtaagccgaataaaccctttcctccccaagctgattttggtcatggtgtttcatcacggcaataggaatcctacataagacacggggtccctcattgacacggaacttgccaagcagtgagggtggctggctagagatgcccagggacctgcctgtcttctctgcctccccagtgctcagactgaaatcatctgtctcacaacaacagggcgggggtagggtttggggggagtggtcctctgacagtcatcttactgggaattaaattcaggtgctgaccgagcccagccccctctctgcctgtttgtaaaatccctatctagcccaacctctcccagtgtgacagtttctgtctccccagctcatcctgctgaagcgcttgctctccctcatcggatggacccccaaacctctcctccagggtaacccccactctggcctcacatgctatggaaggctgccagcctggagctggatgcccgtgaagggagctcgggcaggcacaggaccacccagactcagcccacagcaattccctccacaatgtactcaatgcttcatcgccattaatgtctaagttaaatccagtatcctagaattagatcctcaaccaagaaaacccacttgcccacttgtttcctcacttttacacacctcgcccttccctttggtgcagtgtgattactcagagagctatggaaattaaggtaagtaggtgtcttttgttgcaaaagacccagtgagaatctttgatcctggaagcttgaagggctgctcctacaataatgttatcactttacaaggttcccaactgttaggaaccttgttttgttacaatgtataggatacacagaagctatttttaaattaagtcatttcctactgcatgtaggaaaagagaaacaggctagctttctatccaggctaccaatgtgtctggacccctaaattatgtactgttgtagtttgtcaaaagaccctcactcacaaagaccacagagacaactatcattgcaaaacacatgaagattttacttatccaacatgtcggggaacctcctctcagtacgcaggccagaggagagacccagaacaaagaacacactttttgtaactttgtaagggccagatataggcaccagggtagtctggcttattttaattggtgtatccaataaccttttgagacattggttggtttgtatagggtgactttcattttgtctgtctttgaagtttttagtgtgaggcagggcaggggaattgttaatcttgtttttgatcattaaaactatgtttttatatttgtttagtcagccagctttttatttggctctgtacttggactgctagtacagtttggaaagtctttttgaagggggaaggtatggggtagtcttgaatttattttggatattacagtactacagggcacacataccacagggcacactcactacagggcacactcactacagggcacacacactacagggcacaaacactacagggcacactcactacagggcagagacactacaaggcacacacactacagggcacactcactacagggcacacacactacagggcagattacactacagggtacacccaccacagggcacacatcactacagggcacactcactacagggcagatacactacaaggcacacacactacaggacatactcactacagggtacactcattacagggcagatacactacaaggcacacactaaaggacacacacactacagggcacactcattacagggcacattcactacagggcagacacataatggggcacaatcactacagagcacagacactacagggcacacaaatagtagtagctttttaccctcaatattgtcctctgttgtgaaattgtgtcttttagttaaaaatgcatcaagcagatagtaagatacttctgaatcatagaataaactggattcgttttgaggccctgttcctgtatgtcactcttcaatatgtcaatgcaatgaaagtattgttgagaagcatgcaccggtattaaagtgatgagttatgaccaagtcatagcacccatgtgggctagctgctgcctgactatatccctgtagcatatgatgcccaatatttaataaaaataatgtgtaaataattaacagctgaactggcgaggtggctcagcgggtaagagcactgactgctcttccgaaggtcctgagttcaaatcccagcaaccatatggtggctcacaaccacctgtaatgagatctgacgccctcttctggtgtgtctgaagtcagctacagtgcacttatgtataagatctttgggtcagagcgagcagggactgagcaagcagaattgacccgagcgagcggggccaactggagcggatcgagccgaggttctaaatacaattctcaacaaccacatgaaagctcacaaccatctgtacagctactgtgtactcacatacatacaaataaataaataaatctttaaaaaataattaacattaacagcagactggtcattggaacatggtagaaagaaagaaagaaagaaagaaagaaagaaagaaagaaagaaagaaagaaagaaagaaagaaagagagagagaaagagagagagagaaagaaagagagagagaaggaaggaaggaaggaaggaaaggaaaggaaaggaaaggaaaggaaaggaaaggaaaggaaaggaaagaaaagaaaaagaaaaagaaaaagaaaaagaaaaagaagaaaaagaaaaagaaaaagaaaaagaaaaagaaaaagaaaaagaaaaagaaaaagaaaaagaaaaagaaaaagaaaaagaaaaagaaaagaaaagaaaagtaaaaaagaaatccacagaaggctgctatgcagtgagcggtacatattcctagagagatccatttttacttctgtggccattgaccagtattaatattacagatagggcctcctttgcccacagcaatgacaataacatggagtcttaaagctgtacctaacccatagaccagcaaccttgttatagatctctaaatttaaagcacagagtctctagacatacacttgggcatttaacaaggctttctcaggacttggttctcttccattcagccacttggcatttgcttaacacctacggctgacaggcatcagggacacccctgcttgttggcttgcccattggcagtcaacgtgagggcaggaacactctgtctatacacccaccgccgggcactatactggcacgttgatttgaggcgttctgtggatgcttgttgttgtttctggctagaacctgttttaagacgtgatggatatttgcacacagtgcacagataataaaagaggaggagggtttaactgtgcttgggtgggggaggatatattctccgagcagatgcaaaaggacaaaaggacaggggtacaggctttggggaacggatgcacaaagaatttaccgagaaagggcaggcacacggggaaggctcaattgtgccaggctggcatttccgattagcttgccatcagtagggaccatgaaaaggaaggcgtttacagtaatgcttcatcagtgagacttcacagagactcttgtgctttcagatcccaacccaggctcgaatcctggtcaccgctagggacttcctcagggatgttagcaggaaagactctggagtcacagggcagaggtttgaagctgatctcaatcgtgagaagagctgaacagcgaggtctccaggctgataaagaagtatgaatggagtctggcgagaggcaccacaataaagttaggtagaaggaatggcatgaggtaatctacagctcaaagggataggagtgacttacaatgacctacagtatgttttatggagaacttgatggcggaagctcataggcctttaagtgtagaaggaggagggattagcattgctcgatttgattggaggaggaagaggaggaggaagaagagaaggcagaggaggagaaggaggaggaggggcagaggaggaccaggaggaggagggagaggaggaagagataaaagagggagaggaggagggcagaagaatcaggaaaaggaggaccaggaggaggagggagaggaggaagagataaaagagggagaggaggagggcagaggaagcaggaaaaggaggaccaggaggaggagggagaggaggatgagaaggaggggcagaaggaggggcagaaggagctggaaaaggaggaccaggaggaggagggagaggaggacgaggaggaagggcagaaggacctggaaaaggaagaccaggaggaggaacagcagcaggaagagcagggggaggagccaagagaggtggccgagctgttgtagccccacagggagaggttacagctccaggtttctgctccctgagcctccggagaaccttatagttgatctgtctgccatgatactcagacaacagtctgcccccagagtgagagagactgcagcactaaccaggtcttctgactgtggtaaagtcactgccatcaaccaacaccatacaccagaaacttcaccactgcagagaaactcagccgtcagtccctccccaccgccctctccccggggtgacctatgacctcatttatttgcttagtggagatatgaaaactctcaaagaactattagagacaaaaaagaagtccttgacaaccaaagatgtttgcaaatgggatagccgtgctgaggagaaagaatacagagaaaggatgtggtaggcatttagttattggggctttgttttgatttcaatatgaaatgcccctcccatccccatgggctcatgtgtttgaacaactggtacccaactggcgatgcctacctgcctagctgccttcctccctttctcctcccccaccctccatctctctctgtagccatggatggcttgaaactcattatgcagaccaggatggcctccaactcagagatttgcctgcctttggctctgcctcccaagttctgggattaaaggcaggaaccaccatgcctagcctttcgtttgtttcctggtgctatttggaagactatagaaattttaggagtggggagcaccgccagaagaagggggcagtaaggatggaccatgaggtcttagagcaatggttctcaacctgggggccacggccctttcagcaaacttccatctccaaaaaatattatgattcatcacagtagcaaaaattacagttatgaagtagcgatgaaaataattttgtggctgggggggggaggggagtcgccacaacatgtggaaatgtgttaaaggatcgcagcagtagtaaggctgagaaccactgtcttactgcctggttctacttcctgtctgctctcaccttggcttcctgacttcccacacaatctgctggtcctctctagcatctgcctcactcctgtcgatgtgccttcccccagcacgatgagaggaccctctccccttaaactaggaaccagaataaacccttccaacccataagatgcttgcttctcaacaggcaattggtttcagcacacacacacacacacacacacacacactcacaggcactaaatttgtacttaataaaggattggagtgaatgattgaaaagatctcccagatgtgagaggctgtgagtctctgagtccacataaacccaccgtaagccacaaacattcgtctggccccattgtacctaataggaaactgaggtgcgggctcttgggtaagtagtccaaggtcacccactgaggttagagcagagctatgcttagaactgaagtctcctgacgcgcagccctgccctgcattcctgcagctgatggcactgcactctgtgacctacttgtcctgtggttcttggtatttttcctcccaaactcccctcagggctctctttgaaggctgcataaagcatcttaaatgaaaagtgatttgataacatcacatttgtgacttcctttttattgccacgatgataaaggccatcggaagatgaactggactcgccagcagagaggcatttctgattaatcatcagaaaataggctctcaatttcacgttttttaaataatgcatggtgtttagatgtcagacttagaaggaatgttggcacggattccgcccatagcccacagcttgctggagacagcaaacactacttttttaaaaatacagatttggagattaaacacagccttcaattctgatgtaatctctcaatatggaacgagacacaaatgtgcatgcgaaagactccagatgcactgctttgttcatgatatgtcactgaactcggtgtagaaagagaaagctaacgcgatcatttgagaagaaaaagaactatggcgtcaagcccttctccaatcaaagattagggggaaaaaaaagtctctcacagaaaatagaaaacaacattagtaacataaaacagtcattatctaatttaacggtttattcgaaactcagatctgagccagagcggtggcccaggaagtaatggtgtcagctacgcgagcctcatgacccgagttcaagccccagaacctacagaagaaagccggatatagcgcacatctgtaatcccgggactcctcggttgacacagggggtggagctaactaacaggccagctagcctggggtacacagtgctgaagtagaaataagacaggtctgcttcagtaaggaggaaggggaacactgatccctgagcattgtcttctgacctccacacgcaggccatggcataaacttaccctctcaccccaccctgtcaagcccaggttccatttttgtatgcaaattaatcccgagaggattttttttctcagtaatttgtcctagagagagagagaaaaaaaaaaaaaaactgaagaaaaacaaggaaaaatctcatagcaatgatatgcttaaattcaatctgtaaatgtattaaaataaaggtgttattagagcaaatctgtttcaggaatgcaaagacatagtgaaaaccgtttacaactgaccgagcatttctcactatggtggttataagcgtattcagaaggatacatctaagtacagcatcaccctcacgaaactcactcaccataaggtgactgcacggcatgctcctctattgaacgggggctccagaccactcatcacttggttttttcctaacattgtctctcttgcacagttaggattttataaggcatcctaagttattctgaatgcatggggctcagaacgagcgtcgtaaaatcacccagcttgggagtgttaaggatgtgtgtggaggtcggccggtcctcggtctatcaaactttataggcgagaaaaccaagcctcgtgtgagcgagtggcatttttctgatcaattgcttttaattctctgttttagtggcttttcaagtgtgttttgcagagctctccactcatttgaactcaggctgttatgttcatctgtctttaaaatgctaagggtaaaaatatacaccccagaattagaatatatccattcagtggcgtaagtatagcatatttacttttttctgagcaatagactctctttctctttctcctctctccctccctttcttccccacctcgtgcatgtgtgtatgtgtgtgtgcgcacactatatatatatatatatatatatatatatatatatatatatatatgtatgtatgtatgtatatagctttacccattaataaaactccaattatttaaccaggcaatgtccaagcctccaaccagaggacatctccaccactcgttactgttccttacttgctacaaatggataagacagagacaaacatatatcacgacttaggacgcagatgcagtctttatccaaacccaaataaaagcaagacaatgtcactcttgctttgcaggctaggaaaaccaagatggggaagctgagacattcacccaagatatacagtgaatcaaaggtagagaagtgtacgcccacatatccagtgtcacgtggtggctgaggttaagcaactcttaagatgcacgaggtggaacgagctcacccatctaactctggggagtatgaggaaagcaaccttggtggtgtgggacgcagaaaggaagcagggagagacagcagccaaggtgtaaggcgatatgaggacaaccaaggcacaaataaatcaatactcccagaatgacagtatgaggaaacgcctgggtccagcttcctcctagaactactgtgctgtgccaatgtctagtagtgacaatgacgaaggtgtccccagatgaggggacaaggtgagaggtacaaaagcatcatggaaaacagagccattggcatggaggagagagcaggcaatgggaaaactcaaacagtccccacttctcttgggtcaataaaacacacacttgctctctcacactcggctctccaacctcactggccttacatttatcacacatacgaagcttcccagcctcagaaaccatgtaccccacagcacccctctctgacatggtccttcctcttacttgcttatacctagctaaccactgagccacacctctgtctctaccaatgtggctcactcaggtctgcagttctccaccatgtcaataagatctcaaagcaggacctgcgagtcttccttcactgtatcacctgacttttaaattatacaatcctgtcgttccacggaaggctgagacattgtctgctttgttttgtggttgtttcatctctgtctgtctattggctcatgactggcatgtaactcagtaacagaacttgaagctggctaggaagtaggaaaagaaattaatcaagaggatgatgatgaaaagtgaaacatataaaaaacaaaaaaaacaaaaaacaaaaaaaaaaaaaaactctaggctttcaggcccaggcttgagaatgtgacctttgtgactcagtgctccaaggcatgctaatcataaaacagatagtgacattcctccacccacccgcttcctgggttccaggagtgttcattcaaagaaagtcaccctgacccaccctgaatgttgctggaacccgctatgcaaatgtgctattgttagaggctcatagaaaactgtcttgactttccacttctcttaactggtatttttggtattttccaacaacgccctccccatccccttgagttgtggtttcttcctttaaataccccttacccagctactcagggtgccacagtcctctacccctgtgtggtgtatgactgtgggccccagagcgctcttggaataaaaagtcctcttgcagtttgcatcaaggccgtttctcatgagtgatttggggtgtcgcctctcctgagtcagaatatggtctttcaacggtaggagtcttaaaagtgagacccaacccagtcaagagaagacagccaagacaaggaacaaggctcatcagaccaacgagggtcacctcggccatgtaggcatctgaaccaaagcagcagcagccctgcaggtagcattcaagagatgacacaaatgctctggccaaactggttcctttgacgagggtttgcgagcacaggtctaagacgtgagctgtgaccttccatcctttctggtgtacctatggaatgagtaaaccctgcaagaaaactcactcctctccaggtgctcgctcaccagggaaggcaaagatgaaggcgtcttcagtgtgcttgccgtagaatccccagtctatcattacagcgtgcttgttaagggtggcttttactgaaaaagcctggaaccatgcccctccctgccctcaagggcaaagggagcagggaggaaaactctgttgagtctgtacacaaagaagacacaccaggaccaactgcagggaggcaggtcaactttatttgggctgattcaaggcttatagaattttggggaggaggggagggaaggaacatccaagatgggccaaggtcattggctgagggtttattggaaatgcctcgttagcacagggaagcatttcaggaatcgagagtgctagctggacaggtcctactccggagaaacttgtaatctaaccacgtgactttctgcaggtagaggcgtggggagggagttgaattccccagacaaggtcagagaagggggagccctgcccagtgaaagggagtcctccacgattcgccaagctctgaacactaccgggtcaacagtaggcttcgaccttccttaattagcagggcaatggagaataacaaggaaagtgtggaattcagataataagtcatcccacctgaacaaaaactatagataaacatctacacacaaaaactctgcatacaaaatctacacattagaaagatggcgggcaccatggattagggaggcagactaatgtcaggtactaagagatcacgatggatatagccctgggatgaggttgccctagagaacgtgaaaaacttccatttctggtggctgtctggccctgcagattcccctccagaacacaggctgaaatcgtaagactccaataatctctaccttacattttaaaaataacacacgtttcttgaaaaatggaagttcctggtagctatgcctcttaatttcctgcaattatgtgaaatctaaaggtcgctttaaatataaagttcaccttatcaggagcatctgggagtggatgccgtgagtctattttaacttctcctgtagccgtagtaagaaactgcacccagagtggatggcaccagggagctgctatctcacgagcccagcgacacccctgtttcatctcgcttatgccaggaggggagaaactgaaactcctgcttccccagagtcacttgagaatagtgataagccagcctcacttctagctatactcgacagtctgcagacaggttggtgacaggagggatagaggatgtgtgcccattccgatggggaggtggcaggtttgaactcccgtgctcagattaccacaaggggtatcccgattgtagaggtgacagaagcccctctccttgttcaccggaagccccttcctagcctactgaggtggctctgggagggaggggtattgcttacagaggacccaacttgtggtcacagttagaaggttctgcattaccctctgaccttcaggaagggacaggagcccacaggttgatccagtcaccattttatgcctacaaaatgggagagccctgaccaaggttcggagaaccggcaagcacaaccctgagcctcaaagctggcgctcaggacagagtgtctaattgctccgtctgcattccacacggcagtttctgagccgtgtcttctgtaataacgtggcgttatgagtgagtgttctctgagtcccgtgagccttccaacacaaaactgagcccatggggggtgggggggcaggaggacatccttccctctccccctccccccccccccgactctgcacagtggtcaaatgtacaggtgttgtacttggtacaacactttggcatcagaattgaggaagcgtgggaaggttgagtgagcgcttgaacttggggatttgatgctaagtccaggtatgcagttgccaaattggatagagctgcagggcattgtggtaccgggaaggaactaagacactgcttaggctgaggaccctgcatatctggcatgggggtatagtgagtgtggtgactacaatacggaataatgagcgcactgttttcttttgagtgcgtggtatggggtctgttcctatcaagacggttgtcactactggggaaggacagtccttctggactggtggtggtgatggtggggattcaggatccatacctgcatgagaggcagaacagagcagagtgggaaaggaatcaggagcttcatcagctgggcagggcagcaggcggggcagcaggcggggcagcaggcaggactgggaggtccgtctccacctgcattctgaaatcagtgcctggctaggagtagtagctttcggagtctcccagttgttcagatggctcagtacaatctcgctgaccccctgggaactgttccctgtctcggctcccacctcacaagaaaagggtcccctacttattaaactctgtctcatttttcctcgggcagtgttccagttctaccgtgtgcacgccacacgtccaatttcctttcactccccggtcggtttgactctgtagcaggctcctttctctacttgcgtttttgctgctctttcccagtgctcggttcgtccacaaacttttagtgtatagtggtaagggttttaacacgagctctaactgcttaacgagtaatttattggcttgaattattttcatacgatatatttagatcatattctttcccctcccccaactcttaaatcctgcccacttacctacccacctaagcttatgttccctcttcaaaaaaaaaaaaaaccgacaaaacaaacaccaccactcccccgacctcaaacccccccacacacacacagagagagagagagagagagagagagagagagagggagagagagagacggagacagagacagagacagagatgcagtctgaagtctgtttcgtgttggctaacttctcctgaacatgggatctgcctagcatagcttatatatccggtgtcactcccttggagaaagcagatcccccccccccccgtgggtatcaaaggcaaatagcatcttggttaggggtggaactttgcgcctactttcctgtctctgtgccgggattttgaggggtctgacttgtgcaggtatgagctgccacaagtctttatgttcatgtgccctgctgtagcccgacaaacctttaagcctaagctaccctgcactttgactgtaggtacaatgccggctgtacccagctctgtagctgttactcctcaccagaggaaaccgtcacacctgtaggttaataactccccgcttttccctccccagccactagaaacgactgtcatttcactctgtcatctacgaactggactacgacaaacacctaacacaacagtgtttgctttcctgtgactgacttgtttcgaggaacatgattccctcaaagttccccccgtgtcaccacacggcagaatttccttcttttacactttaggtcatttgtgtattgtttgcacacacacacacatgtatgtatgtatgtatgtatgtatgtgggcggggggggggtgctcaccgcggtgtgcatgtggagctcaaaggacactttgcaggagtcagctctcgccctctgccatgagatttcccgataccgaactcaagcctgagttcttctgaatgcagagagcgttacagtcgtgtgcactggctattcgcccccacagtcgcaacttggacgaacataaaatgattcccatccccgtcctctgaggtgagacctgctgtggccaaagccagagcttccgaggacagctgctagcagcctcctcctcttccaggattcctttcaggatcgctctccctgttcccttctgaatcccctctcgccctccagccattcttcctctgtctccttgtctatgactgaagtgtggtccatcagcatttctcttctcaacattgtgttcccagcatgcacttggcctctttgcctcaacagcagcttgtgtgccccaggggttacagatctgtgtggcccctgctcctcatctctccctcctgaactttcagttccagcacccgcggggtatctcaggatcgagcatctggaactcagcacagtcacaattggactacacttttctcccaggagaagtttgacaccgtcctttctggtacactgcctggaaggtctgctggtcctcattctgaaatgccgtttggatatggtattccctgttggctacatcatcaccaccatcacctccaccaccaccaccaccagcagcagcagcagcaccaccaccaccaccatcatcacttaggcccccaaagatgtttatctgaaccagcaggtggctaaggggtggctgttgggaatcagacaaactgattttttttttttttttttttttgagacgcactctgtagaccaggctggcctcgaactcagaaatccgcctgcctctgcctcccaagtgctgggattaaaggtgtgcgccaccactgcccagctgatttttttttttttttttaatggctggctagatgccccgggttagctacatgaattctttaagcctcaggttcctccgtgaggtaaatgcaactaatatttacaaccactatagagaccgtgtcttcagtctagtgttctccttcctgcccgcctttcactcaccctccatatccaacatgcattcagcattcacacagcaaccgacacgggaaactcagctacttcctcaatatgaactcctgcttatgtcagtcttcaggttgaaaataaagttggaaaaggcttcgcctgaccacatattgcctgtattacaaaaacaatgtctttagcatttattattattattgctattattattattattattattattattattgcctgtagaactctaaccccaaggctaccttacctgttcaggttgcaaccaacactgtctttccaatgtacctaagatgccctgttttcgagccctggctgatgcagcacagcccctgcccccctccctcccatttcaaggtcttgcccttcttatccccaaccaatgacatcacacttgactctgcctgacatctgttcccatcagtgaatacacattccttggcatcagagaaaccgccttattaagtcatcactgagttcaattgttgattcaccaaagatccactgagacacaggcactgggtcaggcatggaggaacaaagatagtgccgggcatgctctttaacgagcgcacagttgggctagggagccgggcacaggacacgcacaggacgtagatgtatgtgacggatgtttgtcacaacgctgcggcctgggctgaccactggcgattctcctgtaattagccaatgatgcttttttattattactactactttcaagtttttattttatgtatatgagtgtttagcctgtgtggctgtgcaccacttgaatgcctgctgccccagaggccagaagagggcgctagatcccatggaacttgaatgacgggtgattgtgagctgccatatgggttctgggaaccaaggccctgtcctctggaaacaaacaaacaaacaaacaaacaaacaaaaccagccagcggtcttaacagctgagccacctctccagccccagtgaggctcgctctgtaaaaagttccttttatttcttctgtatcttccgccatcttgcatctgctcaggcaatgcccttcccctcacaccacagtggcactgccctgctgtatttcaagggtatcttctgggtagtctttcctatgatttgtttagggctagaggaaggacctgatcatgcgaaatttgctaattcctggaatgacaccctctgcaggtggattctcctgtgtctgcaacatgtggaactgtgggaactacaccctattgataaacgtaccgtgtatcttctggagcccccatctggggaagctctgtcaacacaccatgaacgctgccggctttgtcgcttgctttgaccaatagaatgtgtcagaagtgaggcatcttctaattctagagtgccttgccgtaaggaagatattctagcaatctgagcaccgatatccagtgttctcaataaataaaggagagatgaggatcttcatcaaacacctagctgagtttgcacctagctgcacgtgagtcccgccaactcacagacacatgagacatggtcactgccgtaagccatgagagttcaggtgctttgctactcgacaacatgtacctgacatagagaccatgccgaggcaggcaagactttatgctgagaactctcaggagtgacctgattagactcctgtgctagagagccggcctaggtagcaacatggagaatggcttggggtgctacagtggagagggaacaggccatattagacacaaaaaaaatccagatctgatccaagagtcacacagagggatggtcacaggatgttgaagacagagaataacgaagaaaagaaccatctatgttagggagacaaatgcgtgacgaggccgttcactgagagagattaggggaggaagagaaggcttgggttaactgtggagcacccagcaatacacattgacaattagtttagtgcagcttactctaggtgggtaggcaagtgttctgattcatggggtcatcttgctatggtaaaaacaaaacaaaacaaaacaaaacaaaacaaaacaaaacaccaaaaaaaacagtgtagcaagcctctaaggcaggtgaagctttgatggtatgaacacatattgatatttttccaataatttattgtttattcactttacattccgattgcagccccttccctcttctcttcccagtcccgtccttacaaacccttcccccattatcatctccctttctctaaggagaaggggaagcccccttgggtaccaccccccaccctagacacatttccccctccccctctcccttcctccctccctccctccgtccctccctccctccctccctccctccgtccctctcctctcatttttttgttccatgtgttctgtatatggctcccatctagtagagcaggaagtagctccttaatactggaaggaatggagaattacaggctaaaaataacttgaggttatctcccagtggcacgtcccttcaagtgggcacagaccatggtgtacccacgtaacacatcacacaaccagccaacattgacacgcgcgtacgaatttcggtttacctctgatgctgattaaaatagcaagtgaatggctgggaaccgatctcatctttccaatactgctgccagttcatgacgctctccgagttcttctggttttctctcttacagggcgggatataggagcactggtcaaacagaacacagagaggacaccggttattctacagggtattcaaagggagtccttctcgtcctcaaatactttgcttgattatagttcgtggcttgggacgggtgaggaggcggccacagtcagggttagcatgggatgcccatcccagtgcccacaaatgtgccagtgtccctactatgcgtcgtggttttccctgccaccctctacacaccatttcgttatcaagacaggaaaagggtctcaacagcacccaagacaacattcctatgagcaaatcatcagaaaaccatctgaaattgtccaaagcacctttggctagggctgttcatggggacccatagtcattctttcttctactgggatgggctttttacagacaacaaatctagttttgatataatctttagatatagccaaattaactatatttaaaattttttcgatttgaaacaatggcaacaaacaaacaaacagaaaaccccaatctagtaacaaaaccatctccagtcactaagaagtaaggacattttattaactgtgagttataaggttacggcaaattaaaaatgtaatacactttgtctttgtagaggcctgtcggtcaaaatcaggaggcaaagctgggcagggatcattagcgttcccgatcctatctgtgagcctttgtatcttctccaactaaccaacagctcccggctgctcttgggatatcactttacccacgtaagttttcatttcctacgttctcttgaacaacggaatcagtggagatgtctctcaagtctataatcaatggactttgctaacggatgactttctggccaggagctgacaaagtcattccctcgtatggacttgattaagcaatataagattcagcaacactgagaaatcgctcttggctccagatgttaaagggaaggctcagcactcaaagctcttggctccagatgttaaagggaaggctcagcatctgaagccgctttctccatgtcaggcgaacattccagcttctaccaactgttaatagtaggccagacatcctagcaaagacctaaggggcctgaacctgtgtacttcacacacacacatacacacacacacacacgcacacacacgatctctgctttacagataagaacactgccattcctcttagctctgcaactagacccgggagattccatgacaggctcctccaaggtgtctgccaaggtgcctgacgttaaggaacagaaaggagaacgctggttttatagtatgatttgactctcacggattcattcattcgcatattcgtttattcatttgcttttgtctatatgtatgtctcggtgtgtggatgtcagaggacaacctccacgtcctccaacggacaccttccacattttgagagaatttctctttcgtttggaacttgccaaatagcctagaccagctgaccagcggtctctagggatccatctttcttcaccacctatctcaccatcactgggggttacaaaagcatcccgccaggtccagattcccacatgggttctggagatccgaacttatgacctctcgcttgctaggcaggtgctttgctgactgaaacatcttcccagcactgcccactccttcctctgtctttttgaaatggggctcttgtcatgaagctctggttggcatggaactggctccaaagcttaggctggctttgaactcagggcactcctcggagcgctagggttccaggtatgtgccaccaccaaacctggctctactgttttagttgcagcatccaatttcacaacgctttctgttacaattcaaaaccttgatcgtgatgcatacagcgcgtcactctaacccctgctagtccatcctcatggaatcctgggagagccgaacaggaagcacttgatccttaagtctgccgcatgctgccacattgatccacccagcgcaggctgcacgcctccggctagtgctctctctctctcctgggtcatcttcttcagtgttaccatcttcttgtgccacatcaaacgcccctccctgtgttgaccagggcaggagtcaaacccatgaactcacagctagactcatacagtagcacacttgtctgctcatatcaggctccctctctggctggtgagttgatactaagggctcttttttttttttctttatgttcgccctagggattgtacatgatcttagcaatggtttctgcatgttgatcggacacaacctcaagtaaatgaagctactttcccaagttaaacatttagaattatatgaatgcaaatgcatttcaaattgtagtagctttcatcattccccaccacgttacatgaaataggattttagccactgaatagcagaatactatttgcatgcacacacagcttttccttctatggctaagggagcttttgtggaagtgtctggattctgaggttttctcagaagccacaggtaccagtatgtggggcttcagtcttgtgatttatttttggtgtttagtctggggtaaatttgctttttctgcatatccttcccccccgccttctagtctgtataacctccaaaataatttttagctcctgcttctgactctactcttggaggcacatcaagaaacaacccagccagaagctgactgcaaacaccattacagcgttttccaccagaagcgatcctgccactcgggagatggtgggaaaacttaattgagccaccattgctgctggccaaaagggccagcatgaccgctcctgccctgagactgatactttttctatggcagcaaatatttgcatggctgttccacttcctacttaataaaccacgttagatattcccttcccgtcttcctacccatggtccaagagagcttatgagacaacttactgtgccctttcaagggagtagaaagttccagtcttggaggcagaatcggtgaggtgcagccatctaagaactcaacagaaccctttcggcaaccggcaccactgacccaacaggcacatcaaacatttcaggaggaggcaaccaagtgtagccaaaacatacttaagacacccctcacttaactcagtgtgaattcgttactactcagtttttcggagtgaaacaggtttaaaagacctatctctctaccagatggcacctctgggagtcacacccatgtttctggaggcatcagggagaaatgttcatcaaatctcatagccggccggcgagctgtgatttcgtgtgaaatggaagaattacccggctgggtggagctttctgcacacatggattctgactgcaaattacattcttctcatacgaagaaaagtagccccaaggtacatttctcatggactcctttctttccataggttaaataatgggtctttcacactctagcgagttgacaaagtcaatatctccatgaaaggaaggataatgttaaagggctattctcgggttcttagaaatatcatttttccccttttctcacatcttgaccgcccaggttatttatgtctaaatgctttctgaagcccatctcaggtccttcctagagtcctcagctctatgtggaagatcattatagatgaatagaaatgtaaactccattaaaaagcagcattctcaaagaggatgcaaaaaaaggctgtcacccaaactcccttgtctcttaggcactcaggctggagggtttgcctgaaactttagagctctgacctgagcatctccttggggcgagagcctaagtataaatccacggcttagcaccatcgttgtcacggacagcgccgctggccaatgtcagggtctaattaatccgggtgttcaagcttcatcatctccagcagcagcaggagactgaggggcagtgaagtggctcagccgatcaaagggcttgctgtgaagcctgatgtccccagcttgctccccagaacccacaaaaaggtgggacaagagatccaactccaaagtgttgccctctgacctagtgggacatagtatatgcaagtctatgctaaccccggacataaacaacgttttaaacattaaaaagaacggggaagagagatggagaggttgaagttgttcaaggtcatagtggtccatgcggcatccttcgtacaagctgtgcttgttgttgctttttgttcttggtttggtttgagaccaggtctcactctggagtggaaccccccgagctatgactggtgtcaagcttcctataaagttagatatccttgaccttttcaggctcctgtttctgcttcccacgcgctggctgacagcagtgtgtctccacgcctgttttacacagtattagccccgccccacactcccttcttgtccagatgcccagttctccctattccgagcttcctgctttggagctaaggacatgccctgcttcttgtgccctctcttggaaaaccaaggtcgcatctctgcaatcagtgtgcttctttcaagaactggcgaggagacagtatgctgcaacggcttgtgaccctgctccatcctcagagaaatgcatttctaagtcttcctcctgctctgtctgactcaggatcagttcctggcagcatggctataatgccacttaggggaatggttagacacaatgctttccatcagacaataagcatcttcttagagaaacttcgtcctggggtcctgacgtgtttggtttctcactttcaaaggcaactaacttctcattctcacctacgaaccctctttggggtccttgttcctgccacctgaaatgagaggagactgctctctttaaaaaggtagaagagatggctcagtggttaagtacactgactgctcttccagaggtcctgagttcaattcccagcaaccacatggtggctcacaaccaactgtaatgggatctgatgtcctcttctggtgtgtctaaacagagcaactgtgtacctgcatacatcaaataaataaatcttaaaaaaaaaaaaaggtagaaaactctactccaaagagggatcaagaaggaacatctgaagttcccaaaggcagtggcagtgtagaaaaaaatggtgtcagcaggaaaagaggccaagatgaactgatcacaactccaggatggaaggagctaatggcaaatctttgcccagccacctccagtatgtggcgatggggtggggcttgtagaagctatggggagtcttatcttcacgacaagcctacaaccctttacaagccttgaggcaagtttggttgttggtgagactgaggctcctccagcaaatgggtccgcaataaggaggaaccccattttgtcaccccgtgtgactgggagagcagtgagtggcctaccacagtgatgaaaggaagggagcctgagttgactttgctacagctctatagtgaaagatggccatagaaggcagttgtgcagagtggtgtctggtcatggggaggggagggaagggatcaagttggaaagcacccgtggcttgaggcttgacttacatcgaaaattgctgagggaaaggcagcctagctctagaccctgcagtttgacagctcaggggtagaccaacttctgcagccaacgatctaccgtccaccaccagagcctggaacgtctgaaactccagacttctactcaacagaagctgtgaccctcttgtgggataattaacacctaaggaatcctcaaagagcaaagacaggctgtcagtctctaaggtgctgtgcttgcttctggtactcaacacactgggagacactcaccaactccatcgttagccactctggggagtcgcccaggtgcctggaccaacaagaaaagctacgtgtggccagcagaggcccctggtgtgaatgtatggagaactattacagtgaagtcagatatgacagaggatgacacaagctcagcaccaacaagccacagggatgacgtgagtccacaagagcgcctgatggcctcactgaccgtgtactgggcagtttccagagtgagaatccagaacaaagctgctccagcacttcatcttggcttttcttatcttcttacttctttacccctcccccatttttcatcacacctccactagtacttttacttcatattaaaattatgtgcctcttaaattccccttcaagcatttatttttgtttgcctacattttattataaaatattatcttgcttgctctacacttattccttcatactttaagtaatttttgttgttccttttttaaaaattaataatgataataataatacaccatgttttaatattttttagaataaaaaaatgtattctctgagatttcatacttgcataccgtgtatcttggattacaagtcccctttccaatcctcccactccctcaacacttgccctctcagcctcaggtcctctccttttatttaatttttagttttaattgtgtatatgtgcgcccaagtgaggacatgcacacgtgagtgcaggtacccacagaggccagcagagggcactggatctccgggagctgaaactacaggaggttgtgaggcgcccattgtggattctgggaaccaaactctagtcctctgcaggagcaacaagtgctgttgattgctaagccagcgttctagctgctgctgctgctcctcttcctcctcttaggctcagggttgctattactgtgaagagacaccatgaccgtggtaactcttataaagaaaaacatttaattgtggctggcttacagtttagtctatcatcatcatggcaggaagcatggcagcactcacacagacatggtgctggagaaggagctgagagttcttcatcttgatccaaaggcagcagaaggggactgtgttccacattgggcatagcttgaatatgggagatctcaaagcctaccccacagtgacatactttctccaacatggccacacctcctaatagtgccactctctattgggccaagcattcaaacactcaagtttataggaaccatacctattcaaactatcaccttcttcctcctcttcttcgtctccttctccttctccttcataaccactgagcctaactagtgctacctgaacaccgagagatacagggccatccataagaccatggaaaatctaacgttagccacactcccaaagaaaaattatcatgttccccagaggccaccaattatcaatagctcttcaattagggatggtgccccaggaaccctgccctcatccaagcttgaatgctgactggcttgattttgtccatctcttatgcagatggccatagctggtgtgagttcctgagtgcgagggccttgttgtgtccagaagatggcgtttctcagcaatcctccccatcttctaacttgtatattgttcctgtcacctcttgcactatcttctctgagcctcgagggagtcaactgaggcagatgtcgcatttaaggctgcacacccaacagccattggttattcacagcactttcaccagttctgtgcctccgcaatcatttctgcccatggcacagagaagcttccctgaccaggactaagtctatgggtacaaatacaaatacccaggggacagtctgacaacaggtacattcagcaaagcatcagtggcaggtccccagccaggatacgtgaccttcccagatatgggcttcaagaaccaggtttacagtagcattcccatctgcagatgtagcttcaaatctcaattaaaaaaaaaaaaagcagcgcgttcccctctccaacagttacccactattatgccaatcggcacaccttgtctggcagatatgtactgtagcatgcagtgtctgtctgctactgggaaagtccactgactcaagagaacagacagaggctgggaaggatgtaggggaagtggagagggctccagcagcacttcctccctgctggtaggaacacagagactgcagccactatgtactgtatgcttcgtacgccagtgtggtgggttctcaagatagtaccagtagggtcggtgtgacagctcagccggtgaagcagctcactgtgcaagtctggctagactctgatccccagatcccacgtaaaggtggaaagaaagaggcgactcacaaattggttctctgacctcctccacacagtcactgtgacatgcacacccacacataataaaaataaatacatgaaacaatttatacccattccaaatagaagtacggtatgatgatgcagctatacaacttgcgagtatgaacctaagttaacatacttcagagatccgtctatgttgttgcactattcattgtatctaggactgaaagcaagctcagatatccaccaaaagatggatgattgtagtacatataaataatagaatttattcatatttatgcagaaaaaaggctggatcattatgttaagtgccatagctagtctgagaaagatgaatatcatactttttttcttatatgtggactttagaggggagtgtgtgtgtgtgcatgtgtgtatatgtccatgagtgtgtgcatgtgtgcacgtatgtgtacacatgtgtatgtgcatgtgtctacatgtatatgtgtgtgcacatgtgtgcaggtatgtatgtgtgtgttcacatgtgtatgtatgcatgtttgtacacatatgtgtgcatgtttatatacatgtatatgtgtatgtaggtatacatgtatattgtgtgcatgtgtgtatatatatgcaagtgtgtgcatgtgtgtatgtatgtgcatgtgtgtatgtatgtatgtatgtatgtatgtatgtgtacatgtgagttcatgtacatgtaggttgtgaaaatagaaaagggacagtgagaggggtggtagaggttctaaggaccaaggaggggaaaaggggagagtaatggagaagatacgatatgaaatcaaagcatgggtctgcttgagatgggaaccaggaagagttgtgagggagatgggggcagccgatgcagaggggacgaatcagaacacagtgacacatgtgtacaaaagtgccataaggaaacacgtccctctgtatgctaacttgaaaacacactttttaaaaataagctgccaaacaaaagtctggggtgagatgaagctctagtgaatacacttgtctgatgtccatcttcacttttatttgggtttttatgcagctgaggctggctgggaacactccacgcaagctgaagatgaccttgaacttccgatcctcaggcgtctacgtctctagggctggaaggataggcacgcaccacgcaccaggctctaaggtctgtgccatagacaagggggtgttgacgctcaggttcacggacaaagctgctgaggagggagctgctgtgagaagcacaacaggaagggggccaggggatttattaagaaaagacataatcatcacctttgacatcgagtgtttgattgcatacttagttcttattttccattgtcctattttagggtttgccaaggtttataatagcactcgttttgtagcctaccacagagaatctaaactttaatagaaccttgctggagtaggttctttgtcatagtcttgaggagtgcatttcaaccacacaggtagagtaggcagaattcagtttctcccttcactgagtcattttaaaaattattgcataaatcatggcgtctatttaaccaaatatctggggctgtgttctacgtgaaacattttgtttaaaaaaaaaaaaaaagtagaggaaaaaaatgttttccttcgtttccttcattgcttgatcagcacacacagacaacggttaagtatttttccaaataaatttggctggaaaacaagttattaatacattgtcttaagaagagacaccgtgaccgaggcagctcataaaagaaagcatttaattgggggcttgcttatagtttcaggggatggatccatgaccatcatgataaggagcatggcagcaggcaggcaggcagcagataggcaggtaggcagtaggtagacagtcaacaggcaggcaggcaggcaggcagcaggtaggcagtcaacaggcaggcaggcagcaggtaggcagtaaacaggcaggcaggcagcaggtaggcagtaaacaggcaggcaggcaggcaggcaggcaggcaggcaggaggcaggcaggcaggcaggcaggcaggcagcaggtaggcaggcaggcaggcaggtaggtaggcagcaggtaggcaggcacactgctgcaacagcagctgggagcccacatccacctgatcaacaagcaggaggcagagaaacctagatgcctaccccagggacatacctcctccaacaaggccacacctcctaatccttcccaaacagttccactcgctggggaccaagcattcaaatatctgagcctataggggccactcttactcaaaccaccaaacatgtctcctctgactggcaatttctaaaatttatttttaaaaatgtgtgtgtgtgtgtgtgtgtgtgtgtgtgtgtgtcctgaggatcaaactcatgttaatcatacttgaaagtccaactcagccgggcagtggtggcacacgtctttaatcccagtactcgggaggcagaggcaggcggatttctgaattcaaggcctgcctgggtacagagtgagctccaggacagccagggctacacagagaaaccctgtctcaaaaaacaaaaaccaaaaaagaaagaaagagaaagagagagaaagaagagagagagagagaaagagagggaaagagagagagagagagagagagagagagagagagagagagaggagaaaagaaaaagaaaaagaaaaaagaagaagaagaaagtccaactcacgaagccaccttgccggccctctgattttactggtcatcaaacctctgtggaagttaaagtaaaattgagccactcgcaaactccacaatgtctctaatgcttgtgtacgcacaggtaaatgtaggttcattgaagaaacacaagtgaggttatatgtcacctaagaaattaaattttagggcaagaggttccagcatgagtgtctgtgtcttacggaagcctctgaaggtcaaataagcggctcaggaaatgtgcagaacgagtcaggctaagaacggaagctaacatgaactcttgaggactgcaggctgtgaagatagatgcaggggtgacactcagcctagaattctgtttgctaaagcctgctcaacagaaaactggagttgcttatcaaaaagacacacccacccctcctgttgggccggccgcatcaaggctgggaatttgctgtcctaacggtccttccacagtggaatggcagagccttaaaacggatagtttgcaaaacaaggctttcctgatcactgagtcctggataggacacaggcagagaccagctactgccccagcccgtcctttccatctctcaggagcaggcagcgtagtgactgcggcatcctcaccaaagcacttacgatttcaaaagagggtggggtcatttgcgccaccagtggggtgtgtgagagagggcttctcgggagtggtgactttggacttgtgtcatcaaggttgagtgggaatgtgctcgtcagaaaatgggttgggaaggtgacattccaagaagaaatgaaacgtgccaagactgtgaagggatcttccagaaagagtgagtcacctaatgtgcctgagagagaggggcaccggggatggcaccagaaaatgcccacactttccgggtacccattaagaattctcactcctgcccagggaggatgtccactcacccaccaaggaggctgtgactatagctaattttcgggaatttggaataatgatccccactgaacgtttagatttgtgcaaattgctaactctggtggctattacaaatcagcaaaattcagaatgacaaaccaccttcaagagaaaataactcaattagcttaagggttaggaaataaaaatcaccctgtctttggttgaaaaaaaaaaaagaaaacaaaacaaaacactgaatggaaatagtagccagaccaaaagagactttaatctgggtgaagttcaataggtgttactttaacaatcatgctaggacaattagaagcttatggtcatatgttcaaatccccgaggaagacctggggtgtggctcagtggcagagtgtgtgttcagcatgtgtgaggccctgggttcaagtcctagaataaattcttcccggagatgggcgatacgcttatgcccatattgaacagggaaagggaatacagaatttgtaatgctcacgtacacattcagacagccttcccgagggcacagggcgttgtactggatactgcagggtacacaatttgatgtgttcacgtgtgggtgcatattccttcaaacactgtgactaccacatcttcatgaaggtgaccagcaagtactgatgaaaatgtgctcctatttgtggcagaatgcatgttctctccctattccatctcgtccacacatttgcagggtgcagctggcatcgctctgtggaaaggcatagggggtgggctgtctgtctcctctttcctagactgtggatgagacagcgattacgacagaaatggtaaggtgtgacttttacagctacatcggaaaaggtgacagagtttctccttgcatctcgtcagaacacctgtcctcgatgccacaatgcagttctacaccggagacccaaattaacacagagcagtgaccgcacggcaagacctgtgtgtggtgggactgaggacttcagtcaaccccgaggcagcagctgcctgacatgccagtgaatgagacttaaaagggctctgacgtccaggctttggagctctccattgagaccccagataccactgagcagaggtcacggttttcctgtgccctgcccgatttcctaaccctcaaactttgtgaacatggcaaaaccaatttgaccttcagggatctctgacaatagcttaggagttagaggactctctaaaggcaaattagatggtcagactactaaagtttatatgtgtatgtgtgtgcatgtgtaggtgtatgcatatgtatgtatgcatgcatatgtgtatatatatgtataattatatataatataaatgtatgaaatgtatacatatgtatataatgtataaaatttacatatatgtgaaatttatatctctatataaaatttgtggaccttgtgaaccagcgccatgcaaggtacgtctcctcatttactcccagatggaaatctgattgaatgagctaggccgggggatgggggtggggtggggcgggggcgggggtggggagaatgcttacctttgaggaaagaccctgtggcaagacttcacaactgaacacattctgactttccccaaatgaagcatgcagatgttgaccggaacaccagtacagtggggaacggcagctgcacggagtgctactggatgcaggttctatgctaaccttagccctggggacttggacgaaggcgacactcagaaggaagagttcgtacagtggatgaatgaagtaagctgtggtttgtggtatggtaagtccaagagtcctctaattttcctaggcttgtttttgtttttctttaagatttatttattttatatatgtaagtacgccattgctgtctccagacacaccggaggaggacaagggatcccattacagatggttgtgagccaccatgtggtcgctgggaattgaactcagaacctctgcaagagcagccagtgctcttaaccagtgagccgtctctccagcccctaggcttgtttctttacgtcttgaaaatacacttgctacccacatacagatgtacagaacgaggagctgtggcccacaacttccccaattagacctttcacctcttatccctaggaggaaggacatagtggcggacggacagctaaggagacatcccttccacagtgggtcgctcaggagcgagggggtaaccccgtatcagctgcattcaactcgcctgttcggctcttctggaggcctttgtgctgttaactcaggctgtgatgatggctttgactgagagcccacggagatggaggagattttcttgccctgctatttattgacaaacaacacgcctgggtagctaagtaaaaaggcatcatgagaaccacatttaatgaaaagaggttttgaaaagatggaaaattggtagcgtgcatgcgagtatacaaaaacaaaagcatgtattttatgttttacataatatgaaacatactggtttttaacctacttttgagaataatatattataaacatcaatttagggagaaatatttcttcaataaatttaatgtataatatttaaccatataattttgaacccatatacacacacacacatgcgcgttcacacacacacacacacacacacacacacacacacacacacacacacacacaggcgtttagcctgcaagcatgtctgtgtaccacgtgtgtgtctggtaggccagagagggcatcggatccccttgaactggagttccaaatggttcctaaataggtgctgggacttgaacccaagtcctctggaagggcagccagtgctgtgaactacttagtcatctctcatggtgatggctcatctcggttgtcagcgatacggcacctggactccattaaatctgaggctgctgtgtagagttgcaagggatttccttcatcagataacttgcattgggaaagcccattctaaaggtgggctacataaaagaacatggcggagggaaggctctgccttatgcctgcttgccctcactctcgctgacaagttcctgccccctgttaactgcagctggattccagtgtagcccgaacacctgcagaaaatcctcccagactccagcagcagacggggctgctgggacatccagtcctgtgggctaaacaagcctacccatggatccttagtcttcctgtcaggcgacagccatcgtcggactacctgaaccccagcctgtaagccactctgagagaccacctttcatacgcattgcttctgtcaattctgatccttcagagaactcagagtctttgagggactgtcaaacttcctcagagacttcacaagccaggcctccattgcctccacggctcttagaattctgacctttcaagctccaaccgcatggcccattaagctttgagcactaatggcttttccaggccaaagctccaaatacttatgcagttctcacatatcgatcaatatctctcaaccaccctgggatcaagcagaatttttctgcctggttacgggtaatcatcgaattgtctaagcaggtgttcgtatgtttttctattgaaaagatggtcttttagggccacaagcccttattgacttttgaatcatttccctactgcagtgcaaatattctctaaaatttgtcattttttcagttgaacttcaacatatttttaaagtgtaggttttcccctattatgtaattaaatataccttcatgatttctatctttggtgttctgtttagaaagattttgctcaccctgaaaagtcatctatatatttatacgttaggtatgatttcattatttaattctgtaactgtacaattacattacactaaaaccatgattttaaattaaatgtctcgttttggctggcttatgcaaataaaatttccaagtaaattatgcattgtaatttagatgacgatgataacgatgatgatgacgacaacgaccatgatgtgtatgtatgatctatgtggggacatgaacatgctacaagtgtgcctgtaaaggtcagagggcaacttctgcaaggcaggcctctcctttactaagggatgctgggattgactgcagatgctcaggctcctgcagcttccacctgccgagccatctcaccagaccccaagtaattcttactgagttgctgcttttaaataatttttcccccaaaacaacaggtcagttttaggatcatctgctgaataagatatccttacaacttatgcaaaacgctgaaatttgcaaaacaaaatagtaattcctttgtgtgttaatggcttcattaaaatgcaatccacctactattcaattcatccatttaatgtgtccaatttaatgatttttagtcattcagagaggcaactatcactacaatcagtttaaaaacatttattattatgccaaagacacctctatccattaattatcataatgagttctcttatgtctccacgaactcactttcagtcaataaatcagagtacggatttcaatattaaaaacattaacgcgtggccttcagtggtttagtagctgatcgtttcttgttcgtctgttgggggttcatttccttatttgaaaaagaaatgatacaaattaaaggatctcggtggatgtttctttcggtacaacttacagaaagggtaaagataattccaatatgcatgtgttgccatggtgaccagcgaggacactctacaccccgaagctcagctcccctcattactgtgtcccacgggaagcttgtcaaggtgacactcactccatgctgacttcagggactctgcactgtgcacaagttggttttgtggtcttggagttctttggtggatttccactactcactcgggtgatgagtcttactgaagtcacacaagtggggagcgtgtttgtctagggtttggcttgtgaccttcccattgtggctgactcagacttcctccaagggtatcatacacttgtgatcccactctcttggtcgtcacagtccggttccttgatatcctgaaggaagacttggttacctccctagtctgaaccttcaaagcaattctacctcctcataacaggctgagaggaagggtttggcaaagtccttcaaagccacatcagcaaagcccaagtcataaaatacagatctatctatctatctatctatctatctacctacctacctacctatctatctatgtgtgtatacacacacacacacacacacacatacacatacatgaactctatttggttgttcccactttgttccttttgttagtatggcacatgtctctttcttcacttttactctcaatatccctgcttaaaaaaaaaaaaaaagtgttactcctaaaactataatatatttgattttgatgttcctgaattacaatccctgtcttttaactggggtatttggtccatttacagttaatacatattcttaaacacatacacataaacatgtttaattcctatttagaaattttgttctacagatttacattcctttcttgtctttggattccgggacttgtgcatgcttagcaagcaactacacagcagcctataaatctttttttttcttttttttttctatgcgctatggttggatttgaccatgggacttgggtggaatcgaggctgagaccagagcatgagcatttctgtccagcccacagatggcgctgatgctgcttgaatgctggccacacttcgaaaaatggcggcttggaagatgaaacagaccatacatgaagggactggtgacagggtcctaaagaaaattaaagcgaaagagaactgtatttgggactggagagacagctcaggaaagagtctcctgttgccccagcggacaccaggtgaaggtttcatcatccgcatgcccaaggcactaatgagatgagtcaccctttatatgggaccacatggtattagagcacaaagtaacagggacctttgtgggaacctaatgttctggattctgcaaacacataaactaatttgaattcattcatcgacaaaaatagaaacaaaattacaaacgctgtgatttgcaatgataacgggttatttttaaagaaaggaagagggcactactacaaaatcaaatttacaaattcttgcaaactggtttatgtcctagagaacacctaacgcacagaatgagaaatggttagaaacatatgtaatatgaaacaccattctgttcactgttttcctgtgagtaattatgttaattgtaatataaatgtgctgttgatctaggaactcatctggttatgcaattctgctaaaggctgaagaaatttcaacccaggggaaataaaacttgacatcttcattcatgaaagagaacaacatcaacaacaacaacaaaaaaagcattttaaataaatgtgtcaaaatcgccccaaaatctttacagttctgaagtgtttgtgattttaaaaaaatgcaacaaaaccatccaagatataaaaatggaaatagaaacaataaagaaatcacaaagggagacagccctcggattagaaaatctaggaaagagatcaggagtaatacaggcaagcatcaccaacagaatacaagaggtagaagagagaatctcaggggcagaagataccatagaaaacattgacacaacagtcaaagaaaatgcaaaaagcaaaaagctcttaacccaaaacatccaggaaatccaggacagaattaaaagactaaacataaggataataggtatagaagagagcgaagattcccaacttaaaagggccagtaaatatcttcaataaaattatagaagaaaacatccctaacctaaagaaagagatgaccatgaacatataagaagcctacagaactccaaatagactggtctagaaaagaaattcctcctgtcacataataatcaaaacaacaaatgcactaaccaaagaatattaaaagcagtacgggaaaagggtcaactaacatataaaggcagacctatcagaattacaccagacttctctagcttctatgaaagctagaaggtcctgggcagatgtcatacagaccctaagagaacacaaatgtcagcccaggctactatacccagccaacctctcaattaccatagacagagaaaagaagatattctatgacaaaaccaaatatacacagtatctttccacaaatccagccctacaaaggataatagatggaaaacaccaacacaaggagggaaactacaccctagaaaaaaagcaagaaagtaatctttcaacaaacctaaaagaagatagccacacaaacataattccacctctaacaacaaaaataacagaaagtaacaatcgcttttccttaatatctttgaacatcaatggactcaattccccaatgaaaagacatagattaacagactggatatgtaaccaggacccagcattttgctgcattcaggaaatgcacctcagtgacaaagacagacactgcctcagagtaaaaggctggaaaacaattttccaataaaatggtcccaagaaacaagctggagtaaccattctaatatcaaataaaatcaactttctaccaaaagttatcaaaaaaagatatggaaggacacttcatactggtcaaaggaaaaatctaccaagatgaactctcaattctgaacatctatgctccaaatgcaagggtacccacatccataaaagaaactgtgccaaagctcaaacacattgcacctcgcacaataatagtgggagacttcaacaccccaatctcagcaatgtacagatcatggaaacaccaactaaacagagacacagtgacgctaacaaaagttatgaaccaaatggatctaacagatatctatagaacatttcatcctaaagcaaaagaatataccttcttctcagcacctcacggtaccttcttcaaaactgaccatataatcagtcacaaaacaggcgttagcagatagatacaagaagattgaaataatcccatgcaccctatccgatcaccatggagtaaggctggtcttaaataccaacaaaaacaatggaaagcacgcaaacacatggaagctgaacaacactctactcaatgataacttggtcaaggaaaaaataaaaacatgtaaaggttttttagagtttaatgaaaatgaagacacatcattccaaaacttacgggacacaatgagagcagtggtaagagggaaactcatagctctgagtgcctccaaaaagaaaatggagagagcatacactagcagcttgacaacacacctggaagatctagaacaaaaggaagcaaattcacccaagaggagtagaaggcaggaaataatcaaactcaaggctgtaatcaacgaaatagaaacaaaaagaactattcaaagaatcaacaaaaccaggagctggttctttgagaaaatcaacaagatagataaactcttagccagactaaccagagggtacagagacagtatccaaattaataaaatcagaaatgaaaaggaagcgataacaacaaaatatatcttaaaataatgattctgcttattgaatatttgcagttggaaatattaaaattgtcctacaaacatggaaatattattgataatttttctcactgtgctcaaaattagaattttcttaatgtttaacttcaaagattttttgctattttgaaatttttaaaatatacttactaataaaataatttctctcaggactggagagatggctcagcggttaagagcattgactgctcttccaaagatcctgagttcaaatcccagcaatcagatggtggctcacaaccatcagtaatgagatctgatgccctcttctggtgtgtctgaagacagctacagtgtacttacttataataaataaataaatcttaaaaataattctctcctagaaacactgataattttccttaagtaaacttacagttagacaatgtacacatatatataatacactttaaatactctcttactatgtcaggtgttatcatataagggcttgtgaacatattcttaataattcatttttaatattttatgctcttttactatgcttaattcccaaagaatattttgcatgttttgaaacaatttagtattcaacattagatataggatcatcagttatggatagtattaaatattcattaattttatttttagggtatgaaaggatatgaatataaaagttgaacaaattttatgtatcatttgcttctcaaaattctcaatattattaatatgcttgatgtataaaatgcatttaaataataaaaacattaagaaaaaaaatcctattgagaaaaaaaatgcattttcctcaaattgcaaattaaaatgaacacaaatctcctgaattttagttcctgattattttttaatatatgaccttgggggggatctttgtaattgagatttccataaatggtatccacaagtggagattagagagataacataaaaaaaacacccttgggtacacaaattagatggcttccaaagtgtgtggtcgtgcacactattaattcccgcaattgaaaggtggatgctgaaggacctctgatttgaaaccagcttggactatacagcaataggttctaggccagccagagttacgtggtgaaaccacgtctccatataaaaagagaacaatcaacgtattactttgtttgagacagtatcttactacgttgctcaggctggcctcaaacctgttattctcctgcctcagccgcaataaccctagtgctagaataatcccaagtgcttgccatcatttctggtgcactctggaatgcctgaccaaacgagctacctgctcaaaaagcattccttggcttctggatgcgttctgttgctgagacacaaacttagtgacaaaaccaaaccaaaccaaaccaaccaaccaagcaacaacagcaaaaggcacacattttactatcattaacagggtggagagagatggtttatcagttgagagcactggctgctgttccaggggctctgggttcagttcccagaacacacattgtgcctcacaattgtaactccagttccaggggcgtggggggggggggtagatctgataccctcctctggcctccgtggtacagagacacacatacagaaaaaaaaaaaaaacacctagacacataaaatactaataagtaactttttgaggaagagtctggacgtcagaaggtcttggacgtcagaaagtctagcggggtaaaacatctgcactccagccaagcttcaggcctttctggagttaggcaagaatccgttccctccccatttccctttctatgtttcaaatgggcccaacaggtacacaaatgaagatgaatctatgtatgagtttctgccccaaagattatggcccagcagaggacacgtagaacatagataatcataaaacgaaacaacccttggttttcatcgacatcaacctttccacatcccccatctcctgtaaaggcaccccctcccttgccgtgatgtgctggccaaacactctgacgccatcttcaattcttcttgccttcattcttcatatccagttcaacgataaatctagtcacgccaccccgatccaggccaccagtcgcgggcacccaccgacccgggctgccactctctcttgcccacactagaacttttaaatatctatcactacatggaattctattataaattgactcacgtctgtttcctgcaccaagatgccagctctgtgagggcaggaactttgatctctgttctggtctggaacccggcagtaacaaaggcacagatggactgataaacaaacaagcttagctttatatgtctcgtaggggttttgccctgttctttggccacaataagttctgagaaaccagaagctcaaatgaatctatctacctacctatcatctatctatctatctatctatctatctatctatctatctatctatcatctacctatcatttatctatcaatcatctacctatcatctatctacctacctaactatcatctatttatctatcatctacctatcatctatctatcacctacctacctgtctgtctgtctatcttctatctgtccatctaacatctctatataattacatataatattacatatatattatttaataacattaccaaaggaaagaaaatccaaaggaagccacttctttgcggacagataaaggctagagatgttggcacagctccaatatcttttcatgatgcggccctggtctgatggctttctccctagaggaccaagcgcatcaaggtcaaacccacaggtcaaagccatgctgcccttacatgtaggaggacagggccggtgagtgtgggtctgaaggcccttcgctaaggtggctggcaaccacgaagccttcatctgtgctctgctgcccttcctggatgctcttcaagccaaaagccttcctctgtccccgctgaagtttttcctcagtcttcagtgtcaaagaactagtttcttagaaacaaacttattctttattctttattttgcttttggtggctggttttttttgttttgttttgttttgttttttgttttgttttgtttttttgtttttttaatcgaagaagggagagaaacccttccaaacaaaaacttaaacatggctcctgcctctaatcaccccctctcgcagcacacagcagaaggcagttcctaaattcatctcttctttgccctccaaagtaggtaacagcaaaagcgagtgtttgcaatggtgcaccttcgtttcatttaaactgatcaactctaaatgagcttcccgcactaattttaaatgactctctcccttctcttcagagttccgctgagtccctactgcaccttctctacccagtggcgcctacatcttttatgttgaaaacatgagcattaatcatggtgaattcattttgaagcccggtggttgttcttgcacaacagatgagcacattttccaaggcactaatcttcatctcttggatacgcattagaaccacctgcacggctttgaaaactacaacactcaggccccatccctgaccacatcaatgtgcctgaaaactgaacctaagcccaaaaaggtgatcctcaaggtccttgagtaatcccacagcgtagctgaggaccagagcactcggcacccaccattctgagtcacagaggtgatgcaatgctggggcagcagcaagaggacgctaacaccggaacgtagactgggctatgggtgatccatcagctcctttatcaagtccctgcctgatccgaatactgtgccatgaaacacagtgatcccctgagataacaaggatttgatgaaaaacgtaaagaaactgagcagagcataacgatactctaaaggccagcacttgcctcacagtcaacggctcaaccagctgtacatttggaccatctgtcccctccctgccttgggctgtatgtaatactttgagcacaggcccaggagaagatgcttgctctatgtagatgagaggtggttccctaacagtttcttgggatgcctgggtttggagagaatgtgagaagcagatggaagacgaaaggaacagactggaaaattaaaagtaagtaagggagggcatagctcagcgtagccgatatgcaacaggactgggcagtgggattgtctaggcgcaaggacgccacagaaactcaatcttcttacgagtctgaccctaacatggtgtttcggtgcactgagatttttccattactaaagtgcttacaaaaatttccaaattgaacatctaattgggggaaaaaaaagtgatgtttgttctataaatactacaatacatcacaatttggacaaagagatgcgtatttggcagaggaaatcttgcataaattgatggaaaggtcatttatcacccttccggaccattaaagatgtcattttttcccagttctgaccacttcgatttttgtttgatacttcttcaactattgataagttcttaactggcatggggggggggggataagattatttgcaagtggagagagagagagaattttaatattacataaaacattgtgattgcttccaagttatttaagaatcgatgtcctaatgattccaacttatccctgttgccagaatcctgcaaaactgcctggaaactttggttgacttctgtggtaaatcctaacttgtctacaccaaaattagatattaaccatacaagttagaatttaccttgtaagaatgtatatgcacatatatgtatgtatgtatacacatatacatatgtatacacacacacacatatataattgattaaacgactatctcaaaaataattagcagtgtttcaccaactatgactacacctgtatggcaaactacagagcaccttccaaatcactaagttactacttgacacctttcttagatatttttcacttaattctgatttttacaatgctttctcaaagccaccagacctcttattaaattctcaagcactatgcagattaacccacatctgtttttgagaccgatcacttcggcaagaccttggtccttagagactggattccaaatgttcacgtctacacttactgttcttggattagctccatttttaaaagcaaacgagcctccgtgcactagcgggagacttttccattgaggagtccatcatatgttcaaagactagtttcttctaactttccaaataagtgagttacgcccgagtttctctgcacagcggtagtgatcttgtttaaaataatgaattccgattaatctatctggtcacatttaagagaacatgttcctgcacgcacaggactcattttctttggaatgatttctgcttgtcttccagcacagcccccaggaagtacaaggactcagtaacttgaatatatatacacaccttcagctggcagcagaaaggaacacaggcatcaaagaaccctcctgcagaagcaggcacactgcaaggctcaattagttcacggactggggacacagctttttataagtgctttcctaccccggggaagttttctgagtctccctctctgctctccagaggctagaaagtcctaaccaggttttatctatttttttccctctttttttttttttttcctcccctgtaacaacaaaagaagttgtcaggaaaccgctgcttggtatatgtcatcaagggctttctattttcggtaagttgttctcctacttactccttagttacagcttctcattgtgcccaaacactcagagtggttaggacccttcagcctccaccaccagcaccaagcaaaccaacccgacctcatcagaatctcttcttggattcctcctgatggctgttgaccccaccctcaccatcccaagtctatctgtagacctcaagttaaaaacttcagtttagaactaaaattcaaaagtcacttaagatactttccagaagcgaagagacccctttaacctctcaaagaagggagttcttgagccccatagaagctcaggccatatactggagtacctgggtcctgggctatcccatggctacattggaaggaaaagttaactttctttgctccttgagtttaggcaaccccttcccgcaggcgctggacctggggtggtccggagctcaaaaaaatctaagaacagaaaagatctgtttgcagagaggctcgcgtaccaccgcccagtaggcaaacacaccccgaggtctggagccctgggctccagggatgcgtgcatgcacctcatgcctccctcgcatcaactccgagcgaggacagtgcactcgattcttcccctggggtctaaccgggacgttggccccgaacctgcactgttaggcgggagctcccgcgcgcttaccttggggttggtcaggagctggtgctggtcgctgtgtagcagcgccctggagttggactcggagttgttcacgtacacctggacgcagggatactgcgaggtgcccctgcagtcggtgccacaggtgaaggtgcactcgaacacctcgccgatctgctgcaccgacagcacggtgcagttggccgccgtggcttgcagatcctgcaaggcgggactgagccagcagaagccgaagatgaagagcgacaggatgccggagacgatgaggaacaagccgagccggatgctcttgtcttcggcttccgtgtactcgtaagacaccctgagcttcgccatcgccccccactctccacggctggcgcgctccccgccccctcccgcccccggcgccgagctcaaccgcctcgggcgggaggagccgccgccgccgccgcgcgacagcaggggagtgggcggcgagggggcgcgcgcgagaacaaaggggccgaggccggcgacgcccccggcggcggcgacggcgctgcccgaggccgggctcccgggtgccaccgccgcctcacagcgtccggcaccccggggctccccgagcccgcccccgcccccgcgcgctccgcgccccgcgcccgcctccccgcgcgcgccgcccgcctgccatcgccgcggccgagcgcccggcgccccgacgctgggagcgactgggctgctgagccctggctccgcgttgagcgaggctgctcctccccgccctgggcgccgccgccccgccccgccccgcgccgcgccccgcagctcccgtgggcgagcacccgggccgccgcgagctgctctcggaatcctcgccagatgcaacctggagagatggcggagacggtcgaggcgaacgcttagcaccgagggagcgtggctggggagaaagttaaaagagagaaaaaaaaaatttttttaagtgggggaggatggcgtgagcgtgcgaagcgggaatcttcaaactccgatccggggagctgcggggcagcaggcgcaccggcaaagggagctccggtggcggcgagcgacagagggcaccggcgcggacgcggggggatgcccacaggcgagcggccgggagccggaggtccccgcggatcccacgccgccaccgggaccgtgcaggctaacacgattggagccttgagcgtcggtggactttcctggaaaaataggtgccagacagcgggaacgacccctagggggtggacgcaaacaggtggcaaagcctggcctcgggctggtgagagcagactctgttggcctctttaggaatattgccacccttagctggccctgagatttgcaggtgagctttttctggagctctgtgcaaggcgaccgcggcttgcagacactttggaactccaccctatcgatgtacacctttattcagcctctattctcctgacttttcctttgtaagtttaaatttgctttttacctacatttttttaaagatcataaaaccaaacttgagaactgtttagagctgcgtttggaagaataaagttgttgttgttgttttaaccctccttttcttgtctttcaagtcctagatgaatgaactcaggctcctgatgaataacagttgccaagtcatggaaatgttaagcccactctaccagacttcaaaccctttggctggcactgacagagttctggcatgttatgctgatgggtatttccaaacaatggtaaaggagacctttagtgtctgtttttcttaatgaataaaaaggctgcaggacttggaaaaactttaaaatcacaaagatgtctcagtgtcgtctccgtttgagagcagacactgtattttttgtttgtttgtttgtttgtttctgcctgagatttccccccctgttggcgtcaaggcatttgttaggcacacgctggctataaagaagagagctccaaagctgaagcgtcttaacctgaaatcgcaaatcttcgctgagtgttttccttcgacagattccagatgccaatcctcatttcaaaaaagcaacctcttctgggattggagatggggacgaggggtgggtgaataaacacggaacagggccgctaaggctaagggactaaataaagtaattcatgcaacgtgcagcaagcccaggacagagccctaagggtaacgtaacaccattaccttacacacttcacagttcagtgtctcctgggcgccttaagtgttgtgaatgaaacaacagcaacaacaacaacaaaaactgcttacaacctaggaaaccagggccagggagttctgtcttaactcaaatgttagttcagttactttcttcattgtttattctcacagggatagaagctgttgttctctctccagctttgtgttattcaaacatttcattttgattctttgttttcctatataagttggcttgtcttctgtggtaagggaagcagatctgaaggcttcacagacgaaatcaacttttttattttgaaggattcactagaaatccgtgttagtttcttctcctagtggtagggctgccttgtaacattcccacctaggctgcttgtatcagaaaagcgctcaacccttgactttaagtcagaaggacaggaagaacccagggggcctcggaaaggttgaaccacaggtcaacttggcaccttctgttcccaggagggcagagactgcacaggagaggaagcgagacctccctatgaatagtaagccatccacagaaactgaaagacacaccattcggcaccagactccctcatagaacactgttgtctccaatggttctctcaaagccagagcaagccccagtgagctttcatttagaagaaaagcaaaaccttccccaagatgaacattaaagcccctataggtttgctttagtgatcaacactctacgggaaacttctgtggcttacgttagaagtgcagcatccaatctcacatgcatgcaagacttgaataggaacagagcatgttgttcctgtctgtcatttccagaatcagcacatcgtggaggctttctataacaaacatagtaaacacgtgcatagctaactacacagactagggggggaagccatattttaacacccttttcattaaaattcacattttggaaaagttttaaacatttgctactgactataacaagagaggaagaaactagtaatacaacaaagaaaatcttatagaaatcttattttcccaactcacacgtaattaactttaaaatatttagtttgggaccgaagagatgtgacagcttgtatatgtttgacccagggagtggcactattaggaggtatggccttggagtaggtgtgggggtgggaaatgagagccttctcctaaccacctgggagccagtcttctagcagccttcagatgaagatatagaactctcagctcctcctgcactgtgcctgcctggatgatgccatgctcctgccttgatactggactgaacctctgaacctgtaagccagcttcacataaatgttgtgcttacaagagttgccttggtcacggtgcctattcatagcagtaaaccctaagacaagagatgactcagcagttaagggcagatactgttcttgtgaggacctgagttcttctgaggaccaacatctatgtaggcagtgcacaatcacctgcaaccccagctctggggatctgatacttccttcctccagctctcgaatacttacagacccccacacacgtttttaaaaataataaaattgggctggagagatggctcagtggttaagagcactggctgctcttccagaggtcctgagttcaattcccagcaaccacatagtggctcacaaccatctataattggattcgatgccctcttctggtgtgtctgaagacagctacagtgtacatatacataaaataaataaatctttaaaaaataataatataattttaaaataaaggttgcaggagacaggagagatggttcagtggttaagaacactggactttcttccagaggaccagagtttgattctcagcacccactcatggcaactcacaagtctgttaactccagctcaggggatccagtgccctcttctggactcttcaagaactgtatgtttgtgatacatgcaagcaaaacatcagacacttaaagtacaaagattaacttttaagatttttcagtgttactaaatgatttctagcctgctacgaccaaattttgtttcgctccattgttaaatgtttatctccttaggctttagatttgaaataaatttccagacataaatagtacctacttcaccgaacatactacaactgagaacactagtacttccagatacttagaaaatattagtacaaaattaaccaagacaccccctaagaccttacacctcattgaaacagcaaatacttttaaagtaatttatttttaaaagtttgaaatttgtttgtacacaggccaagcacagataagcaagatcccagacacagaaaatgtaagcagcttgtattaatagtaaaaactgagaatttcatatatgcatatatgttttgatcaagcccacccctccctccaaccttgccataacccccaaacccctccctccccaacttcatgaactctttttaaacccactgagtccacttaatgttgctgtatgtgcacaggccatcccactggagcatgaacaaacagccaggtgaagcctgaagccctgaaccaaactgacaatctccttgcccaacagccatagtgtttcagctagggtgtgacgtcacaagcctcaccctcatcattgcttagatattaatgctctattatttaaaaaaaaaaaacactgctagtgttagagttcctaaattctcaccatctttcatggtgaatgaattattataggggatacatatttatgtagaaagaggagtattagctttggccccagctctattcatctgatataatcaacaataatttcaaatgaaaagattggggtagaattatttttttaacattctaggattaaaatagaactgttgttctaaaattaaaaaacaaaacaaaaaaacttgtattgctttgtaataaacacctagtcaagggtattctaaaatactcctcaaatccagagaacatctccccacagtggcatgtgggagtatccttgggggcatgggcatacatttgctgaatgactctacaaactaggtttactcacaaatgttcgaaattaatctcatgagggacaaagtcagagattagcatttccaggatgatatattaaaaataaatttcaaatacattatatccaagggttggtccacatctgcactaggaaacctatgaaggagacaactggtagaggaatgttggggctcatggcttaatctagctcccatttattctgaatcatattcctgcttagattcaagctacaaacacacacacacacacacacacaaagataaacaggcattggcaaaagtcactaaattattctagagtagaaggaaatcctaccccatttatgtgagagagaagttggtatttccagtaagatttccgtgtctttgtctgcacacatctaatgataggaaatacattgatccctaccctctacccactgctgtctttggaacatttaaagaaatagaactgttattataacttagtctttgtgcctcgctgtaacattgtggtgcttgttacatcatctcgttttatttaggttaaagacagttgtaagagtttattcttacaacctagaaagaattgactcctattaagacatatgcagccattcggttaccctagaccttttcttcaggcacattttcctgctactttggtttcttttgatgggatttaggacactaaagttttatacccttaccttaaattctaagaaaaaggatgatacaaaattggaaaggaaaccccactttaatgctctatgaaacaagagtctgcaccttccttttccacaccatataatttgcaagtatttcagggataatggaccttgttcagggctgtcactgtaaatgtcgagaagccagggcagtgattggctcatcttcagtagacagttcctattctgaataggatttgcaagtcaaactaatttaatatacaaattttagatctacatttagaatgaaccaagaataacccaaagctttagataatgtaaatgtagaaatatttcttaagcacagtaacaaaaatggcatttaaataaaggtatgttttatgtaatagcatatatgaggaatattaattgttcagacattaaaacatgacagttatgtttctcttaggaggaggaaatatttaacaactcaaaaccagaccaaatgaatgcatcgctacatatggtaattaaaactacatcttaaaataaatgttcagtatgtagcagatttaaaggtagctttgaaacactgtggctgccccaaatctttatttttatacacaaggagatgaaactatttatgtcattccttcatatgtcttcatattgaagtgtgtaattttaaaggttttacctaagtttttctattatgcgtatctagaggccacaatgttaaactaactcagccacttgtggaaatcctatcacccttgaattaaaggcatttcttccaaatgttccttgaagaactcaagtactagcaaaattatttccattatgcaggagaaacaaatttgtcttggaaaaagtcctttattataaattaagacaaatattatgtggccaagatgtcccttaggtcaaatataaatagaaactaccctaacattttatgacctgtctatgcaaattaggaggtcacatcctagggctgcagagttggctcagtggtgaggagcacttggggaggacctggacttggttcccaacacacagtgtgactcacaaccattcataatccaacactcttgtggacacttaggtcacggaacatgtagacacatacatgtagacaaaacactcacacacataagcctaaaaattaagaactgttttcctcagctggtacccaaaatgctgcttagaggacttaacacactgattcttacctagcaaggtatcagaagatagctaatgcaaggcaggtgcctaatgccctggaaatgaacaaaaggaatgcaaaatcggtctgtcagccaatgcttgtgtactgtttacacaggaacttggttggattggcaacacagtaagccatgtagtttttataattccaatttaaatgattggcagaaaattttgatatatatgtatgtgtgcatatgtatatatatgtgtgtgtgtatatatatatatgtgtgttgttgttagcattttgtggtccatgaatactgaaatcttacaagcttacagcattaagaaaatgccgagcctgaattactggattttcaactttcccttaatgaatacactgataatgtacacaattacttttggtagattttatgcaaacaagtaaacctagcaaaaatagtcttcagacacaatagaggtaaacactttgcattttatgtttggaaaccagttccctttctacctgacccactgatgactagtgctgtaaagccctggtctcgcagtgaggacactgggtgatacaggaaatacaagtgagcacctctggcatataaccttactctaatgttaacttggtgagagttcaccaggaccttatttatacattaaaccaagtataaagtggacaggcggcagtaacttcatgcgatctgaagtagctttctggcttctcccatgggcgctgttgtctctacacggcctccaggtgaatcacttcagggtttcactgcttctggaaaatccctataggaatctcaaacaggcatttataagtcaaactcaatgatcaatttttaaaagatttatttattgtatgtatgtgagtacattgtagttgtcttcagacacaccagcagagggcgtcagatctcattacagatggctgtgagccaccatgtggttgctgggaattgaactcaggatctctggaagagcagcagtcagtgctctcaactgttgagccatctctccagcccatcaatttttttatgtaatagaaatattgctcaacctgatttatgttttctctattgtagaaaatagattgaacgtgaatgtcacatattacgtttcaggctatttacttcaaaacagcataaactggctgttcctcttaccaatatataactaaaaaaaataacctaatgaatacttttaatatgtgttgccggtttcacatgtctgcttctgccaactagagggaggaaaaggaaaatgacaaacgtaactaaatttgcaatgacttacccccaagtagtttaagtaaaacgtccccattccgagaacagcgtattctttaaggatgtactttatattgatacagtatattgatacaggatgatatcctatctcactcaccttccacttcttgagtagaagacttagccttcttttgaacttcctgtatttgaagataactgtgatgtttccccttgctctctggcttttagttaaggtcccatgttttccccaactgtaaaacgcacgctttgtgtttgtgcttgtttacaaatgcaatgcactttgtaatgggcggtcttcctctgagactttctgatggactcgaagagtttctagctgataggcagaaatacactagctatcccaattccttgttacactttttcagttagccacaggaagttaaccctcagtccagtgccttccctcatgcacagaactggccaaccagtccctcatccactgtgttcgacgaagccaaaagtaacgccttacaaaaagcatgtatctgaggccctggatcactgggctgcgggcgcggctcgcaggtacagcgtgcttgcgtatctagctttattgagacgcatgcttaagcccaaataccacaaaaccaagagcagttactgtggcccctcctaccacactgataaaacctttactggtgcttgttagctttttgccacacacatgaacacggacagccttggaatttgatacttgaagggaaatacggtttccaaagcccttttctctacagtgttgcccgtccttatttccttttgcactgatgacatctgaagccttctataaaatatgcaacagtaaacccacccacaatgctattctttaaatacaaaacaataatgtatgtaaaaattactatgtcacctggcagccagaaggcaggaagggacatgcaacaagcatccaaaagagcatttaactggacataacatttcagatgtataacattcaaaacagtgattctttttttggtggtggtgggggaggttggttttttccgagtcagggtttctctgtgtagccctggctgtcctggaactcactctgtagaccaggctggcctcgaactcagaaatccacctgcctctgcctcccgagtgctagaaataaaggtgtgcgccaccacgcccggctgattcttaccgtgtcccgattacacatagtttttactttagcagtagaagcagaatcatcagtttgctctatgtataaaccactcttaagccattttttttcgttttaccatccaagctgaaaactaacgatcttgagataatgtatagcacttgattcaacctgatattaaaactactgggttgtttttctctttcaatgcatttatgtgcttcatctcccaaatctgatccaagtcactgttaaatgtcatcgccaacaggaacttggtgacatgccatgagaatttacattcttgaaagcatactactaagtttcttaatttactttctttagtttttaattttagtgtgtgcaggatcagggattttaacttagagcctcatatatggcagggcaaacactctatcagtgagctatactgccgcacatcttaaagattacctccttagcagatgtttctaagtcattataaacttcatagacaaaccatagttgagaacatttccattcttctcttttcacgtgtgcgcaggcgcgtgcgtgtgtttgtagaaactttgtgcagaaatgatgctctgaatgcaaatgtaaatgaagtgagccttgcagggccatgctcaggcgcctcatgttttatgggcaaggcctaagacttcaggagacctgcttgggaatggaaggattcaagatcaacttgactgtacacggaaaaaagttgggtttcgaaagctaagtgaaaatgttcaagatcttcatgaaaatgaaattacagcaaagatttatgtcaatgcctaaatgatttaatttgtacattttcaaactgaaatgattaaaaaaaagccaattcatcaacaagtattagtaaaatacccatggataagcagttggcttttgtagatagtgcaagatactctcagttcttaaggaagattaccttgaaggaaaatttcagcaaacacctccagaaaagcgttttaccatgttacagtgcacctcaagtacagatctctgcatccaagcaggtgaaagggttgcgttgtgcagggtactagcttccgttccacaaagccagttacactcggtgagttatgggcagagcatacccatttgcttcactgggggaaatgaaccatacaaccacaaacagaaccaaatctaaggggaaaatgtggaatgtatatatagtttcagccaatttctttgtatgtagggtggaacttcaaatgtacattttcaatttacagttgaagtcaagttgacctgtgacatcaccaaattgtaaaaacaacgtttaacaggcaactttccttaattttgatgactccgactctgaaataaaaataacttggaaaactgaaataagtgtccacttaaattttctgcctatggctgctaagaattagacccaacacaacaaacctgacgtgagctccttgtttgtcagtcgcatgaccgtgcttcagctgctacatcaatcattggagaccacctccctccctccctccctcctactgtcttctcctgcccaccaattgctggcggttgcatagggagtcttattttataaggttaaagttcacagtaagtatcaaaaaccacaacagagagcgcactgtttaagatatacctcaccactatttgagggaaactggtatcaacgatttggatgaggcatatcttaaatagtgcagcatctgttgtgatttttgtcacaagagttaaaactgtaattattgaagtgtcacctttaccgctgaggtggtgctctaaattctgcaatgtttttaacaatcatggtatttttaaaaaaaaaaaaatccgttttggctatctctaaatgcttaggggtgaattttaagttcaaagttcctatacattcctgacacacaaacagcattcataaatgttacttttcaaacgttacttaggctatgtcagtaagtattcactcaactaggaaaacaggttaaaaataaaaactgaaaacttgtattccacatagcctgttccctatctctagtcctcctggcagtttaagccacagttttgcctccacacagtttaagaattcagtcacctgcaagtgtgaaccatccaggtcagcaagctgaaggtaaatttcatgaagactaaataaatctcaaatttctaccaccaaattcctcatcaatttctcacagaacaaactttctggttgggtcccaccctggtcaggtgctaacttgcaacgtagctccaacctacccaatgctcccctcagctaatgctgaggccaccttcctaagtaaggggcccagggtggccccatcaacagatctgccgacatcggaaaagaagaggacgactgacatcaagtcacaccattcagaatctgtaaaacctgaggttttcctctgtgtttttctggagaagaagaaatgtcacaatttcaaatcaaagccaacactgcagtgaggagagcttttctactttattacaaagagaagaagcctttatgtggtcagaaaatacaagattgatctttttctcttcctatgaaacgctgctgttcaaacagccagagtgaattgtctcagttcacgtcttgaagccccatcacattcacttgggtatggatgtccttggctgctgaaaatctggccctttagtgcacagggcgacaaagtcccctgaccagcagttccagaatgtcccattttcatatattgcatccatgcacacctcctaaaaatgaggtacagcagggcaaacattttccaaaatagatgtcatatatataatatatacacattcgtacatacataccttta

SEQ ID NO: 69 - DNA, 26781 bp, Homo sapiens
ttgtgctgaactcccaaaatgtagcaagtccagcccctgccataggcccaggcttcgtgctccccacccttggcaagttctccccacccccagccccacagtttattaaatgtttgattttcaacctggccacgcttccttgccacagaggctgaaagcacccctgagctccaaggaaacacagcaagccctttcttaccctcgggagggataggagggacagcacatcggaagagcagtcacttgcctcagctgacctctgcccatctgaagccgcctctcccagagaatcccacaccccatgccctggtgtctcatcctttgctcctccccagctccttgaagcagaaggcagattgtagcctcctttttagagccaattctgtttacttcctaaagtacaaacctattttttttaaatatagatagggtctcactctgtcacccaggctggagtgcagtggggtgatcatagctcatcataacttctaactcctgggctcaagcaatcctcctgccttagcctcccaaagcgctgggattacaggtgtgagccactgcgccgagcccctaaagcaccaaatctgactcatcccttctctgcataaaaccatctcatggcgcccgctgcttgtcctcagggtcattctcacatttgtaggatccccccaccccccagatgccagatagagacaagatctggggttgcaaggtgcgcagggaaggcacccctcctgcatttgctgttctctctgtctggaagcatctctgcccggggggtcctcatacctccctctatttctacatagcgcatgctgggtttgcactttttttttttttttaagtatctttttccacatctgtcttcccaccaagcaaggggttctggacccccatgtaaatcaccatcagttacagggtgcaaacaccgtcatctgaagatgacttttgtctcttaacaaaatggagcgttgattcctgcgtgtagcttcgctcactcccttgcgtccaccagcctgctaggagtcgggcctcacccctgggctgccttcggagcttacctgtctcaggaacatccctcctcccgagcatgtgggagaaagagctgggagcccctcgcaaggcctgatggggcctctgtgtgctgcatgaagcacttcacttccacagtccccatgtgagtaactccagatgagggacagaggggtaaggctcgccccaggtcacactgtcacttagtgataggtggagttggactcagacctgtccccgtcccacctccctgtaccccctccccagacactgaggcctcagtgagccctctgaggtccagctcctaccttcgtaggtgttcacggcctccaggttcatggcgtgccggatcacgtgatactcgtcagaaatcccattcccccccagcatgtctcgggcctggcgggcgatgtccagggctttcccacagttattcctcttcagcagagaaaccatctcgggggcagccctgggagtggcacatgagggtaacaaggactggggatcctggcatcccgatgctccaagcaaacctagcccggggtggggattccctgatgcagccaagctcccaatgagggaccagtggggctgtcctcagcccagcccatcaaggacaagagggacagcagaaggttcaggtccccagggccaccaggcaggaaggacctttctctccaggaaggacacaaggtcctccagccaccgctgccatccccccgcccccaccacacagcccctacttgtcctggtccttcaagcggccgagctgcaggcaggcgtgaaggcccagggtaatctcagtgagcatgtctgccagcttcttctgaatcagctggttcctggccagtgggacaccaaactgcatcctacatgggcaatggcagggtaagagcgaggggaggcccactctcccaccccgtccctgtcctggggccccctgctccaggacgccttcccaggctgcctcagtgcccccaagcttgccctggccctgccgttgactcagcccacagctgctcagaaggacgtcactggtcattccagagcaaggaactcaggcctggtgggtgggggctggggagtcacccatggtatagagagtgaaacccaagctgccccacacccccagagaatctcactgcagccctcacacacctgtcgagggcgtactgccgggctgtgtgcaagcagaactccgaagctccaagcacgccccacgcgatgccgtaccgggcgttgttcaggcagccgaagggaccctgtagggttgagatggcgcctcaggcccacccaagagacaccaagagggcctatgcagaaccaactctgaagcagggaaagcctcctccccagccaccccacgcagggggactcaggttgtggttcacatcacagatggccctggcactgaagctcggtgcctgctcactcggtttgcacacagtcccacccagcctggcatctgggttcgatgctcagagccaggaggctgacggatgccagaagatgcactgtgagtcaaatgactgagctggttcaggcccatgtgtcccgggcagagccgggatgagcgagacggtcaccaaatgggggcagttttcagcacgtcagcgagtccggctgagtaagaatcaccactgtgtgggctccacaggcacagggagccgcgtccccagcacggagcctgcctgacaaagccgcatccgcaggtgacccaacacccattcccaaagtggctgccacttacccccaggctggatgcaccagggagcacattctcctctggcacctccacaccgtccatgatgatcatgcctgtggctgaggcccgcagcgagaacttgccctggatcctgggggccgagagaccccgcatccccttctccagcaggaagccccgaatgcagccatcttcacaccgagcccacactacaaacagatcggccataggcgagttcgtgatcctggggatggaacagtcggtgaggggtctgaccagtgcccctttgcccctgttcaccacctgcccaccacccagaacccttaccaggtcttggtcccattgagggtgtagctcttgttggatgagttgtagtgggctctggtctccatgctgctggggtcacttccgctgttgggctctgtgagcccgaagcagcccaggagctcccccttggctgcaggcacaagacaaagtcacaaggctgcctggtccctgatacatccccttactcaaaaattatcctcgtggcggggtgcagtggctcacgcctgtcatcccagcactttaggaggccaaggcaggtggatcaattgaggtcaggagttccagaccagcctggccaacatggtgaaaccccatctctacttaaaaaaaaaaaaaaaaaaaaatagccagatgtggtggtgggtgcctgtaatcccagctactcaggagactgaggcaggagaatcgcttgaacccgggcaggagaggttgcagtgagccaagatcatgccactgcactacagcctgggcaacagagcaagactccatctcaaaaaagaaaaaaaatccagcctgaccaatatggtgaaaccccatctctactaaaaatacaaaaaattaggccagtcgaggtggctcacacatgtaatctcagcactttgggaggccaaggcagatggatcacttgaggtctggagttcgagaccagcctggccaacatagtgaaacaccatctctactaaaaatacaaaaattagccaggcacgggtagcaagcacctgcaatcccagctaattgggaggccgaggcacaggaattgcttgaactggggaaccgcaggttgcagtgagccaagattgtaccactgcacttcagcctgggggacggagcgggactttgtctcaaaaaaagaaaaaaaaaattaccctcgcccctgagtcagacctcataactaagttagatctggccctgctttcaagagacaggttaccccaaagtcatgatcacaatgccaagatggggagggggacccagggaatcaggaaggagttggccaaactggaagggtgtgaggagttaagcaggaggaggctgtggggaagagcagtgctgggagagggaacagatgtgtaaagaactggtggtacttctggagaatttcaagtagctaagtctggctgggaggatcacatgagtggccagagatgaggtggaaaggtcagcagaggcctggtcacacagggccttgtgggtttttttttttttttgcgaatctgatcttatttgttactcaaaaaatcttatttctgactggattcagacttagaagtggaagctcgcagagaggacagtctgcgtctcttcacgatttgtccctggtgcttcttagcctccttcattctcttggccaaaagtttagcatattctgcagcctcttctttatttttcttaatatgcggctgcttcagagcaatacgccgctgtttgtgctgcaggacatgtggagtgacaaggcgctgaatcttgggtgctttggtcctaggtttcttaccttctttgtttaagggcttttttacaacatactggcagacatcattttctttagagagactgaaaagtttacggattctgctagctgtactgggccccaggtgacgaggcatcatagtctcagtcagtccaggaatacccttctctccttttttttacaataaccaagttgagaacactcagattggcatccacgatgcaaccatgaactgatcttctctttctttctccagttctccttggtctgtaataggaatgccccttactcagtagcaagtggacacggccatgggtcaagacaccctgtttcaaggggaaaccttgtttattgttcccaccactgattccgaccacgtaacccttccattcttcacccagagcgtcaacagcaacttctgtggccatacgcttctcataaaaagtacaaagtttgcgttcatcgtccacttcaatgagtttctggcagccagtggctgggaaggagatgttcagcttcatcttgaagcagctgaacacctccgagacaccacggaagagggccaacgtccacttagcgcaggtcacataggctctttcctttttttgtttttctaatagacatggggtctccttacgttgcccaggctggtttcgaactcttgggctcaagggatcttctcacttcaccctcccaaagtgctgggattataggtgtgagccactgcaaatggccagcaggaacctggtggactttaaactttgggctggactggggaacacagaaagcatagggagatgacggtggtcacagagggggacagtcaggctggccagggatcagatctccaggtgaagcccagggtctggcgggggtccaggtggccacttatgctatctttgagatagggacagaataggctcaggggacagccccacccttgagttccagacctcagagactgtcttccttccaccaggccccatgggcagccactcacccagctggggcaggtacttctgccgctgttcctcgctgccataggcatagatagggtgcatgacgagggaggactggacactcatcgccgacctgtagccactgtccacccgctccagctctcgggccaggagcccataggccacagacgaaaccccagcacagccatatcctggtggtagtaggaggggaaagcaggacaatagagaacagggccctgcccagctaagacccaagagacagggctgaataaggacacacaaggaggcaggcaccaagctggccctagctgaggtttattcatttcatctccacagccactttcagagggtgggacaacagccccactttacagactgggaaattgtggcttagggaaagaagggggctttcagtaaggcaagaggatcacttgagaacagcctgggcaacacagtgagaccctgtctctaaaaaaagaaacaaaggggccaggcacggtggctcacgtttataatcccagcactttgggaggccgaggtgggtggatcacctgaggtcaggagttcaagaccagcctggccaacatggtgaaatcccatttctactaaaaaatacaaaaattagctgggcgtggtggtgcacccctgtaatcccagctactcagaaggctgaggtggcagaattgcttgaacctaggaggaggaaactgcagtgagccaggatcgcaccactgtaatccagtaatccaggctgggtgacagagcgaaactccatctcaaaaaaaaaaaaaaaagaaaagggccgggcaacggtggctcacacctgtaatcaggaggctgaggcgggtggatcacctgaggtcaggagttcgagactagcctggccaacacggtgaaaccccacctctactaaaaatacaaaaattagccaggcgtggtggcggacgcctgtaatcccagctactcgggagcctgaggcaggataatcacttaaacccgggaggtggaggctgcagtgagccaagattgcatcactgcactccagcctggacaacaagagcgaaactccatctcaaaaagaaggctgaacgtggtggctcatgcctgtaatcccagcactttaggaggctgaggtgggcggatcacctgaggtcaggagtttgagaccagcctggccaacacagtgaaaccctgtctctactaaaaatacaaaaattagccaggcatggtggcacatacctgtaatcccagctactagaggggtggaggcaggagaatcgcttgagcctgggaggcagaatttgcagtgagccaagatcgtgccactgcactccagcctgggcaacagagccagactctgttgggggggaagaagaaaggaaagaaaaggaaaagaaaagaaagagaaggaaggaagaaagggagggagggaaggaggaagaggctttcagaatacagagggttctgcagtgtgtggagagatacttgttcctacctttgatggtggggcccagcacacccaactcccccatctccgaaatgatctcccgatgaaaaactgcaaagggaccagtgcccaaattcaggcccaggcctaggccacaggaagccccagccccaaggacagaggggccttgaggtggggtggctatggctccaggcggaggagcagtctcagggcacccaccagcccgcccaccttcgttgcgattggccaacaggatgcgaggcatgagtctctcctggcagtaggtgcggaaggtgtccctgatgaggatctcatctgtggtcagctgctcctccagcaccagcgggtcctgccagtcaaactcgggacgcgaggctgggaaggggaattcgcctcggtccagtccgcaagatcactgtgccctcccttctcggaccctcatcagccctaccccccaacacccatgtcgccccccggctagtgcgagctgcaagcgagactgatcaggtgacttttctccggccccgcaggcacagcgcactcactgccttagtgcctctgaccctggccacgaccctgccaccccgctcgggcagctctcggattctgggacagagtccacctgcggcagacagacagctgaacaggggcagcagacacacggtgcgaccagaggtccttacacttagccagttggctctgtgttctcccgcctttctctgcaagcacagaacgggaaagtcaccccggaaagtccctaaacccccagttcctccctccttccctccacactcccgaccccacactgaccggtctgcgccgccgacgagacccacgtgcgaaggacgtgcaggccgggtccgcggctcagcagccgcacggagacgcctctcagggccatgctctctcagagcgagcggagcaacgacggcgacctacaggagcgggggtgtcagagcggagctcctctcacccacggctggggctaccgcaccttccttacctggtagtacctcccggttcactgccgaggctacagtgcaactgacgcaggcctttgacctcagcaagaagtgggaggagcggaggccgagtgaggcttttcattggttcctcctagaatccggccccctccgcagctctgccttttaaaagggctaaggtagccttgcctgtggaaatcggggggcccagacagagataggctagcccctttaagaagcggacggggtaggggcggaagacgagtgcgggaaaccgattggccagctgggtttctcctcttattggccgtaggaaagggctcggcccactcctggttggtcagttgcagggggtgtgtgcggagggagtcaagaattaaacaaagaaattctggcgcgagcactaggcgtcctcctgaacccaggaggccagactcgagttctctaattgggtgctggttgtggggaagacgagctccaagtgggcgatcttagcaaacctttctgccagtctgtcccaggaagcacatgtagatacttgtgactctgtgtgtgtgtgtgtgtgtgtgtgtgtgtgtctgtgtctgtgtatgtgtgtgtgtgtgtgaacttgtgtgattctgtgagtctatgtggttgttttgttttgtttttgttttttctttttagacagggtctcgttctgtcgctcaggctggagtgcagtggcgcgatcatagctcactgcagcttccacctcctgggcgatcctcccacctcagcctccaagtagctgggaccactgaagcatgccatcatgcctggctaattttttttttttttttttttttttgagacggattctcactctgttgcccaggctggagtgcagtagcgcaatcttggctcactgcaacctctgcctactggattcaagcaattctcctgcctcagcctcctgagtagctgggattacaggtgtgagccaccatgcctggccttttttcttatatttaatagagacgggtttcaccatgttggccaggctggcctcaaactcctgacctcaagtgatccacccacctcggcctcccaaagtgctgggattacaggcgtgagccaccgcgccccgcctgttttgtctttttgtgtagtgcatttgtggtgcacccattctgattgtgtatctgttgagaaatgtgtgtgtcttgattctcaggacctgtgatgccatgtccttgcgtttgtctgtgtttaactgggtgcatcccctacggttgggcactggtagctatgcaactgtgactaaataattactttacatattgtaaaagtgaccggtggtgtgactgtataaagtgtaggttttgactggctggggcggctcatgcctgtcatcccagcactttgggaggccaaggagggtgggtcacctgaggtcaggaccagcctggccaacatggggaaaccccatctctactaaaaatacaaaaattagccaggcctgcttgtgggtgcctgtaatcccagcaactcgggaggctgaggcaggagaatcacttgaacccaggaggcagaggttgcagtgagctgagatcatgccattgcactccagcctgggcaacaagagtgaaactctgtctcaaaaaaaaaaaaaaaaaaaaaattagcgtggcgtggtagcaggcacctgtaatcccagctacttgggaggctgaggcagaggaatcacttgagcctaggaggtggaggttgcagtgagccaaaatcatgccactgcactccagcctgggtgacagagagagacactatctaaaaaaaaaaagttctgtgacaatgtatctgactccccatgtgtgtctgctcaattacggctaaattgtgtcagtaggattgtataactgtgtgcctgcctgtggattatgaattctgtgttttagagattgtttggctatgacattgtgtaaccaatatagcatagggttgtgttttagtgcctgggaattgtatgtctgtgcatagtccatatacatagacagacacacaattatatgtgcacggattatatgatcagtgtgactgagggaacaggaactcatgtcattatgtaattgcatggtcctgtgagtaactgtgtttttgtttttgtttttagagatgggatctcgctatgttgcccaagctggtcttgaactcctgggctcgagcattcctcctaccttggcctcccaaagtgctgggactgcaggcatgagccactactcactgctccaagcctgttttgtttttgttttttagagacagaatctcactctgtagcccaggctggagtgcagtggcatgatcttggctcactgcaacctctgcctcccaggctcaagtgattcttgtgcctcagcctcccgggtacctgggattagaggtgtatgccaccatccccggcctatttttatatttttagtagacagggtttcactgtgttggccaggtttgtctcgaactcctggcctcaggtgatctgcctgcctcggcctcccaaagtgctgggattactagcgtgagctactgcgcctggccccatgcctccaagtttcaaccagttctccagctcagcctcccaaatagctgggattacaagcatgtgccacaatgcccagctaatttttgtatttttagcagagagagggcttcatcctgttggccagtctggtctcgaactcctgacctcaagtgatctccccaccttggcttcccaaagtgctggggttacaggtgtgaaccaccgcacctggccttgtttttgtttgtgtcacccaggttgatctgccaggaataaagatggccacccaacttttttttttttccagcgacagagtcttgctttctgtgccccaggctggactgcagtggtgtgattatagttcagtgcagtcccgacctcctgggctcaggcaatcctcccacctcagcctcctgagtagctgggactatgggcatgcaccaccactcacagctttttgttggagagataggttttatgttgcccaggctggtcttgaaatcctggtgtcaagtgatcctcctgcctcagtcttccaatgagtgactatgagttatgtgtctgtaatacgtatccatgtccccttcccaggctcccagggcaccagagtggaggttcctgttgtagaaactcagatcctctcctcatgttgggcagaatcaaggagcagccaggcccagagccagggcactggtctcctgcaggtcaggtactgcctgtggcttgatccaacggtcctatcccacccaggaggagagagggtcacttttcccttggctgcccccatcgcactaaagcagctggcactgaaccagcctccatgcagtcccatgcagtgccacccaagggtccccagtagacaatggtgggccagttgtcaggggcttcctcctgctgcagggctgagaccctgggaggtcccaacccaggcaaattgaacgccaggctaatttgaagacccaactcccagccctccccttcaccggaggacagagctctagctggcctgggcccccacctgatagcagcctccaacgtctggggtgtctgataatgcttggcggggagctcgtgccaagtcccgccatcagcacggttgttgctgtttactggggagggggagggctgtggagcctcaatcagggggacagggggtcccacagcttcttcccagaataccctttctgccttttccaggaaagttaactgagggaagacccccaagtctctccttctttggagacccaatgtctgtttttacccagcacctggaccctcaaaccctgaaccccccaacccttgatatttgacttggctttggacacagggttagtctttaaccccagccccagacaggccaacgtgaagtttgtgccccagaaacagtgcccccccgccgccttgccttgctttgccttatcagaggctgcagccaatcagctaaggacagagaggagccctcgaaggggctatcacagcctcagagttcacgaggcagccgaggaagaggaggcttgaggcccagggtgggcaccagccagccatggccacagccgagaccgccttgccctccatcagcacactgaccgccctgggccccttcccggacacacaggatgacttcctcaaggtggggcctagaaggtggggtctaggtgggctggctggaatccagggccacagtcacagatcttggggtccagacctgcatcttgacctgaaatcaagagacttaaccaggactgaggtacgctcagtccaggagaggagatctcagcttagtctggcagggggtgaggagggtggtctaggggtttgaggttctaagtgtgatctatttcggtaatagaaaacgaaggtagcctgggcaacatggtgaaaccctatctctacaaaaaataccaaaaacattaggccaggcatgggggcgtgtgcctgtagtcccaggtactccgtaggctgatgcaggaggatcattagagcccaggagattaaggatacagtgagctgcaccactgcactccagcctgggcaaaagagtaagaccctatctcaagaaaaaaaaaaaaaaaaaggaacgagatctaggctcacagacaatcttccagatatcagcgggaaatgatgagtgtgtctgggggacatccaaaatttcggaattaatcttgttttgggagacagggaaggagagggatgttctgggggaaaactaagtcaaggctggcatcctctcccccgtcccctgccagttttccatctccagcagctctgctaccccttcccccatccccgagtgtggttccagatagtggaagtcttatctcctgtctccagccagacctgatcggtttctgtccctggagctggggggggagcggggagaggggcggttagaggggcagtgttggggaagtgggacagacagacaggcaaacaagacccctttccaaagcctctgcgtcagagtgtccagcccgcgatgtccctgggcagggcaccccagtgtccaccgaacctcgagctgcctgctccctcccgcagtggtggcgctccgaagaggcgcaggacatgggcccgggtcctcctgaccccacggagccgcccctccacgtgaagtctgaggaccagcccggggaggaagaggacgatgagaggggcgcggacgccacctgggacctggatctcctcctcaccaacttctcgggcccggagcccggtggcgcgccccagacctgcgctctggcgcccagcgaggcctccggggcgcaatatccgccgccgcccgagactctgggcgcatatgctggcggcccggggctggtggctgggcttttgggttcggaggatcactcgggttgggtgcgccctgccctgcgagcccgggctcccgacgccttcgtgggcccagccctggctccagccccggcccccgagcccaaggcgctggcgctgcaaccggtgtacccggggcccggcgccggctcctcgggtggctacttcccgcggaccgggctttcagtgcctgcggcgtcgggcgccccctacgggctactgtccgggtaccccgcgatgtacccggcgcctcagtaccaagggcacttccagctcttccgcgggctccagggacccgcgcccggtcccgccacgtccccctccttcctgagttgtttgggacccgggacggtgggcactggactcggggggactgcagaggatccaggtgtgatagccgagaccgcgccatccaagcgaggccgacgttcgtgggcgcgcaagaggcaggcagcgcacacgtgcgcgcacccgggttgcggcaagagctacaccaagagctcccacctgaaggcgcatctgcgcacgcacacaggtgagggggcggggccccggacatgagaaagggcgcggcgcccgctgtagttacaggggaagaagggttgcagagggcgggacttggacttggctggcctctgagagtgagtgcctccttaaattttgtgccctaggggcctcactttgttcatcctagtcccagcccaggctgagtaaaggggtgtggccagatgcaggggacccggggacatgactgggcagacagtggcgcttatggcttccttgtcccctaggggagaagccatacgcctgcacgtgggaaggctgcggctggagattcgcgcgctcggacgagctgacccgccactaccggaaacacacggggcagcgccccttccgctgccagctctgcccacgtgctttttcgcgctctgaccacctggccttgcacatgaagcgccacctttgagccctgccctggcacttggactctcctagtgactggggatgggacaagaagcctgtttggtggtctcttcacacggacgcgcgtgacacaatgctgggtggttttcccacgaatggaccctctcctggactcgcgttcccaaagatccacccaaatatcaaacacggacccatagacagccctgggggagcctcttacggaaaatccgacaagccttcagccacagggagccacacagagatgtccaaactgtcgtgcaaacccagtgagacagaccgccaaataaacggactcagtggacactcagaccagctcccagatggccctggacagcaggagagggtgtgggatgaggcttcccagagaccctgggtctagaaagcggctcctgaaggtcccttattgtggctgatattaactgtcaatggttatgggtcctataaaaatgcccctcccagataaagcttcagcgttggcctgaatttttgggttttggaggctggaagatggcaggaggctgtaaacctagaggtcatattagagggccttacacaccctcatctcctaaactacagtgacacccctcaactccaacaagcccccttgggcactggaggccttgctgtcctctcttttcccacccagttcaggctacactgtccttgtcttctgccttgaaccctgcggacattgacagcaaacatctccctggatttaagagttcacagcctatgactgcccagggggttcatcttgcccactgtccagatagagccaatttatcgagacagagggattgcaatagagagagtttaatccacatacatccagctaaatgggagatgggagttttattacttgaatcagcctccctgaaaattcagaggctagggttattcaagaacagtttggtgggcaggagggctagggaatgggtgccttgctgcaatcctggagctgtggaaaacagttgctgagtcagcttctgggtggggaccatagagtcgctagtctgggtggagtcatccagttgtcagatatgcaaaaagcctaaaaagacatctaaaaaggccagcgttaggttttgcaatagtcatgttatttgcagaaataactggggaagttgcaaaccttgtgacctccagaataatggctggccatctttgtttttgtttttgagatggagtcttgctcttgcccaggctggagtgcagttgttccatcttggctcactgcaacctctgcctcctgggttcaagtgattctcctgtgtcagcctaccaggtagctaggattacaggcacatgccaccatgccgggctaatttttgtatttttagaagagatggggtttcgaaatgctggccaggctggtttcgaaatcctgacctcaggtaatctgccagcctcggcctctcaaagtgctgggattacaggcgtgaggcaccgcacccggccggaaaaatggctggtcataatttaactactacacctacagtttagcagaattcaggctcctctcatcctcctaacctagtgccctttcattatttctacaaaggcagtttagtttggggaagggctattatcatttaagctataaactaaattcctcccaaaattagcttggggccaggcatggtggctccctctttaatcccagcaatttggcaggctgaggcgggcagatcacttgagcccaggagttcgacaccagcctgagccccaaggtgaaaccccatctctaccaaaaatggtgaaacccagtctctaccaaaaatacaaaaattagctgggcatgtggcgcatgcctgtaatcccagctactcaggaagctgaggcaggaggattgcttgaacctaggaggcggatgttgcagtgagctgagatcacaccactggactccagcctgggcgacagagtgagacaacgtgtcaaaaaaaaaaaaaaagttagcttgaccccactccaggaatgaccaagcaagggcagtttggagattaaaggcaagatggagttggttaggtcagagctctttcactgacataattttctgtcataatttttgcaaaggcagtttcaagccagtactcagattcccatagccctttgccctgccatgatcctttgaggctgaggtgggagaatcacttgaaccccggagttccagagcagcctgggcaacatagtgagaccctcatctctgcaatgaacaattatctgggtgtggtggcacaggcctgtagtaccagctacctgggaagatctcttgagcccagtaggttgaggctgcagtgaactgtgatggagtcactgcattctagcctgggtgagaaaccattatcctgtctcaaaacgacaaaaaacaaacatacagtcacctctttgctagctcaggggatcctggagaaaacgtgcagaatgaaaaaggagagtctgggtggcgtggattacatgcctgtaatcccagcactttgggaggcaagacaggtggatcccttgagctcaggagttcagcctgagccacatggtgaaaccgtgtttcaaaaaaaaaactacaaaaattagctgggcatagtggcatgtgcccgtgatcccagctactcgggaggctgaggtgagaggatcacttgagctggggaggcagaggttgcagtgagccaagattgcgccactgcactccggcctgggcaacagagcgagatattgtccgggaaaaaaaaaaaaaaaaaaggaaggaaaaaaaaaaagaaagaaaaaggggaagatacactggaacacaaatgcttcttaaggggcgcagtggctcacttctgcaatcttggcactttcgggggccgaggctggtggatcacgaggtcaggagttcgagaccagcctagtcaacatggaaaaaccccgtctctactaaaactacaaaaattagccgggcgtggtgtcgggcgcctgtaatcccagctactcgggaggctgaggcaggataatcgctttaatcaggaaggcggaggttgcagtgaaccgagatcgtgccattgcactccagcctgggcgacaagagtgaaactccgtctcaaaaaaaaaaaaaaaaaaaaaaaaaaaaaaagaggaagaacaaaggtcccaagagttggacccaggttgtagggctggaataaaaaataaaatacaaacttgtgcctgatccagaaacccgggcgggagttgggtcagacagaagagcgtgggctgggattagctaccacgaaaaggaacggtggccaggctccaggagacgctggagcgccgggcccgtcgtgggcgtggtctgggcagactcagcgttgccttttgcctctccaaaacgcagcatcgcgtctcgggggaggagtctgtaccctcgtgatgtccccgccccggttcccaggcaagtttagggaagtgaaaggcgccaggtgccagtcctggcctctgatgtaacccagcgccccgcagtcccgacacagattcctggatctcagccccatagcagctatgatcccgctgctgctggcagcgctgctgtgcgtccccgccggggccctgacctgctacggggactccgggcagcctgtagactggtgagtgcgcagcggggggcctaccatcgccccggggtccggctgcggtcactcaaccgggatggctacctcctcggggaaccctggggtgccttctcttccctctctcctatttctgtgcattctccgacctccaggttcgtggtctacaagctgccagctcttagagggtccggggaggcggcgcagagagggctgcagtacaagtatctggacgagagctccggaggctggcgggacggcagggcactcatcaacagcccggagggggccgtgggccgaagcctgcagccgctgtaccggagcaacaccagccaggtgaagggggccccgggccaactaggggcgaaactctagggctgccctgcctgggaggaatttcacgttgcctccgtttatccgcccgcagctcgccttcctgctctacaatgaccaaccgcctcaacccagcaaggctcaggactcttccatgcgtgggcacacgaagggtgaggcctggattgggggctggggagagactcgggtcccatttttccaaggtaacccctgacgtgcatggggtggtcggggagatctgcactgtcagaccctgggcatctattccccccaacttttttttttctttgtttttgagacggtgggagttcgctctgtcacccaagctggagtgcagtggcacaatcttggctcactgcaatctctgcctctggggttgaagcaattctcctgtctcagcctcccaagtagctggtattaaaggcgcaccatcacaccaggctaattttcatatttttagtacagacgaggtttcaccatgttggccaggctggtctcgaactcctggtttctacctcaagtgatctacccgccttggcctcccaaagtgctgggattacaggaatgagccaccctgcccagccgagttcctatgcatttttccaagctaacccctgacctccatagtggggtgggagatctcccctgtcagaccttgggcatctatttcccctattttattttcttttagacaaggtctcacccagtcacctaggctggagtgcagtatcacagctcactgcagccttgacctcccagggctcaggtgatcctcctacctcagcctcccaagtactgggcctgccggtaccccccaccacgcctggctttttttttttttttttttttttgcggcactctctctccatcacccaggctggagttcggtggtgcaatctcagctcactgcaatctccatctccccagttcaagcgattcttctgcctcagcctctggagtagctgggattacaggtgtgcgccaccatgcccagctaaatgttgtatgttttagtagagatggggttttaccaggttggacaggctgatattgaactcctgacctcaggtgatccacctgccttggcctcccaaagtgctgggattacaggcgtgagccaccacacctggcctactttttgtatttttgtagagtgggcttttgccatgttgcctaggctggtctctaagtcctggttcaagcaatccacccaccttggcctcttaatgtgctgcgattaccggcatgagccgccacacctggcctgtttccctaccttacattactcttggcgttattctggactataagaatttatgcctgcaaaaactgagctcagctgtggttctaacactgctggcaccctctctaagccccgctgcaaactgagggtgttcctgattgcagatgagcttgctgggaggcctggagcaataccctctaattgccttttttttttttttttttttgagaaggagttttgctcttgctacccaggctggagtgcaatggtgcaatctcggctcactgcaacctccgcctcctgggttcaagtgattctcctgcatcagcctcccgagtagctgggattacaggcatgcaccaccatgcccggctaatgttgtatttttagtagtgatgaggtttctccatgttggccaggctggtcttgaactcccgacctcaggtgatccgccctcctcggcttcccaaagtgctgggattacactgcgtggggcctgccttctttttttaaatttttatttatttatttatttatttatttatttacttacttacttacttatgtttgagatgaaattttgctctgtggcccaggctggagtgcagtggtggatctcagctcactgcaacctccacctcctgggttcaagcgattctcctgcctcagcctcctgagtagctgggattacaggcgtccaccaccacgctcagctaatttttgtatttttagtagagatggggtttcgccatgttggccaggctgatttctaactcctgacctcaggtgatctgtgtgtctcggtctcccaaagtgctgggattacaggcgtgagccactgcgcccgacctcccctaatgccttcttttggtccaggtgtcctgctccttgaccacgatgggggcttctggctggtccacagtgtacctaacttccctccaccggcctcctctgctgcatacagctggcctcatagcgcctgtacctacgggcagaccctgctctgtgtgtcttttcccttcgctcagttctcgaagatgggtaagtcgagtcagggacacaggatgagtcctgggtttactgaccagaacctggaacgatcttgcatttcctcctccccttgtcctccaggcaagcagctgacctacacctacccctgggtctataactaccagctggaagggatctttgcccaggaattccccgacttggagaatgtggtcaagggccaccacgttagccaagaaccctggaacagcagcatcacactcacatcccaggccggggctgttttccagagctttgccaagttcagcaaatttggagatggtgagtctcaaggttgagggttggagagctccttctctgcagacagggtgactggtgtggccatggctgagttcaagtcagcggtagagaccaggtctgtttgggagctataatcacatgatcagtgaacagacctgggttcaaaccctgggttttgctgtgtgatgtataacttcacctgagccttggtctactcatctgaaaaatggggatactgacatctacttaaaaaattgtgaatgaagtggtacctgtaagtcatttgggtgccagaggtggtgcctcactcctgtaatcccagttacttaggaggctgaggcaggaggatcatttgaagacaggcatccaagacaagcctgggaaacatagcaagacctcatctctacaaaattaaaaattagccaagcaacttgggaggctgaggcaggaggataaattgagcccagagtttcagactgcagtgagctataatgactccactgcactccagcctgggtgacagagcaagaccctgtctttatttaaaaataaataaataggctgggcacagtggctcatgcctgtaatcccagcactttgggaggctgaggtgggcagatcacgagctcaggagatcgagaccatcctggctaacacggtgaaaccctgtctctactaaaagtgcaaaaattagccaggcatggtggcgggcacctgtagtcccagttactcgggaggctgaggcaggagaatggcgtgaacccggaaggtggagcttgcagtgagtcaagatagtgccactgcactccagcctgggtgacagagtgagactgtgtctcaaaataaataaataaataaataaatacaaataaataggccaggcacagtggctcacacctgtaatcccagtcgaggcaggaggattgcttgagcccaggagtttgagaccagcctgggcaacacagcgggaccccatctctacaaaaaaaattttaattagtggggcatagtggcacacacgtgtagtccccactactcaggaggctgaggtgggagaacagcttgagcccaggaggtcgaggctgcaagtgagtcatgatcctgccactgcactccagctggggtgtcaaaatgagacccagtctcaaaataaataagttaattaattaaaaacactcagggccggacgcggtggctcacctgtaatccccacattttgggagaccaaggcgggtgggtcacttgagcccaggagttcaagaccagtctggccaacatggtgaaactccatctctactaaaagtacaaaaattatctgggcatggtggagggcgctggctgattacacggtcaggagtttgagaacagcctggccaacatggtggaaccccatctctactaaaagtacaaaaattagccgggtgtggtggcgggcacctgtaatcccagctactcaggaggctgaggcatgagaatcgcttgaaaccaggaggcagaggttgcagtgtgccgagattacaccactgcactccagcctgggcgacagagtgagactctgtctcaaaaacaaatttgggaagggcaattaatattaatgtcatcattcccaggactgggaattgacaactgagctcagaaatatggaaactgtggcagggcgcggtgacacacacctgtagtcccagcattttggaagaccgaggtgggcggattgcttgagatcaggagtttgagaccagcctggtcaatatggtgaaacccctctttattaaaaaattagccgggtatggttgtgcatgcctgtagtcccagctactcagaaggctgaggcaggagaatcacttgaacctcggaggcagaggttgcaatgagcctagattgcaccaatgcactctagcctgggcgacagagcaagactccatgtcaaaaaaaaaaaaaaaaaaggaaatatggaaactgagctgagagaggggaagtggactagggactccctcgcagtggccctgaccctacctgtgccctctctccatcctttgcagacctgtactccggctggttggcagcagcccttggtaccaacctgcaggtccagttctggcacaaaactgtaggcatcctgccctctaactgctcggatatctggcaggttctgaatgtgaaccagatagctttccctggaccagccggcccaagcttcaacagcacagaggaccactccaaatggtgcgtgtccccaaaagggccctggacctgcgtgggtgacatgaatcggaaccagggagaggagcaacggggtgggggcacactgtgtgcccagctgccagccctctggaaagccttccagccgctggtgaagaactaccagccctgtaatggcatggccaggaagcccagcagagcttataagatctaacccttatggccaggtgcagtggctcacgtatgtaatcccagcactttgggaagccaaggagggaggatcacttgaactcaggaattcgagaccagcctgggctacatagtgagaccacatctctactagaacttaaaaaaagttagccaggcacggtgataaatgcctgtagtcccagccactgaagccagaggatcgattgaaccagggagatcatggtcacagtgaactatgattacgccaacctgggtcacatagcaagactctgtttcaaaaaaaaagggggggcgggggacgggtgggtgcagtggctcacatctgtaaccccagcactttgggaggctgagatgggcagatcacttgaggtcaggagttcgagaccagcctggccaacatggtgaaaccccatatccattaaaaatatttaaaaattagccagacatggtggcacgcgtctgtggtcctagctcctcgggaggctgaggcaggagaatcgcttgaactcgggaggcagaggttgtcatgagctgagctaacaccacggcacttcagcctgggtgacagaatgagactctgtgtcaaaaaaataaaaaataaaaaatctaagggctcaggaaccagtttggacttgattttgaatcccagttcatccccttcctagctgtatgaccttgattgtgtgccttaaccgctctgtgacacagtctacctgtctgcaaaatgggaaacataatacctgccatcaggattgttgaggagtaaataaatggaaattggtggacgaggctgttaaccttctcttcaggtgggcgctgggacacaagagcatcgcagcttcaattctccccctaaaggtttgggggcagttggtgcagaggtgagaccagaagtgggaccacaggaggtgtctatccaaaattccctccactctccatggtaaccagaactggagtcccacctcccaaaaagcacctgggcatgggggtggggtcgtgtgatgtctcgccttgcctggagaggagtgagccccagaaaactcacgcagcacggacgcactttatttatatgtgtacatatgtatacggaggctgtacagcgcggggccgatgacccccttggctatggtcccgggggtgcgggactggacactccttttttggtcaggcctgctgggggcacagcttcagcagggcaccgggaggtcagccccacttgaggcttggtgcctgagcccaagagggatgcgggtgggactggggtcactgcactgctgggtgcactgcacttcgctggggctagggagggtgtctggggctccggggagagctttggggaggcgggcttggagcgaggaccgctcagcgtggtgcgctcctccaccacctccaacacccagcgctcccggccccggggggcctcgggcacggaaggcgccaggggtgcgggttcctgcaaccccttggagtccgcgcccagaggctgaggcaccacagccttagccccgggccgcgcaggctctacgacaatgggtaccaggggtgtgcccgcctcgccagagctgctgcgccggcctgtctcgtgttcctgcaccgggctcagcgccgccttggccacagccctggccatcccgccagtgccatcctccgtctgcacgctctgatgccgcgtgcagccgacgtcccgctccagggtccggccaccgggggtcgtcgcgcggggtggggtgcacgcctcggcgccccccggggattccttctccttgctcgacactggtggcctggaggcaccctcgggcagcaacgggtccgcgcccaggctcaaaggtgactcctgtcggcccaggcggcggacggcgacctgccggggcgcgccaaggccctcgactgggggcgtctcaccgtcggactcggcaaggctatgcagcgccagctcgccatggaagtccttgcggaaatccgggtggcccacctcgaggctgtgtttgcgcagcgcgcccttcttgtccgcactcaaagaggctcccagcttctcggccgactgcacgcgcttgaggagcggcgagcgagggggctcggcactcttggggcgcgggcgcacgacgggaggcgatgagtgcagtttggccgggaagctctgagtagtgtgcgagctgcccaccgtgtggcccggcagtggcggcggtgacgcctgcgtgggggacggcgtgtgtgccagcggcgatagagggatgttgccggccgacttgcatcgcgcagagcggtactggcgatggagctttggcgacagtccgtgcagcgtgctgggccgaatgtggtgcgacgccgacgacgcaggcgagttgggcgtgctcgaggctggggagctgctctgggatgaggcgcctgcgggagacaggaggtgaagcgagtgagtacagcccaagcaccagccaggccaccccgcgctgctcggtccccgcgcaggtgcaggaggtaatacctaggtaggcggagtcaggcgtggagcggtagctgtgcgtgggcgagcgcgccggcagcccgtgcgtaggcgagcccgggagactatcgctggatgacagcgagcggttcagcgacgacagcgagcggctagtatgcagcaggttcgactgcttcgtgatcttccggaagagggagctgcgcttcttgctgcgggacagggagggggccaagcgtccttgacctggacgccagagctcagggctcctcccatttcacggcctcacaacggtaaccacccaccccttctggcccttccctctccagctacaacccacctatcaagataaagaacttcctttagctcagtgctgcttggctcctcccacttcagtccccacccaccccctttggccactcctagtccaagctagaaacaagcatccaaacaaaaccaacctgttctgccccgcccacctctctagctcctccctcttccactacaatccacctatcaagatagaacttcctttagctcctcctacttcaggccccgcccaactttaggccactcccaattctggctacaaacactcatccaaacaaaaccatttttttttttttttttgagacgaagtttcgctcttgtcgcccaggctggagtgcaatggcacgatctcggctcactgcaacctctacctcccgggttcaagcgattaccgtgcttcagcttcgtgagtagcctcctgagtaggtgggactacaggagtgagccaccactcccagctaatttttgtatttttagtagagatggggtttcaccatgttggtcaggctggtctcaaactcctgacctcaggtgatccacccacctcggcctcccaaagtgctgggattacaggtgtgaaccacctcgcccggccaaaaacaacctcttctagtcctgcccacccctctagtccctccgtctttcactacaacccacctatcaagacagaacttcccttaactcagtgctgcttggctcctccctcctcccacttcaggtcctgcccaaccttttggccactcccagtccaggctagaaacacatccaaacaaaaccaacttg

SEQ ID NO: 70 - DNA, 26781 bp, Homo sapiens
caagttggttttgtttggatgtgtttctagcctggactgggagtggccaaaaggttgggcaggacctgaagtgggaggagggaggagccaagcagcactgagttaagggaagttctgtcttgataggtgggttgtagtgaaagacggagggactagaggggtgggcaggactagaagaggttgtttttggccgggcgaggtggttcacacctgtaatcccagcactttgggaggccgaggtgggtggatcacctgaggtcaggagtttgagaccagcctgaccaacatggtgaaaccccatctctactaaaaatacaaaaattagctgggagtggtggctcactcctgtagtcccacctactcaggaggctactcacgaagctgaagcacggtaatcgcttgaacccgggaggtagaggttgcagtgagccgagatcgtgccattgcactccagcctgggcgacaagagcgaaacttcgtctcaaaaaaaaaaaaaaaaatggttttgtttggatgagtgtttgtagccagaattgggagtggcctaaagttgggcggggcctgaagtaggaggagctaaaggaagttctatcttgataggtggattgtagtggaagagggaggagctagagaggtgggcggggcagaacaggttggttttgtttggatgcttgtttctagcttggactaggagtggccaaagggggtgggtggggactgaagtgggaggagccaagcagcactgagctaaaggaagttctttatcttgataggtgggttgtagctggagagggaagggccagaaggggtgggtggttaccgttgtgaggccgtgaaatgggaggagccctgagctctggcgtccaggtcaaggacgcttggccccctccctgtcccgcagcaagaagcgcagctccctcttccggaagatcacgaagcagtcgaacctgctgcatactagccgctcgctgtcgtcgctgaaccgctcgctgtcatccagcgatagtctcccgggctcgcctacgcacgggctgccggcgcgctcgcccacgcacagctaccgctccacgcctgactccgcctacctaggtattacctcctgcacctgcgcggggaccgagcagcgcggggtggcctggctggtgcttgggctgtactcactcgcttcacctcctgtctcccgcaggcgcctcatcccagagcagctccccagcctcgagcacgcccaactcgcctgcgtcgtcggcgtcgcaccacattcggcccagcacgctgcacggactgtcgccaaagctccatcgccagtaccgctctgcgcgatgcaagtcggccggcaacatccctctatcgccgctggcacacacgccgtcccccacgcaggcgtcaccgccgccactgccgggccacacggtgggcagctcgcacactactcagagcttcccggccaaactgcactcatcgcctcccgtcgtgcgcccgcgccccaagagtgccgagccccctcgctcgccgctcctcaagcgcgtgcagtcggccgagaagctgggagcctctttgagtgcggacaagaagggcgcgctgcgcaaacacagcctcgaggtgggccacccggatttccgcaaggacttccatggcgagctggcgctgcatagccttgccgagtccgacggtgagacgcccccagtcgagggccttggcgcgccccggcaggtcgccgtccgccgcctgggccgacaggagtcacctttgagcctgggcgcggacccgttgctgcccgagggtgcctccaggccaccagtgtcgagcaaggagaaggaatccccggggggcgccgaggcgtgcaccccaccccgcgcgacgacccccggtggccggaccctggagcgggacgtcggctgcacgcggcatcagagcgtgcagacggaggatggcactggcgggatggccagggctgtggccaaggcggcgctgagcccggtgcaggaacacgagacaggccggcgcagcagctctggcgaggcgggcacacccctggtacccattgtcgtagagcctgcgcggcccggggctaaggctgtggtgcctcagcctctgggcgcggactccaaggggttgcaggaacccgcacccctggcgccttccgtgcccgaggccccccggggccgggagcgctgggtgttggaggtggtggaggagcgcaccacgctgagcggtcctcgctccaagcccgcctccccaaagctctccccggagccccagacaccctccctagccccagcgaagtgcagtgcacccagcagtgcagtgaccccagtcccacccgcatccctcttgggctcaggcaccaagcctcaagtggggctgacctcccggtgccctgctgaagctgtgcccccagcaggcctgaccaaaaaaggagtgtccagtcccgcacccccgggaccatagccaagggggtcatcggccccgcgctgtacagcctccgtatacatatgtacacatataaataaagtgcgtccgtgctgcgtgagttttctggggctcactcctctccaggcaaggcgagacatcacacgaccccacccccatgcccaggtgctttttgggaggtgggactccagttctggttaccatggagagtggagggaattttggatagacacctcctgtggtcccacttctggtctcacctctgcaccaactgcccccaaacctttagggggagaattgaagctgcgatgctcttgtgtcccagcgcccacctgaagagaaggttaacagcctcgtccaccaatttccatttatttactcctcaacaatcctgatggcaggtattatgtttcccattttgcagacaggtagactgtgtcacagagcggttaaggcacacaatcaaggtcatacagctaggaaggggatgaactgggattcaaaatcaagtccaaactggttcctgagcccttagattttttattttttatttttttgacacagagtctcattctgtcacccaggctgaagtgccgtggtgttagctcagctcatgacaacctctgcctcccgagttcaagcgattctcctgcctcagcctcccgaggagctaggaccacagacgcgtgccaccatgtctggctaatttttaaatatttttaatggatatggggtttcaccatgttggccaggctggtctcgaactcctgacctcaagtgatctgcccatctcagcctcccaaagtgctggggttacagatgtgagccactgcacccacccgtcccccgccccccctttttttttgaaacagagtcttgctatgtgacccaggttggcgtaatcatagttcactgtgaccatgatctccctggttcaatcgatcctctggcttcagtggctgggactacaggcatttatcaccgtgcctggctaactttttttaagttctagtagagatgtggtctcactatgtagcccaggctggtctcgaattcctgagttcaagtgatcctccctccttggcttcccaaagtgctgggattacatacgtgagccactgcacctggccataagggttagatcttataagctctgctgggcttcctggccatgccattacagggctggtagttcttcaccagcggctggaaggctttccagagggctggcagctgggcacacagtgtgcccccaccccgttgctcctctccctggttccgattcatgtcacccacgcaggtccagggcccttttggggacacgcaccatttggagtggtcctctgtgctgttgaagcttgggccggctggtccagggaaagctatctggttcacattcagaacctgccagatatccgagcagttagagggcaggatgcctacagttttgtgccagaactggacctgcaggttggtaccaagggctgctgccaaccagccggagtacaggtctgcaaaggatggagagagggcacaggtagggtcagggccactgcgagggagtccctagtccacttcccctctctcagctcagtttccatatttccttttttttttttttttttgacatggagtcttgctctgtcgcccaggctagagtgcattggtgcaatctaggctcattgcaacctctgcctccgaggttcaagtgattctcctgcctcagccttctgagtagctgggactacaggcatgcacaaccatacccggctaattttttaataaagaggggtttcaccatattgaccaggctggtctcaaactcctgatctcaagcaatccgcccacctcggtcttccaaaatgctgggactacaggtgtgtgtcaccgcgccctgccacagtttccatatttctgagctcagttgtcaattcccagtcctgggaatgatgacattaatattaattgcccttcccaaatttgtttttgagacagagtctcactctgtcgcccaggctggagtgcagtggtgtaatctcggcacactgcaacctctgcctcctggtttcaagcgattctcatgcctcagcctcctgagtagctgggattacaggtgcccgccaccacacccggctaatttttgtacttttagtagagatggggttccaccatgttggccaggctgttctcaaactcctgaccgtgtaatcagccagcgccctccaccatgcccagataatttttgtacttttagtagagatggagtttcaccatgttggccagactggtcttgaactcctgggctcaagtgacccacccgccttggtctcccaaaatgtggggattacaggtgagccaccgcgtccggccctgagtgtttttaattaattaacttatttattttgagactgggtctcattttgacaccccagctggagtgcagtggcaggatcatgactcacttgcagcctcgacctcctgggctcaagctgttctcccacctcagcctcctgagtagtggggactacacgtgtgtgccactatgccccactaattaaaattttttttgtagagatggggtcccgctgtgttgcccaggctggtctcaaactcctgggctcaagcaatcctcctgcctcgactgggattacaggtgtgagccactgtgcctggcctatttatttgtatttatttatttatttatttattttgagacacagtctcactctgtcacccaggctggagtgcagtggcactatcttgactcactgcaagctccaccttccgggttcacgccattctcctgcctcagcctcccgagtaactgggactacaggtgcccgccaccatgcctggctaatttttgcacttttagtagagacagggtttcaccgtgttagccaggatggtctcgatctcctgagctcgtgatctgcccacctcagcctcccaaagtgctgggattacaggcatgagccactgtgcccagcctatttatttatttttaaataaagacagggtcttgctctgtcacccaggctggagtgcagtggagtcattatagctcactgcagtctgaaactctgggctcaatttatcctcctgcctcagcctcccaagttgcttggctaatttttaattttgtagagatgaggtcttgctatgtttcccaggcttgtcttggatgcctgtcttcaaatgatcctcctgcctcagcctcctaagtaactgggattacaggagtgaggcaccacctctggcacccaaatgacttacaggtaccacttcattcacaattttttaagtagatgtcagtatccccatttttcagatgagtagaccaaggctcaggtgaagttatacatcacacagcaaaacccagggtttgaacccaggtctgttcactgatcatgtgattatagctcccaaacagacctggtctctaccgctgacttgaactcagccatggccacaccagtcaccctgtctgcagagaaggagctctccaaccctcaaccttgagactcaccatctccaaatttgctgaacttggcaaagctctggaaaacagccccggcctgggatgtgagtgtgatgctgctgttccagggttcttggctaacgtggtggcccttgaccacattctccaagtcggggaattcctgggcaaagatcccttccagctggtagttatagacccaggggtaggtgtaggtcagctgcttgcctggaggacaaggggaggaggaaatgcaagatcgttccaggttctggtcagtaaacccaggactcatcctgtgtccctgactcgacttacccatcttcgagaactgagcgaagggaaaagacacacagagcagggtctgcccgtaggtacaggcgctatgaggccagctgtatgcagcagaggaggccggtggagggaagttaggtacactgtggaccagccagaagcccccatcgtggtcaaggagcaggacacctggaccaaaagaaggcattaggggaggtcgggcgcagtggctcacgcctgtaatcccagcactttgggagaccgagacacacagatcacctgaggtcaggagttagaaatcagcctggccaacatggcgaaaccccatctctactaaaaatacaaaaattagctgagcgtggtggtggacgcctgtaatcccagctactcaggaggctgaggcaggagaatcgcttgaacccaggaggtggaggttgcagtgagctgagatccaccactgcactccagcctgggccacagagcaaaatttcatctcaaacataagtaagtaagtaagtaaataaataaataaataaataaataaataaaaatttaaaaaaagaaggcaggccccacgcagtgtaatcccagcactttgggaagccgaggagggcggatcacctgaggtcgggagttcaagaccagcctggccaacatggagaaacctcatcactactaaaaatacaacattagccgggcatggtggtgcatgcctgtaatcccagctactcgggaggctgatgcaggagaatcacttgaacccaggaggcggaggttgcagtgagccgagattgcaccattgcactccagcctgggtagcaagagcaaaactccttctcaaaaaaaaaaaaaaaaaaaaggcaattagagggtattgctccaggcctcccagcaagctcatctgcaatcaggaacaccctcagtttgcagcggggcttagagagggtgccagcagtgttagaaccacagctgagctcagtttttgcaggcataaattcttatagtccagaataacgccaagagtaatgtaaggtagggaaacaggccaggtgtggcggctcatgccggtaatcgcagcacattaagaggccaaggtgggtggattgcttgaaccaggacttagagaccagcctaggcaacatggcaaaagcccactctacaaaaatacaaaaagtaggccaggtgtggtggctcacgcctgtaatcccagcactttgggaggccaaggcaggtggatcacctgaggtcaggagttcaatatcagcctgtccaacctggtaaaaccccatctctactaaaacatacaacatttagctgggcatggtggcgcacacctgtaatcccagctactccagaggctgaggcagaagaatcgcttgaactggggagatggagattgcagtgagctgagattgcaccaccgaactccagcctgggtgatggagagagagtgccgcaaaaaaaaaaaaaaaaaaaaaaagccaggcgtggtggggggtaccggcaggcccagtacttgggaggctgaggtaggaggatcacctgagccctgggaggtcaaggctgcagtgagctgtgatactgcactccagcctaggtgactgggtgagaccttgtctaaaagaaaataaaataggggaaatagatgcccaaggtctgacaggggagatctcccaccccactatggaggtcaggggttagcttggaaaaatgcataggaactcggctgggcagggtggctcattcctgtaatcccagcactttgggaggccaaggcgggtagatcacttgaggtagaaaccaggagttcgagaccagcctggccaacatggtgaaacctcgtctgtactaaaaatatgaaaattagcctggtgtgatggtgcgcctttaataccagctacttgggaggctgagacaggagaattgcttcaaccccagaggcagagattgcagtgagccaagattgtgccactgcactccagcttgggtgacagagcgaactcccaccgtctcaaaaacaaagaaaaaaaaaagttggggggaatagatgcccagggtctgacagtgcagatctccccgaccaccccatgcacgtcaggggttaccttggaaaaatgggacccgagtctctccccagcccccaatccaggcctcacccttcgtgtgcccacgcatggaagagtcctgagccttgctgggttgaggcggttggtcattgtagagcaggaaggcgagctgcgggcggataaacggaggcaacgtgaaattcctcccaggcagggcagccctagagtttcgcccctagttggcccggggcccccttcacctggctggtgttgctccggtacagcggctgcaggcttcggcccacggccccctccgggctgttgatgagtgccctgccgtcccgccagcctccggagctctcgtccagatacttgtactgcagccctctctgcgccgcctccccggaccctctaagagctggcagcttgtagaccacgaacctggaggtcggagaatgcacagaaataggagagagggaagagaaggcaccccagggttccccgaggaggtagccatcccggttgagtgaccgcagccggaccccggggcgatggtaggccccccgctgcgcactcaccagtctacaggctgcccggagtccccgtagcaggtcagggccccggcggggacgcacagcagcgctgccagcagcagcgggatcatagctgctatggggctgagatccaggaatctgtgtcgggactgcggggcgctgggttacatcagaggccaggactggcacctggcgcctttcacttccctaaacttgcctgggaaccggggcggggacatcacgagggtacagactcctcccccgagacgcgatgctgcgttttggagaggcaaaaggcaacgctgagtctgcccagaccacgcccacgacgggcccggcgctccagcgtctcctggagcctggccaccgttccttttcgtggtagctaatcccagcccacgctcttctgtctgacccaactcccgcccgggtttctggatcaggcacaagtttgtattttattttttattccagccctacaacctgggtccaactcttgggacctttgttcttcctctttttttttttttttttttttttttttttttgagacggagtttcactcttgtcgcccaggctggagtgcaatggcacgatctcggttcactgcaacctccgccttcctgattaaagcgattatcctgcctcagcctcccgagtagctgggattacaggcgcccgacaccacgcccggctaatttttgtagttttagtagagacggggtttttccatgttgactaggctggtctcgaactcctgacctcgtgatccaccagcctcggcccccgaaagtgccaagattgcagaagtgagccactgcgccccttaagaagcatttgtgttccagtgtatcttcccctttttctttctttttttttttccttccttttttttttttttttttcccggacaatatctcgctctgttgcccaggccggagtgcagtggcgcaatcttggctcactgcaacctctgcctccccagctcaagtgatcctctcacctcagcctcccgagtagctgggatcacgggcacatgccactatgcccagctaatttttgtagttttttttttgaaacacggtttcaccatgtggctcaggctgaactcctgagctcaagggatccacctgtcttgcctcccaaagtgctgggattacaggcatgtaatccacgccacccagactctcctttttcattctgcacgttttctccaggatcccctgagctagcaaagaggtgactgtatgtttgttttttgtcgttttgagacaggataatggtttctcacccaggctagaatgcagtgactccatcacagttcactgcagcctcaacctactgggctcaagagatcttcccaggtagctggtactacaggcctgtgccaccacacccagataattgttcattgcagagatgagggtctcactatgttgcccaggctgctctggaactccggggttcaagtgattctcccacctcagcctcaaaggatcatggcagggcaaagggctatgggaatctgagtactggcttgaaactgcctttgcaaaaattatgacagaaaattatgtcagtgaaagagctctgacctaaccaactccatcttgcctttaatctccaaactgcccttgcttggtcattcctggagtggggtcaagctaactttttttttttttttgacacgttgtctcactctgtcgcccaggctggagtccagtggtgtgatctcagctcactgcaacatccgcctcctaggttcaagcaatcctcctgcctcagcttcctgagtagctgggattacaggcatgcgccacatgcccagctaatttttgtatttttggtagagactgggtttcaccatttttggtagagatggggtttcaccttggggctcaggctggtgtcgaactcctgggctcaagtgatctgcccgcctcagcctgccaaattgctgggattaaagagggagccaccatgcctggccccaagctaattttgggaggaatttagtttatagcttaaatgataatagcccttccccaaactaaactgcctttgtagaaataatgaaagggcactaggttaggaggatgagaggagcctgaattctgctaaactgtaggtgtagtagttaaattatgaccagccatttttccggccgggtgcggtgcctcacgcctgtaatcccagcactttgagaggccgaggctggcagattacctgaggtcaggatttcgaaaccagcctggccagcatttcgaaaccccatctcttctaaaaatacaaaaattagcccggcatggtggcatgtgcctgtaatcctagctacctggtaggctgacacaggagaatcacttgaacccaggaggcagaggttgcagtgagccaagatggaacaactgcactccagcctgggcaagagcaagactccatctcaaaaacaaaaacaaagatggccagccattattctggaggtcacaaggtttgcaacttccccagttatttctgcaaataacatgactattgcaaaacctaacgctggcctttttagatgtctttttaggctttttgcatatctgacaactggatgactccacccagactagcgactctatggtccccacccagaagctgactcagcaactgttttccacagctccaggattgcagcaaggcacccattccctagccctcctgcccaccaaactgttcttgaataaccctagcctctgaattttcagggaggctgattcaagtaataaaactcccatctcccatttagctggatgtatgtggattaaactctctctattgcaatccctctgtctcgataaattggctctatctggacagtgggcaagatgaaccccctgggcagtcataggctgtgaactcttaaatccagggagatgtttgctgtcaatgtccgcagggttcaaggcagaagacaaggacagtgtagcctgaactgggtgggaaaagagaggacagcaaggcctccagtgcccaagggggcttgttggagttgaggggtgtcactgtagtttaggagatgagggtgtgtaaggccctctaatatgacctctaggtttacagcctcctgccatcttccagcctccaaaacccaaaaattcaggccaacgctgaagctttatctgggaggggcatttttataggacccataaccattgacagttaatatcagccacaataagggaccttcaggagccgctttctagacccagggtctctgggaagcctcatcccacaccctctcctgctgtccagggccatctgggagctggtctgagtgtccactgagtccgtttatttggcggtctgtctcactgggtttgcacgacagtttggacatctctgtgtggctccctgtggctgaaggcttgtcggattttccgtaagaggctcccccagggctgtctatgggtccgtgtttgatatttgggtggatctttgggaacgcgagtccaggagagggtccattcgtgggaaaaccacccagcattgtgtcacgcgcgtccgtgtgaagagaccaccaaacaggcttcttgtcccatccccagtcactaggagagtccaagtgccagggcagggctcaaaggtggcgcttcatgtgcaaggccaggtggtcagagcgcgaaaaagcacgtgggcagagctggcagcggaaggggcgctgccccgtgtgtttccggtagtggcgggtcagctcgtccgagcgcgcgaatctccagccgcagccttcccacgtgcaggcgtatggcttctcccctaggggacaaggaagccataagcgccactgtctgcccagtcatgtccccgggtcccctgcatctggccacacccctttactcagcctgggctgggactaggatgaacaaagtgaggcccctagggcacaaaatttaaggaggcactcactctcagaggccagccaagtccaagtcccgccctctgcaacccttcttcccctgtaactacagcgggcgccgcgccctttctcatgtccggggccccgccccctcacctgtgtgcgtgcgcagatgcgccttcaggtgggagctcttggtgtagctcttgccgcaacccgggtgcgcgcacgtgtgcgctgcctgcctcttgcgcgcccacgaacgtcggcctcgcttggatggcgcggtctcggctatcacacctggatcctctgcagtccccccgagtccagtgcccaccgtcccgggtcccaaacaactcaggaaggagggggacgtggcgggaccgggcgcgggtccctggagcccgcggaagagctggaagtgcccttggtactgaggcgccgggtacatcgcggggtacccggacagtagcccgtagggggcgcccgacgccgcaggcactgaaagcccggtccgcgggaagtagccacccgaggagccggcgccgggccccgggtacaccggttgcagcgccagcgccttgggctcgggggccggggctggagccagggctgggcccacgaaggcgtcgggagcccgggctcgcagggcagggcgcacccaacccgagtgatcctccgaacccaaaagcccagccaccagccccgggccgccagcatatgcgcccagagtctcgggcggcggcggatattgcgccccggaggcctcgctgggcgccagagcgcaggtctggggcgcgccaccgggctccgggcccgagaagttggtgaggaggagatccaggtcccaggtggcgtccgcgcccctctcatcgtcctcttcctccccgggctggtcctcagacttcacgtggaggggcggctccgtggggtcaggaggacccgggcccatgtcctgcgcctcttcggagcgccaccactgcgggagggagcaggcagctcgaggttcggtggacactggggtgccctgcccagggacatcgcgggctggacactctgacgcagaggctttggaaaggggtcttgtttgcctgtctgtctgtcccacttccccaacactgcccctctaaccgcccctctccccgctccccccccagctccagggacagaaaccgatcaggtctggctggagacaggagataagacttccactatctggaaccacactcggggatgggggaaggggtagcagagctgctggagatggaaaactggcaggggacgggggagaggatgccagccttgacttagttttcccccagaacatccctctccttccctgtctcccaaaacaagattaattccgaaattttggatgtcccccagacacactcatcatttcccgctgatatctggaagattgtctgtgagcctagatctcgttcctttttttttttttttttcttgagatagggtcttactcttttgcccaggctggagtgcagtggtgcagctcactgtatccttaatctcctgggctctaatgatcctcctgcatcagcctacggagtacctgggactacaggcacacgcccccatgcctggcctaatgtttttggtattttttgtagagatagggtttcaccatgttgcccaggctaccttcgttttctattaccgaaatagatcacacttagaacctcaaacccctagaccaccctcctcaccccctgccagactaagctgagatctcctctcctggactgagcgtacctcagtcctggttaagtctcttgatttcaggtcaagatgcaggtctggaccccaagatctgtgactgtggccctggattccagccagcccacctagaccccaccttctaggccccaccttgaggaagtcatcctgtgtgtccgggaaggggcccagggcggtcagtgtgctgatggagggcaaggcggtctcggctgtggccatggctggctggtgcccaccctgggcctcaagcctcctcttcctcggctgcctcgtgaactctgaggctgtgatagccccttcgagggctcctctctgtccttagctgattggctgcagcctctgataaggcaaagcaaggcaaggcggcgggggggcactgtttctggggcacaaacttcacgttggcctgtctggggctggggttaaagactaaccctgtgtccaaagccaagtcaaatatcaagggttggggggttcagggtttgagggtccaggtgctgggtaaaaacagacattgggtctccaaagaaggagagacttgggggtcttccctcagttaactttcctggaaaaggcagaaagggtattctgggaagaagctgtgggaccccctgtccccctgattgaggctccacagccctccccctccccagtaaacagcaacaaccgtgctgatggcgggacttggcacgagctccccgccaagcattatcagacaccccagacgttggaggctgctatcaggtgggggcccaggccagctagagctctgtcctccggtgaaggggagggctgggagttgggtcttcaaattagcctggcgttcaatttgcctgggttgggacctcccagggtctcagccctgcagcaggaggaagcccctgacaactggcccaccattgtctactggggacccttgggtggcactgcatgggactgcatggaggctggttcagtgccagctgctttagtgcgatgggggcagccaagggaaaagtgaccctctctcctcctgggtgggataggaccgttggatcaagccacaggcagtacctgacctgcaggagaccagtgccctggctctgggcctggctgctccttgattctgcccaacatgaggagaggatctgagtttctacaacaggaacctccactctggtgccctgggagcctgggaaggggacatggatacgtattacagacacataactcatagtcactcattggaagactgaggcaggaggatcacttgacaccaggatttcaagaccagcctgggcaacataaaacctatctctccaacaaaaagctgtgagtggtggtgcatgcccatagtcccagctactcaggaggctgaggtgggaggattgcctgagcccaggaggtcgggactgcactgaactataatcacaccactgcagtccagcctggggcacagaaagcaagactctgtcgctggaaaaaaaaaaaagttgggtggccatctttattcctggcagatcaacctgggtgacacaaacaaaaacaaggccaggtgcggtggttcacacctgtaaccccagcactttgggaagccaaggtggggagatcacttgaggtcaggagttcgagaccagactggccaacaggatgaagccctctctctgctaaaaatacaaaaattagctgggcattgtggcacatgcttgtaatcccagctatttgggaggctgagctggagaactggttgaaacttggaggcatggggccaggcgcagtagctcacgctagtaatcccagcactttgggaggccgaggcaggcagatcacctgaggccaggagttcgagacaaacctggccaacacagtgaaaccctgtctactaaaaatataaaaataggccggggatggtggcatacacctctaatcccaggtacccgggaggctgaggcacaagaatcacttgagcctgggaggcagaggttgcagtgagccaagatcatgccactgcactccagcctgggctacagagtgagattctgtctctaaaaaacaaaaacaaaacaggcttggagcagtgagtagtggctcatgcctgcagtcccagcactttgggaggccaaggtaggaggaatgctcgagcccaggagttcaagaccagcttgggcaacatagcgagatcccatctctaaaaacaaaaacaaaaacacagttactcacaggaccatgcaattacataatgacatgagttcctgttccctcagtcacactgatcatataatccgtgcacatataattgtgtgtctgtctatgtatatggactatgcacagacatacaattcccaggcactaaaacacaaccctatgctatattggttacacaatgtcatagccaaacaatctctaaaacacagaattcataatccacaggcaggcacacagttatacaatcctactgacacaatttagccgtaattgagcagacacacatggggagtcagatacattgtcacagaactttttttttttagatagtgtctctctctgtcacccaggctggagtgcagtggcatgattttggctcactgcaacctccacctcctaggctcaagtgattcctctgcctcagcctcccaagtagctgggattacaggtgcctgctaccacgccacgctaattttttttttttttttttttttgagacagagtttcactcttgttgcccaggctggagtgcaatggcatgatctcagctcactgcaacctctgcctcctgggttcaagtgattctcctgcctcagcctcccgagttgctgggattacaggcacccacaagcaggcctggctaatttttgtatttttagtagagatggggtttccccatgttggccaggctggtcctgacctcaggtgacccaccctccttggcctcccaaagtgctgggatgacaggcatgagccgccccagccagtcaaaacctacactttatacagtcacaccaccggtcacttttacaatatgtaaagtaattatttagtcacagttgcatagctaccagtgcccaaccgtaggggatgcacccagttaaacacagacaaacgcaaggacatggcatcacaggtcctgagaatcaagacacacacatttctcaacagatacacaatcagaatgggtgcaccacaaatgcactacacaaaaagacaaaacaggcggggcgcggtggctcacgcctgtaatcccagcactttgggaggccgaggtgggtggatcacttgaggtcaggagtttgaggccagcctggccaacatggtgaaacccgtctctattaaatataagaaaaaaggccaggcatggtggctcacacctgtaatcccagctactcaggaggctgaggcaggagaattgcttgaatccagtaggcagaggttgcagtgagccaagattgcgctactgcactccagcctgggcaacagagtgagaatccgtctcaaaaaaaaaaaaaaaaaaaaaaaattagccaggcatgatggcatgcttcagtggtcccagctacttggaggctgaggtgggaggatcgcccaggaggtggaagctgcagtgagctatgatcgcgccactgcactccagcctgagcgacagaacgagaccctgtctaaaaagaaaaaacaaaaacaaaacaaaacaaccacatagactcacagaatcacacaagttcacacacacacacacatacacagacacagacacacacacacacacacacacacacacacagagtcacaagtatctacatgtgcttcctgggacagactggcagaaaggtttgctaagatcgcccacttggagctcgtcttccccacaaccagcacccaattagagaactcgagtctggcctcctgggttcaggaggacgcctagtgctcgcgccagaatttctttgtttaattcttgactccctccgcacacaccccctgcaactgaccaaccaggagtgggccgagccctttcctacggccaataagaggagaaacccagctggccaatcggtttcccgcactcgtcttccgcccctaccccgtccgcttcttaaaggggctagcctatctctgtctgggccccccgatttccacaggcaaggctaccttagcccttttaaaaggcagagctgcggagggggccggattctaggaggaaccaatgaaaagcctcactcggcctccgctcctcccacttcttgctgaggtcaaaggcctgcgtcagttgcactgtagcctcggcagtgaaccgggaggtactaccaggtaaggaaggtgcggtagccccagccgtgggtgagaggagctccgctctgacacccccgctcctgtaggtcgccgtcgttgctccgctcgctctgagagagcatggccctgagaggcgtctccgtgcggctgctgagccgcggacccggcctgcacgtccttcgcacgtgggtctcgtcggcggcgcagaccggtcagtgtggggtcgggagtgtggagggaaggagggaggaactgggggtttagggactttccggggtgactttcccgttctgtgcttgcagagaaaggcgggagaacacagagccaactggctaagtgtaaggacctctggtcgcaccgtgtgtctgctgcccctgttcagctgtctgtctgccgcaggtggactctgtcccagaatccgagagctgcccgagcggggtggcagggtcgtggccagggtcagaggcactaaggcagtgagtgcgctgtgcctgcggggccggagaaaagtcacctgatcagtctcgcttgcagctcgcactagccggggggcgacatgggtgttggggggtagggctgatgagggtccgagaagggagggcacagtgatcttgcggactggaccgaggcgaattccccttcccagcctcgcgtcccgagtttgactggcaggacccgctggtgctggaggagcagctgaccacagatgagatcctcatcagggacaccttccgcacctactgccaggagagactcatgcctcgcatcctgttggccaatcgcaacgaaggtgggcgggctggtgggtgccctgagactgctcctccgcctggagccatagccaccccacctcaaggcccctctgtccttggggctggggcttcctgtggcctaggcctgggcctgaatttgggcactggtccctttgcagtttttcatcgggagatcatttcggagatgggggagttgggtgtgctgggccccaccatcaaaggtaggaacaagtatctctccacacactgcagaaccctctgtattctgaaagcctcttcctccttccctccctccctttcttccttccttctctttcttttcttttccttttctttcctttcttcttcccccccaacagagtctggctctgttgcccaggctggagtgcagtggcacgatcttggctcactgcaaattctgcctcccaggctcaagcgattctcctgcctccacccctctagtagctgggattacaggtatgtgccaccatgcctggctaatttttgtatttttagtagagacagggtttcactgtgttggccaggctggtctcaaactcctgacctcaggtgatccgcccacctcagcctcctaaagtgctgggattacaggcatgagccaccacgttcagccttctttttgagatggagtttcgctcttgttgtccaggctggagtgcagtgatgcaatcttggctcactgcagcctccacctcccgggtttaagtgattatcctgcctcaggctcccgagtagctgggattacaggcgtccgccaccacgcctggctaatttttgtatttttagtagaggtggggtttcaccgtgttggccaggctagtctcgaactcctgacctcaggtgatccacccgcctcagcctcctgattacaggtgtgagccaccgttgcccggcccttttcttttttttttttttttgagatggagtttcgctctgtcacccagcctggattactggattacagtggtgcgatcctggctcactgcagtttcctcctcctaggttcaagcaattctgccacctcagccttctgagtagctgggattacaggggtgcaccaccacgcccagctaatttttgtattttttagtagaaatgggatttcaccatgttggccaggctggtcttgaactcctgacctcaggtgatccacccacctcggcctcccaaagtgctgggattataaacgtgagccaccgtgcctggcccctttgtttctttttttagagacagggtctcactgtgttgcccaggctgttctcaagtgatcctcttgccttactgaaagcccccttctttccctaagccacaatttcccagtctgtaaagtggggctgttgtcccaccctctgaaagtggctgtggagatgaaatgaataaacctcagctagggccagcttggtgcctgcctccttgtgtgtccttattcagccctgtctcttgggtcttagctgggcagggccctgttctctattgtcctgctttcccctcctactaccaccaggatatggctgtgctggggtttcgtctgtggcctatgggctcctggcccgagagctggagcgggtggacagtggctacaggtcggcgatgagtgtccagtcctccctcgtcatgcaccctatctatgcctatggcagcgaggaacagcggcagaagtacctgccccagctgggtgagtggctgcccatggggcctggtggaaggaagacagtctctgaggtctggaactcaagggtggggctgtcccctgagcctattctgtccctatctcaaagatagcataagtggccacctggacccccgccagaccctgggcttcacctggagatctgatccctggccagcctgactgtccccctctgtgaccaccgtcatctccctatgctttctgtgttccccagtccagcccaaagtttaaagtccaccaggttcctgctggccatttgcagtggctcacacctataatcccagcactttgggagggtgaagtgagaagatcccttgagcccaagagttcgaaaccagcctgggcaacgtaaggagaccccatgtctattagaaaaacaaaaaaaggaaagagcctatgtgacctgcgctaagtggacgttggccctcttccgtggtgtctcggaggtgttcagctgcttcaagatgaagctgaacatctccttcccagccactggctgccagaaactcattgaagtggacgatgaacgcaaactttgtactttttatgagaagcgtatggccacagaagttgctgttgacgctctgggtgaagaatggaagggttacgtggtcggaatcagtggtgggaacaataaacaaggtttccccttgaaacagggtgtcttgacccatggccgtgtccacttgctactgagtaaggggcattcctattacagaccaaggagaactggagaaagaaagagaagatcagttcatggttgcatcgtggatgccaatctgagtgttctcaacttggttattgtaaaaaaaaggagagaagggtattcctggactgactgagactatgatgcctcgtcacctggggcccagtacagctagcagaatccgtaaacttttcagtctctctaaagaaaatgatgtctgccagtatgttgtaaaaaagcccttaaacaaagaaggtaagaaacctaggaccaaagcacccaagattcagcgccttgtcactccacatgtcctgcagcacaaacagcggcgtattgctctgaagcagccgcatattaagaaaaataaagaagaggctgcagaatatgctaaacttttggccaagagaatgaaggaggctaagaagcaccagggacaaatcgtgaagagacgcagactgtcctctctgcgagcttccacttctaagtctgaatccagtcagaaataagattttttgagtaacaaataagatcagattcgcaaaaaaaaaaaaaaacccacaaggccctgtgtgaccaggcctctgctgacctttccacctcatctctggccactcatgtgatcctcccagccagacttagctacttgaaattctccagaagtaccaccagttctttacacatctgttccctctcccagcactgctcttccccacagcctcctcctgcttaactcctcacacccttccagtttggccaactccttcctgattccctgggtccccctccccatcttggcattgtgatcatgactttggggtaacctgtctcttgaaagcagggccagatctaacttagttatgaggtctgactcaggggcgagggtaattttttttttctttttttgagacaaagtcccgctccgtcccccaggctgaagtgcagtggtacaatcttggctcactgcaacctgcggttccccagttcaagcaattcctgtgcctcggcctcccaattagctgggattgcaggtgcttgctacccgtgcctggctaatttttgtatttttagtagagatggtgtttcactatgttggccaggctggtctcgaactccagacctcaagtgatccatctgccttggcctcccaaagtgctgagattacatgtgtgagccacctcgactggcctaattttttgtatttttagtagagatggggtttcaccatattggtcaggctggattttttttcttttttgagatggagtcttgctctgttgcccaggctgtagtgcagtggcatgatcttggctcactgcaacctctcctgcccgggttcaagcgattctcctgcctcagtctcctgagtagctgggattacaggcacccaccaccacatctggctatttttttttttttttttttttaagtagagatggggtttcaccatgttggccaggctggtctggaactcctgacctcaattgatccacctgccttggcctcctaaagtgctgggatgacaggcgtgagccactgcaccccgccacgaggataatttttgagtaaggggatgtatcagggaccaggcagccttgtgactttgtcttgtgcctgcagccaagggggagctcctgggctgcttcgggctcacagagcccaacagcggaagtgaccccagcagcatggagaccagagcccactacaactcatccaacaagagctacaccctcaatgggaccaagacctggtaagggttctgggtggtgggcaggtggtgaacaggggcaaaggggcactggtcagacccctcaccgactgttccatccccaggatcacgaactcgcctatggccgatctgtttgtagtgtgggctcggtgtgaagatggctgcattcggggcttcctgctggagaaggggatgcggggtctctcggcccccaggatccagggcaagttctcgctgcgggcctcagccacaggcatgatcatcatggacggtgtggaggtgccagaggagaatgtgctccctggtgcatccagcctgggggtaagtggcagccactttgggaatgggtgttgggtcacctgcggatgcggctttgtcaggcaggctccgtgctggggacgcggctccctgtgcctgtggagcccacacagtggtgattcttactcagccggactcgctgacgtgctgaaaactgcccccatttggtgaccgtctcgctcatcccggctctgcccgggacacatgggcctgaaccagctcagtcatttgactcacagtgcatcttctggcatccgtcagcctcctggctctgagcatcgaacccagatgccaggctgggtgggactgtgtgcaaaccgagtgagcaggcaccgagcttcagtgccagggccatctgtgatgtgaaccacaacctgagtccccctgcgtggggtggctggggaggaggctttccctgcttcagagttggttctgcataggccctcttggtgtctcttgggtgggcctgaggcgccatctcaaccctacagggtcccttcggctgcctgaacaacgcccggtacggcatcgcgtggggcgtgcttggagcttcggagttctgcttgcacacagcccggcagtacgccctcgacaggtgtgtgagggctgcagtgagattctctgggggtgtggggcagcttgggtttcactctctataccatgggtgactccccagcccccacccaccaggcctgagttccttgctctggaatgaccagtgacgtccttctgagcagctgtgggctgagtcaacggcagggccagggcaagcttgggggcactgaggcagcctgggaaggcgtcctggagcagggggccccaggacagggacggggtgggagagtgggcctcccctcgctcttaccctgccattgcccatgtaggatgcagtttggtgtcccactggccaggaaccagctgattcagaagaagctggcagacatgctcactgagattaccctgggccttcacgcctgcctgcagctcggccgcttgaaggaccaggacaagtaggggctgtgtggtgggggcggggggatggcagcggtggctggaggaccttgtgtccttcctggagagaaaggtccttcctgcctggtggccctggggacctgaaccttctgctgtccctcttgtccttgatgggctgggctgaggacagccccactggtccctcattgggagcttggctgcatcagggaatccccaccccgggctaggtttgcttggagcatcgggatgccaggatccccagtccttgttaccctcatgtgccactcccagggctgcccccgagatggtttctctgctgaagaggaataactgtgggaaagccctggacatcgcccgccaggcccgagacatgctgggggggaatgggatttctgacgagtatcacgtgatccggcacgccatgaacctggaggccgtgaacacctacgaaggtaggagctggacctcagagggctcactgaggcctcagtgtctggggagggggtacagggaggtgggacggggacaggtctgagtccaactccacctatcactaagtgacagtgtgacctggggcgagccttacccctctgtccctcatctggagttactcacatggggactgtggaagtgaagtgcttcatgcagcacacagaggccccatcaggccttgcgaggggctcccagctctttctcccacatgctcgggaggagggatgttcctgagacaggtaagctccgaaggcagcccaggggtgaggcccgactcctagcaggctggtggacgcaagggagtgagcgaagctacacgcaggaatcaacgctccattttgttaagagacaaaagtcatcttcagatgacggtgtttgcaccctgtaactgatggtgatttacatgggggtccagaaccccttgcttggtgggaagacagatgtggaaaaagatacttaaaaaaaaaaaaaaagtgcaaacccagcatgcgctatgtagaaatagagggaggtatgaggaccccccgggcagagatgcttccagacagagagaacagcaaatgcaggaggggtgccttccctgcgcaccttgcaaccccagatcttgtctctatctggcatctggggggtggggggatcctacaaatgtgagaatgaccctgaggacaagcagcgggcgccatgagatggttttatgcagagaagggatgagtcagatttggtgctttaggggctcggcgcagtggctcacacctgtaatcccagcgctttgggaggctaaggcaggaggattgcttgagcccaggagttagaagttatgatgagctatgatcaccccactgcactccagcctgggtgacagagtgagaccctatctatatttaaaaaaaataggtttgtactttaggaagtaaacagaattggctctaaaaaggaggctacaatctgccttctgcttcaaggagctggggaggagcaaaggatgagacaccagggcatggggtgtgggattctctgggagaggcggcttcagatgggcagaggtcagctgaggcaagtgactgctcttccgatgtgctgtccctcctatccctcccgagggtaagaaagggcttgctgtgtttccttggagctcaggggtgctttcagcctctgtggcaaggaagcgtggccaggttgaaaatcaaacatttaataaactgtggggctgggggtggggagaacttgccaagggtggggagcacgaagcctgggcctatggcaggggctggacttgctacattttgggagttcagcacaa

SEQ ID NO: 71 - DNA, 27368 bp, Mus musculus
aagctactcatgcatacagagtagtaagtggtccaaggccaagatgcattttgggcagagataatgagctaagtggtaactggaaaggtgaacttagcacatctgtgaacagggaggatcactaacttcacaatgctccataaccacaaggactatgtttgctctacacttgaaaaggtgagaaagggctggagagatggctcagccattaagaacactgactggggctggtgagatggctcagcaggtaagagcacccgactgctcttccaaaggtccttagttcaaatcccagcaaccacatggtggctcacaaccatccataacaagatctgactccctcttctggtgtgtcagaagacagctacagtgtacttacatataataaataaataaatctttaaaaaaaaaaagaacactgactgctcttctgaaggtcctgagttcaaatcccagcaaccacatggtggccccacaaccacccttaatgagatccgacgccctcttctggtgcgtctgaagacagctacagtgtacttatttataataataaataaatctttgggccagagtgagcagggactgagtgagtagggcctgctggagcgagcagggttgactggatcgagcagagctcctaaattcaattcccaacaactagatgaaggctagcgattatctgtacagatacagtatactcatatacaatcaatcaatagaaaaggtgagaaaggtgagccagcaggtgccccattactagagcccaaggtgcctaccacataccgccaggctggatacattaggcagcacattctcctcaggcacttccacactgtccatgatgatcataccggtagccgaggcccgcaaggagaactttccttcaatcctaggggctgagaggccccgcatacccttctccagtatgaagccccgaatacagttatcctcacaccgagcccacactataaataggtcagccacaggggagttggtgatcctggaggccagagagttatagagagatctgactgctgcttccatgtacacaccttctcacccaccagtctacctgggtctctcaccaggtcttggtcccactgagagtgtagctctggtttgatggattgtggcgagctctggtctccatgccacctgggtcactcccatggttgggctctgtaagtccaaagcagcccagaagttcacccttggctgtaagcacaagagagggtctcatttatctcctgataaattatcttctcactgagtcagacctgaataaaggcagatacaccctgcatcatggcactcagtgagctgctgagaaaatggtccataatcaaattataatgtgaaggatgccagaaagaaaggggttggcaagagtatcttgaagggcactaagaggtttagctgaaggaaggtatgaagtttgagagtttttttttcttgttacttgcttttgtttattttttaagatttatttatgttatttatatgagtacactgtagctgtcttcagacacaccagaagaggacatgggatcccattacagatgtttgtgagctaccatggaattgctggaaattgaactcaggacctctagaagagcagtcagtgttctcaacgactgagccatctctccagcccttgtttgttttttgaggcagggtttcttagctctagctgtcctggaactcactctgtaaaccaggctgaccttgtattcagagatctgcctgcctttgcctcccaagtgctgggattaaaggtgtggtggcacctggcttgtttgtttgttttgaggtggtctcactgtgtacccctggctgtcctataacaactcactacagagaccaagctggcctctagactgctgggattagaggggtatgccaccacatccagtttgaaggagggtatgaggaacagttgtcaccaaggtgactggagaatccccagtatctgagcaatcagaatcagaatagtagccagaaggataggcatgatagtatatgcctttaatccaagctgtccctcctcgggagaccgaggcatgtagacctttgagtttgatgctactggtctacaaagctcccagccaaacagggctacacagtgagaccatatctacaaataaaatctgagtagccaaagaagtagaggaaaggtccgctcatgagcctcgtggatctggttagcagttaagactttaaactttggacaggggtgagaggcctagaaaacaaatccaaggggagatgatggtgaccagaggtaaaatcaaagggttggggggagagaggaaccgacagtgctggcaggagatcaaggaagacaactgagtcctaggacctgacatggacacaggtggtctgtaggaaagaaggcaggctgtggagggacaccaggcgggacctgcattccagaccgacatctgactttcctcctcttggcaacagctgcttacccagtccgggcagatatttctgtcgctgttcctcgctcccataggtatagatggggtgcatgacaagggaggactgaacactcatcatcgacctgtagccactgtccaccctctcaagctctcgggtcaggagcccataggccaccgacgacacaccagcacagccataccctggtgcaaaagaagaacgggtagaccaaaggccaaagatcagccctgggactgagtagggctgtaatatggcccttctggaagtgggcagggggctgccctggttaggactttgttcctctcaaacccacagctgttttcaggagagataaccattgcccattttacagatgaaatgcgtgactgaggaaaagggatggtccttcaagatgttgtaggtgggtataggctgcatagtatacacagaaatgtccttacctttaatggtgggtcccaacacgcccagctcccccatctcatacacaatgtccctgtgaaaaactgcagagatgggtgtcagaatcagaccctgtctcagtctcatggagtccctgactccagggactgcagcacatgcaaatcatgtatggttgtgaaacccagcatgcccacccttccaccaaggcaccttcatttcgattagccagcagaattcgagacataagccgctcctggcagtagttacggaaggtgtccctgatcagtttctcatcggcagtcagctgctcctccagtatgagtgggtccttccagtcaaacacggggcgagaggctgggtagagtatgggggtcgagtcagccagaaccccttatcctctttcacatttttaagctgtacccattccccgccccccatctcgctccaggtgaattctggcttcaaaacagtctgacaagcgcaacccctctccagccaagtagaaacaaataccctctactttagacttctgaccctggggataacccagcctcccttcccagaagtccttgcattcatggactagcatgggtcagagaaacagctggactgggaataggtgggtaggtgatcttacatttggccggtcggatctgtgtcttctctgcaaacaaaggacgagaacgccacactgagaaagtgtcctgtgtctccctgcccacccatccagagccttgcactgaccggtgtgggcggccgccgagctccaggtacgtggaaaacgcgggaagcgcaggccggacctgcggctcagcaaccgcgcggagactcctctcagggacatgtagccggtgagcattgcaggaaccataacctggaagggctgagcgtcagcggggaccagccttctcccaccccatacccttcatacctggtgcttgcgggctgtgctccgggaccagcacactaggcctaataggggttgctcattggttcctccttggttcctcccagaacaccgcctcctctgtggctctgccttttaaaagagccaaggcagctgcctggttttgcaagcgggttcttccatgcccaggcaggtctctcctttaaacagcagaaccaggaaggggcggaaacaagtgtgcaaacccgattggccaactgtatttctgccccgcccattcctggttagctagttgcccagagcctgagaagcgggatcccaagttcaataagaacgcctggaggccagaccttgcgaaatccgcaaatggggtgcctgcagagagaaaggtggtgagccccatcccaacttgttgctttgtgtgtacttcgtggaaggatgtgatcttctgtggcaaagtaactgcatttctgtgtacctgtgtggttctcctaccttctgggtgttgtgcagaataatctagaatatgttataactgggtgtcttggatgttacagtttctattggagtatgcactgatttggagaaaattaagacaagaatagaaaagaagggggggcataactgtataaactctcctgagaaatagtaactggttatcctgacaaagcagccatctaacaattgtccttcaaaaagagaaagctctaaccatagctccaatatctgattctcaaaagtgcttgactgaccaaccacacagagagacttccccttatagacttacatcgacccttttatggtttttagtttaaggcaccaatgaagattattggcttagcaataatgttataactataaatgttatagaaacccatctgtgcaattgctcagaccaacagtaggtttctcctctgggcttgtgagtaataaattcttctgatcctcttctcagttgtcaaagtctgagggcagcaacttgtcatttggactttcctgtaacgcattttatggggttgtatttctatcttgtaactggctatgtagctgggtagtggtggcacacgcctttaatcccagtacttgggaggtaggggcaggtggatttctgagcttgaggccagcctggtgtacagactgagttccaggacagccagagctatacagagaaaccctgtctcaaaaaaaataaataaataaaataaaataactggctatgtctcctcttgtagctgtgtgtgggtgaaagctactatgatagtcatctttacaagtgtatcttgtggtgtgtgtgtgtgtgtgtgtgaagtgctaggaagcaaacctagcattctactcaagctcaacaaatactgcatcactgaactaaactatattcctccagttgttttcttttcttttcttttcttcttcttcttcttcttctttttttttttttttttttttttttttttttttttttggtttttcgagacagggtttctctgtgtagctctggctgtcctggaactcactttgtagaccaggctggcctccaactcagaaatctgcctgcctctgcctcccgagtgctgggattaaaggcgtgtgccaccacgcccggcattgttttcattttttaattacatttatctatttagtgtggggggtgagagagagagagagagagcacgcaatgtatgcacagctctccatgtcccatgtttaggaggacaaaggacaactttcaagagtcatttcgccttccactatgggtgtcctagggatccaccttaggtgtttaggcttggtgacaagtgccttgacctgctggacagtctctcaggcaggcccatttaacacagggcctctgttacagtcaggttccttagagattcaccataaccataaataaattttaataagaagaggcttatttaggtatggcttccagtgtgggatgagggctgcacctgagagcactctcccctagccagatctacaaaaggcttataaagtcaaactccacaatattatagatatcctgaagggcgtagttttaacatatgtcttatagttgccctagtcatctttttgagtggaataaggaagtttgattacaaaaacaggaatataaattagacttatgaccttctatcttgctagaacagtcaagatcagtccatcgaagtttgttttacgagatagggtctctctgtgtagccctgactgtaggtataaatttttttacagcctattttaataaacattcaagctctccccttgcccaccactcaccagaggtagtgggaaagttattaggatatggaggaagtggatccctacagcaagagttcttcgggggctagctcaatcttctttggcagcagttcagccctgtggcaaataccaaaaaggaagcagcagcagtagtttcatcctctctgcaggcagacaccacgcatgaaccagcagctgtagtccaatcctgaggaagccgaaaggcttgccaactggccacggctgcttcagtggcaagctgccacaggaacctcataagttcttgggtgagtttctctcaatggctgtgccacaagtggagctcaacaacactatataaggcgaaccaatataagcatgtcattagtgaagaagactgaggtggagcaaagcaaaccaatgctccagctctctctcccactatctgtggagtcatatttatactccttcatcatgtggcctttcacatgtctgccatagcaaagcatcctttcatctgtgtccaccccaggaaaacacttcttcacctgcctgctttaacaagacatcctttcacctgtgtgccccagcaaaacatcatttgacacaaccaaccctccagagaaacgagaagtttccactttacctggctgtcctggaattcactctatagaccatgctggccttgaactcaaagatgcacctggctctgcctcctccttacaagtgctgggactagaggtgtatgccaccacccctgggctctgtcgagtgctcttcaccactagggccaattctccagctcctacatggtttcctcctcctcagaaagttgtatttgtttactgtgtatgtacataccaagtcactcctgtgtgtgtcagctcactcccaccactatgagtcccaaggaggaactgaggttttcaggcttggtgggaaatacctttaccttctgtggccctccttctcctgctactactatggattaaacccagggcctcagaaacactaaacaagccctccagcattgatttacaacctcaacctgaaacaggactccagaccttagcacaactgactccatgatggaagtgccattcagtctgtagaactcagcaggcagacagaaatacctgccaaaggcctgttcctgttaacctaagtgtgccaacccaggacatgttttttatgattaaaagctcaccctagggggctagagagatgatggttcagcggttaagagcactgattgctcttccagagatcctgagttcaaatcccagcaaccacatggtggcttacaaccatccgtaatgagatctgatgccctcttctggtgcgtccgaagacagctacagtgtacttacatataataataaataaatctaaaaaaaaaaaaaaaagctcaccctgaaaaaggctcatggctacactgagaccctgaacactcagtgtagacatcagccagctaataaagaccttctattggcttgaacttatatccgagcagtcttctctggtgaacacctcacaacaaaccccagtgcttgagtcctgactgttcctatgtctctgttgactgtgggtgactgagagaagacagaaactctgactgttcatgtgaatgaaacatgagtccctgcctccctcttccctcccttctatcctggggaatcaaacttagcacctagcacaggataagcaggcactctacctctgaactacaaacccagctcagtcttacagggtttaaaatattgttttaaagatttatttatagccaggtatggtggcagaggcaggcagatttttgtgagttcaaggccagcctggtttacaaagagttccaggacagcctggattgttaatcaaagaaaccctctgtggatgcctggaatcctctgcaaagcctccagccctgccccctccagggtttctccctgtagccctggctgtcttggatctcgctctttagaccaggctgatctttaactcagagatctgcctgtatctgcctcctgagtgctgggatttaaggctttttccagcctgccaggcttgtctccaacccttttgatggcttttatttgtttgttttgttttgagacaggtttctctgttccgccctggctgtccaggaactcactttgtagaccaggttggccacttgcagaactgccagcctctgcttccagagagctgggattccaggcctgtgccaccacacctggctctcttgatggtttcttgtctacatagttcagtgtaagcttgtattctctgttagttactgtgtatctaggcagtactcagcaaggtggttttctatttgggtgtggctattctctttggaaacttttgttttaatttttctgtaattgtagttgtttggttttattattatctttatttatttatttatttatttatttatttatttatttatttatttatttgtgagaggctagctaaagcctttcttattaatgccaaaagaactgaagcaggaaatcacggtggttacacagcccagcacctaagcccaatttacaggacaaggctcatttttattattagagctcctttggtaacagagaaggctgctcacagccagcatgctcaaggttgtataaagcacaacaatgttatttgtcttcagaaaaacatctgaggtgtgggaacatcatttaccctgactatgctctagagatggaggaaggtctcaggcactcctgggtcccttccactaggagttgaaacatacattatgttgtaacacaaatccttcttgagaaacatcaacaccagatgttcctaggccccttctcaaattcactttatcttcacataattcaccttaattcaaaccccaacatcaaaccagagctggtgcatgctaagcacatgctctgccccagagtgcatgctaagcacatgctctgagctacaccctttacgacgatctcacgagatcctgctctaatggggtgctggtggttgtctaggggatcttgaggtcttttcctggcagatgaaagattgaaagtccgtgaaagaaagaaaattgagctgcagagaaagcaaacgtaactttatcacttgggtaggagagacgctaggtctgggtggctaaatagactggcttaggtagtttatcgtctctttgggttctcccctttctcttactggtcctgtttagagcacacactctctcacccttaacagtaaaacaaaaccttctgactctccccttatacaacagggactgcatcatcaccctgggctttctgacactatgtatagttctccacttggtcacctcccttatcctgcagcccttggcctcttcaacccctaattcctgtgaatctgactatgccctgtgcaggtggggctatataagaaaactttcctatcaaaggttctgtggaggtttaaggatggtcctaataggggactggagagaagtgggaaagagcaccctgtttgctcttccagaggtcctgagttcaattacaagcaaccacatggtggctcacaaccatctgtaatgggacccaacgccctcttctgctgtgtctgaagacagtgacagtgtactcatatacataaataaaataataaaataattaaataaaaagaatagtccccgtagctggatggtggtggcatacacctttaatccgagcattctagaagcagagggagttcgaggtcagcctggtctgctaaacaagttccaggctacacagagactttgtcttgaaaaaacaaaaacaataaatcccagaatggcccccaaaggctcatatattgaatgcctaattaccagagagtggcactttttgaaagggttgtaagaattgggaagtgtgtcgctggaggttggctttgaggttcaaagtctctctctctctctcaggatgtttctctcagttattggaccagctcctgccttcatgccaccatgctccccactatgataatggactacacctatgaaaatgtgagcaagccccagtaaaatgtcttctttggttgtggctcataatcatctgtaatgggatatgatggactcttctggtgtgtctggggacagcaacagtgtactcatacaatcaatcaatcaatcaatcaataaataaatgcagattcagtgggcaatgtagcaccacagtgtcctgtgacaaacacttctactgagtttcagaatgtttctgtcctcccaaatgagactttgtctcctagcagtctcctgccccagcctctgggaagcactgctcgtcctgacctgttctggcaattatatagacaaaataatgaggcatgtaaccttccatggttgcctgccctcctccattagcctgttgtcctccggttactcgtcttagcacactgattgttggggcgtgtgtctagtgtgtgcttgagcatgcgtgcagcccagcggtcagggttgatggtctcttccttcgttttctttaccttatttcctatgctgggcctgacactggacctgatcggctaggctgactatccagtgagcaccaggtatcttcccgtttccatctgtctagcactagtcttagacatgcacagtgacacttggcttttgtgtcagtgccagggatctgaacctaggtctttatgcttttcttttaaagttaatacggtgcaagcactccatgaagctaagtccccagcactgttttacccttgttgtcgtctttcgagacaaagactatgtagccctggttgtcctggaacttattatgtagaccaaacagacctttcaaattcatagagatccaccagcctctgctttccaagtgctgggattaaaggcatcactaccatgcctgactaggtaccattttctataatggatctgatgtcccctatggacaccgagcaatgatggtgtatgtgtgatattattgtacccgtgacaccccatttccctaccctgactcatagggcaccagaatagaagtatgggaatagcaggccatctatcatggggtcccgcacacaatgagccgttaggcagagtcagggctgagctcttctgaacggcatactagctgcagctccatctatgggtcctagcccaccacactgtaaacttcctagccatccccttcagctccatgcagtagccagtgagggtcctcagagccccagagtgggctgatttgaggggactccttttgctaaacagctcagacctcaacacaacagagcaattcaaagctaaaataatttgtggcaccaacccccagctcttctgctcaaggaggaacagagctatggttgttctgggccccctacctgatagcggcctgaaacatctggtgtgtctgataatgcctgaaagggagccggtgccaaggcccgccactagcaccgttgctgctgttgtctgggagagtaaggactgcagtggtctccatgggggtcaaagggtcccaaagacctttcccaagaaatctatccttcctggtccactccttggagagagacttgaaaccaaaccagaggggtcttctcagtcctgtgggaggtggggtgggggtggggagcagcgaccaggacttttctttacccaacctgaatcctaaaactttgaagcccctattccttgacatctgattgactttacatacagggttggttttcagggaccagtttgaaaacaggccagggtgaggtctattccttgaaagtgacacatcacaactttaatcccagcactcaggagacagaggtaggcagatgtctgtgagttctaggccagcctggtctacataagccagtccaggacagccagggctcagttacacagagaaaccctgtttcgaaaaccttaaaaaaaaaaaaaaagaagcacaccacacacatatcgcacacacccctcctttgccgttttgctttgcctgggtcttatcagggaagacagccaatcagatgtgggcagacaggagccctccaagaaactttcctagcctcatagcccatgaggcagaagagagagaggaggcctgaggtccagggtggacaccagccagccatggcctcagctgagactgtcttaccctccatcagtacactcaccaccctgggacagttcctggacacccaggaggacttcctcaaggtggggccagtgtgagtgtgtgggagggggcaggtggtcttgcatagggcatagtgcttaggggtggggcgtctatcttactttaatatcctctgctctgttttttgggggtggaggagtgggagagcctctgagccttgtttgggggagatgttctaggggtctgagatcaaggtgaggcctatttctccaacaggaagcagaattctaagctctatatcttaagagactaggctcatagagacaaaggtccagataaaggtgtcctgggatttccaggctttgagctgtaattttctgggctatgtgaagacagggaaaggctagggaaaacggagtcgaagctgtcccctttgactcagaactctgcaaccccttctcccatcctgaatactattcttggtaagtgtcttagctgtctctagcaagacctaatggagttgtctggagctgagaaaggggttaggggaaccgtgtgggtaaatgacaggcaccaacggtgtttccagccagggttgtttgagggccaggtacccagtgcctaccattcaagcagtacgctccctcccgcagtggtggcggtctgaggagacgcaggatttggggccggggcccccgaatcccacggggccgtcccatcacgtgagtctgaaatcggaggacccttccggagaggacgatgagagggacgtgacctgtgcgtgggacccggatcttttccttacaaactttccaggttccgagtctcccggcacttcccggacctgtgccctggcgcccagcgtggggccagtggcacagttcgagccgcctgagtctctgggcgcctatgcgggtggcccagggttggtgactgggcctttgggctccgaggagcacacaagctgggcgcacccgactccgagacccccagcccctgaacccttcgtggcccctgccctggccccgggactcgctcccaaggctcagccctcgtactccgactcgcgagcgggctccgtagggggcttcttcccgcgggcggggcttgcggtgcccgcagctccaggcgccccctatgggctgctgtcgggataccccgcgctgtaccccgcgccacagtaccaaggccacttccagctctttcgcgggctcgcggcgccttctgctggtcccacggcgcccccttccttcttgaattgtctgggacctgggactgtggccacagaactcggggccactgcgatcgccggagacgcaggcttgtccccgggaactgcgccgcccaaacgcagccggcgaactttggcacctaagaggcaggcggcacatacgtgcgggcacgaaggctgcgggaagagctacaccaagagctcgcacctcaaggcgcacctgcgcacgcacacgggtaagggcggggccagacgggcgggggcggggcgggagccgctagtgaacgaagggaggggccggagggtagtcagaggcgtggctaaaggcggccccagttctaggggtcgtgaagaccgcacctgagacactgggtcaagtctagaaggggcgattccagacccaaatgggctaatacaaacactcgggaggcagaggcaggtggatagcagtgacttcgaggccatttgggctattatagcgagtttcagcagcctgagctacttagtgagatcctggttcataaataaataggtgtaacagaggacctggggaacactttggggacttcggtgttagaagtggatgtgtaaggcctgggttagagatgggagaagaaactagaggggtgaacccgaaaggtacaagcttggaatgccagagctcaggatatagccagtatttacatgcatgctcgagctggaaccatctgggatcaggaggttgagacactcaagtaaaatcagtttcaggggcaactgacagaggtcccagagttaagaaaagaagagaagggggctggagagatggctcagtggttaagagcactgactgctcttccagaggtcctgagtttaaatcccagcaccacatggtggctcacaaccatctgtaatgggatccgatgccctcttctggtgtgactgaagacagctacagtgtacttacatataataaataaataaattaaaaaaaaaaagaaagaaagaaaaaagaaaagaagagaaggaaatgctgagagacagggcctagaaagagaaacggggtcatcccaggactggaagacagctgagggtctcccaagcatggcagggcacgcaacaggctgtaacaggaagagagggaatcaccagagacagggccttgaacactggggtggatttctgggcttgaaccaagttgaggaacaagactggatatcatcgggaggctctgccagagcaagaaatagctgcaacgcggagaacaaagaacgaaggtgcagccacataaaaaggcagggaactagcacaccggaagtgggataggagaccggaagtgagaaaactgcaggattgcagctgtagatacagaaaaggattgagtcacagaaggcaggattatgtgaccttttaactgtgtgggctaggtatgtcctaagacttggctctacttcatcaagggtgcaaactggagctgggttgcttggagggtggtacttacagctccctgtccttcaggagagaagccttatgcctgctcctgggacggctgtgactggaggttcgctcgctcagacgaactgacgcgccactaccggaagcacactggacatcgtcccttctgctgtggcctctgcccacgtgctttttcacgctctgaccacttagctctgcacatgaagcgtcacctctgagtgatcctgcacaaggactggggatgaaataagagtggatccaaggaccgtatcccaaaagatgggccattatatagtcctacccagatcaaaaactgaccagaagaccatacaaaggagccttcaggacaaacctcacatgtcctcagggagccccacacatggccccacagacccagcaatatagaccaccagataaatcaactcaaatggacccctagaccagaggagtgaccctgtgtcctggacgcagatggactggggtgagatttcctaagatctagaagggagcttcacactgtgcccatctgctaggattgttgtcgttactataaaaatttcccatataaaaccagtgtctgcctcactgtagtatggagctggaaattacgagaagcattgagtcccccggcaggtgacacacttacctgtacacacacctcctaaactttctaaaattcattcacttctgatgacactcccccatccccttcccccaccatcacccccaccccagcagcctcctccatcaagatcagccttccaatcctgtcacctgttgtcaagccagtgatgagatactcacaactattatctttgcccttctcccttttcttcctaagacaggatcttactatgtagccctggttggcctgaaattatgtagaccaggctggcatcaacctcacagagatcatcctatcctcctgcctctgcctcctgagtgctgattttaaagatgtgggtgatcatatgtccaatatgtccatttcctcggccaaagtgggtcaatagtcacagaggtagtttaggcctgtaatctgagctgtttacgaggctgaggctggaggcaaatttgacactggcctgtaatacagaacaaggtcaaagtcatactgggaaatttagtcagtttctggctcgctctctctctctctctctctctctctctctgtgtatctttctttctctgagaaaaggtttctctgtatagctttgactgtctgggaactcactctatagatcaggctggtactgagatctcagagatctacctgcttcagcctcctgaatattttttgtttgtttgttttcttcatgtctcagaaagttaacaacaacagcaaaccgctgtgcatggtggtatatgtgtttaatcccagcacttggaagcactaggtgaccctcaaggccagctagagctatataacctagagactttgtcttttaaatcttttttttttatttttatttttttagatttatttatttattatatgtaagtacactgtagctgttgtcttcagacgcaccagaagagggcatcagatctcattacgggtggttgtgagccaccatatggttgctgggatttgaacttcagaccttcagaagagcagtcgggtgctcttacccactgagccatctcaccagcccgactttgtcttttaaaaaggtaggaaaaaagctgtgcagtggtggtacacgtttttaattccagcatcctctgcacttgggaggcaaaggcaggccgatttctgagtttgaggccagcctggtctacagagtgagttccaggacagccagggctacacagagaaatcctgtttcaaaaagaaaaaaaaaagtagaaaaaagttgagtggtggtgtacacctttaattccagcattcaggaggcagaggcaggctgatctctgagtctgaggctaccctggtctacggaatagtttcaggacttccaggtgccaggtctacacagagagaccttgttttcaacaaccacaacaaccacaacaactatgaaaggtggtacaggcctttagtcccagcattccggaggcaggtgaatttcttcagctgggttcagcctggtttatgtagcattcaaaaccagccagggctatggtggttcaggccagtaattccaaactttaggaggtaggaacaggaggatcaggtgtcaaggccccagccacatagtcaaatctgtggtagagtgatcagcaaatgcaatagtcctgacttttcacaatctaagtgattcctcagtcagcatcatgagcagagctagaaaacttgcagaccggacagggagagggtgcagaaaacaatgtgattaagttagcaagggtgacccagctggggtggcccattcactgggaatcccagcacgtgtgatgctgggactggagaatggtaagttataggttagcccgggccacagagtgagagcttgctaaaaaaaacaaaagcaggagggaaggtgtggtggtggctggagagatggttcagtggttataagcaccttttgcagaggccctgacttcaggtcccagcacccgcatagtgcttacctattaacactgtggcttacccttgaactcctgatcttcctgtctttaccgtccaagtgttcaaatcacaggggtgctcatgcacgtcgtacgtacgtgtaaatgcacgagcacatggcattcaggtcccagcacctgtaactccaactcctgggatctaacacttatgggtgtctgcacagcctacatctgatacatgcaaactggcataggcacacacacacagatacacatttaaaaaaaggtaaaagctggagactggctcatatttataatcccagcatccttcaggaagctgagcaaaagttgagagttccaggctaacctgagctacaatgagatcctgtcttaaaaaaaagagaagggccgataagatgactcagcctttaagggtgcttgctctcaagctcgctgccctgagtttgacctccaaatcccatctggtgaaaggagaagctcccacacactgtcctgtcctccacttgcatgctgtgccatgtgctcgtgcatttacacgtacgtacgacgtgcatgagcacccctgtgatttgaacacttggacggtaaagacaggaagatcaggagttcaagggtaagccacagtgttaagaggtcagagaaggggggggaggggaccaggaaaaattgttgcattgttgcaagctttaaaattgctgcattctttaaaattgctgcatgcgggctggtgagatggctcagtgggtaagagcacccgactgctcttccgaaggtctgaagttcaaatcccagcaaccacatggtggctcacaaccacccgtaatgagatctgatgccctcttctggtgtatctgaagacaactacagtgtacttacatataataaataaataaatctttaaaaacaaattgctgcatgcttttaaaaagccttccagaagcagaggccggggcaggcagatatcagggagttccaggccagccaggggcacataatgagatcctgtctaaaaaaacagaacgggggaaaggaaagaattggaccggtccaggcacacaagtgatgcacaaacatacatgtaggcaagaccatccaaaaagttaaaagagttgtagagcagtaatggaaaagaaatagaaagacagatttgttcctaattcagaacctgaataaaaaacaaaacaaaaaagccccagaacttggagcgccttagaagtcacgtgacagccaatgcccaagggagaggcgtgtccacggatgaagcctatccggagctgagtcggccagaagcgggaggacggggcggggaggacattggaggaggcggggtccgcttgtgggacaacttcataggaagccccgcctccgtattgggcctggcgggcttcgtctccaccctcgcgaagccgggacacagatctcttcggtttttaggggaagttcatctgaatctcgtgacccggctgtccccgggtcttttagagtccattgctgtcgcctcatggcaacactgagatcgctgctgctggctgcgctgctgtgggtccctgccgaagccctgagctgctatggggactccgggcagcctgtggattggtgagtaagtagtcgcgggactgtcccccgcacactgcctggggaccggcgcgggaatccaaaaaacctcagattccttctctcccccaacctcatgtcttcacggacctccaggttcgtggtatacaagctgccggctcacagcgggtctagggatactccaaagggactgacgtataaatacatggaccagaactccgacggttggcaagacggtgtagggtacatcaacagctcggagggagccgtgggccgcagcttgcagccattgtaccgaaagaactccagccaggtgacttgagtgccgtcggaacccgggccgggacactgtggtgggtctcgcggggaagggagggtagttacatagcctctgtgcattctcctagctggcctttctactctacaacgaccaacctcctaaatccagctcagctcgggactctaccggccatgggcatacgaagggtgagaggcttggactggtggtcgtggagcctccctgaattgtaaattttacccttactaacctttggcctgatgaagggtggggatttgccctgtcactggcctccgtttcccgctctaagaccccagccatctgaggccccgtacctgcttgcaggtgagctagcttgacctcttccttctggttcaggtgtcctgctcctggaccaagaagggggcttctggctggtccacagtgtgcctcgcttcccaccccctgcgtcctctggtgcatacacctggcctcctaatgctcaaaccttcggccagaccctactctgtgtgtccctcccgttcactcagtttgcaaggattggtgagttgaatcactgagaagccaagcctcaaactcctctgaggaaccagtctcacacggctccctcgccttgtcttctaggcaagcagctaacctacacctatccccttgtctatgaccacaagctggaaggcttcttcgctcagaaattacctgacctagagacggtgatcaagaaccaacatgtcctccatgagccctggaatagcagtgtaatactcacttcccaagctggggccaccttccagagctttgccaaatttggaaaatttggagatggtaagccttgatgttgaggggtggggggagggcactttcgttgtagaagggggtccctagtatccctaggcctgcgggcaacacatttagagcccagatgtctttgggagtcatattacaataataactatgagcagtaaacagccagcagacgggttgggcgggtgatacatatctgtgacctcagcactgtgggggcggagatggaagcttgaagtcagccaagacctaggttcaaatgttggtttctggatgtgtaatatacaatacaacctgagcctgtttgctcacctgaaaaattaggatattaagggttcccttagtgggttgtgaaataacacataattgtttggtaaggattccctttaggggtgtggggaggcaggccctcactgtgtatccctggctggtctggaactctcagagagccatctgcctctactgtctcagcgcagactttaaaggctcgagtctccatgcccagcctatgtgtttgtgtaagacctctctgtacattccaggctagactccatctgagagcctcttgttccagcttctgagtgttagggctgcaggtgtgacctgaagagggacctgacctgttaataggggctgcttaggttcacgtcattccaaaagtagacatttgagccgagcaggaagccataccgaggaatgtaccagtggccctcacctcatccttccttcccctgcagacctgtactccggatggttggcagaagcccttggcaccaacctacaggtccagttctggcaaaattctccaggcatcctgccctccaactgctctggagcctatcaggttctggatgtgacacagacaggattccctggcccatctagactaactttcagtgccacagaggaccactccaaatggtgtgtggcccctcaagggccctgggcctgtgtgggtgacatgaataggaacaaagcagagacacaccgaggtggcggcacagtatgcacccaactgccttccttttggaaggccttccagtccctggtgaaagactggaaaccctgtatagaggggagctgactgaagcccatcggagcaaaggactaagactccgcagtctaaccaggtgggggccggactagcctttaccccagcacttgggaggcagaggcaggtggatcgattctctctctctctctggtttttcgagacagggtttctctgtgtagccttggctgtcctggaactcactctgtagaccaggctggcctcgaactcagaaatctgcttgcctctgcctctgtctctttctcccaagtgctgggattaaaggcatgcgccaccactgcccggctcaggtggatctcttgagttccaggccagcctggtctacagagagttccaggagagccagggcaacacagagaacccttgtctcaaagaaaagaagaagaagaaaaaaaaagaaaaacaagaaaaagagaaaagaaagaaagaaagaaaagactcagagactagttttgacttgaatttgtttgtgtgtctgttggtgggttaaacccagggcttaccacatgggacacaagtacagtgctgctgagccacactccctgtcccagctatgaatctgaataccagttcagtcccttcctaactggagaccttaacagtgccttaacctctagctgtctgttgcaaaatgggcatcacagcatgtctctaagaggttgttaatacaaccaactctgtgcatggcactggtaacctttttcttaagatggagcccaagacacagaccaggggtgggacaccttttccttacaaaagctgttaccacgtgtggaattggcagtggatgggacataggaaggccctaatgaaagccaccttcttactttctgagaagccaagggccattcctgtccagagaggaggtgtgaaccccaagaatctcaggcagcatgggcactttatttatatgtgtacatatgtatacaggcatctgtacagcacagcaccgaaagcctgctccgctatggacctagagatgcagggctaggtgccccagttttggtgaggcctgcaggagtcacagcttcagcaggacaccgggagttcaaccctgcttcaggcttggtgcctgggaccatgagggaagcaggtgggactgaaggagctgcactgcggggtacattctttgttgggactagggttggagtctgggggtcaggagagagtttgggggaggcgggcttagagcgaagtccgcttagcgtggtccgctcttccacctcctctagcacccagcgctccctgccccttggggcatcaggcatcagaggcatctgggctacaggttccttcaatcccttggagtctgtgcccagaggctggggtgcctgggtcttgacccctggccgagcaggctctacaacaatgggcaccgggggtgtgcctgcctcaccagagctactgcgccggcctgtctcatgttcctgcactggacttagcgctgccttggccagggccctggccaccccacctgggccatcctcagtctgcacgctctggtgccttgtgcaacccgagtcacgctccagggtccggctcccaggggttgtcgcgcgaggtggggtgcaagcctctgtacctcccgcggaatcctccttgcttgacgccataggtctctggacaccatcgggtagcaacgggtccgcgcccaagcttaggggtgattcctggcgacccaggcgtcgcacggcgacctgccgggtcgccccaggaccctcaataggaggcgtctcaccatcagactcagcgaggctatgcagggccagctcaccatggaagtcctttcggaaatcagggtgtcccacttccaggctgtgtttgcgcagtgcgcccttcttgtctgctcccagcgaagcccctagtttctccgctgactgcacgcgcttgagcaacggcgagcgtggtggctctgcacttttggggcgcgggcgcacgacaggtggcgatgagtgtagtttggcagggaagctctgcgtggtatgtgagctgcccaccgtgtggcctggcagcggcggcggcgacgcctgcgtcggggatggtgtgtgcgctagaggtgacagcgggatgttgccagccgatttacagcgcgctgagcggtactggcggtgtagtttcggtgacagcccgtgcaaggtgctgggcctgatgtggtgcgaggcggatgaggcgggggaattaggcgtgctggaagctggcgagctactctgtgacgaggcgcctgcaggccagagaaggtgcaaacattctgagcacctcagtgtcctagtcccctaccccgcgcaggcgcagaacatacctaggtaggcggagtcaggtgtagagcgatagctatgtgtgggcgagcgtgcgggtagtccgtgcgtgggcgagcccggaagactgtcgctggacgacaaggaccggttcaaagaggacagcgatcgactggtgtgcagcaggttcgactgctttgtgatcttccgaaagagagagctccgcttcttgctggaggacaaataccaaaaggtatttatttgtctttccttaacttcggagctctggatcacccccacccccaccccaccccggttctagactaggcagtaacctcctacctctttctagcatttcccctttccctacaacccgtttatcaaagcagaactagagttctgctcagttctgcttgaccgtgccttctctttttctggctacggtacaatgcaagaaagcccatccaaaaaaaacctccgcctcttctggcccctcccaaacatctagccacactcctttcccctgtaagcccactttacaggttagttcgcttccttcaaatcgacacacgagtcctggtcaaatctctctctctctctctctctctctctctctctctctctctctctctctctctctctctctctctctctctctctctctctctctctcctctgttctgtctctctcacagacagggtcactatgtacttcgggctaccctagaactctttgtatagataggactggctctgcactcacagagatcaccctgcttcttcaaggattaaaggcatgcggccctttgtctttggggctagagagatgactcagcagttaagaaccgtggctgctcttccagaggaccagactggcttttcagcagtatgtggcatctaacaaccacctgtaactctagttccaaagaatctggcgccctcttctggcctctgcaggcatcaagcacacatggagtacacataaacagaagcaatcaaaatgctaatacaaatttaaaacaataaaaactaaaacaaaactggtctgttggggctggagccatggacagttggttaagagggtatattgctcttgatcgcctctgttagacagctaactcacaatgcctgtaactctagcatctaggcaatccaaccaataccctcttctggccttcagaggcacatccacaatcagacacaaacctatacataattaaaatgttttaaaaattaaaataaataagccttttctctttcatctagagaggtggttcggtggtatgaagatctgggttcagtcacacacactcacacacacaccctcccccttaactcttccactctatgagagaagaaattacagtcatgccccatatataaccatttccaaatacccacactacgtaactcccatatggttatatggcctagaattctcataggtgagttgtgtaaattcactgatagaaatcctgaaagtaaggatgcatttgtagtaacacgcctacatcattaaaaaaatgtctggctgtgtttcttgtcttttttccttcctacataggaccacactggcctttagcaaaatccagatactcttgcctcatcctcccaagagctggaattagaggtgccccaactggtctgcttaattgtatcccacgttggactgtcttacttggtcgaaaccttttgttttggttctttgagacagcttctctctacatagccctgccttcaaactcactttatagacttagccctgactgtttacaaactcactttataaaccaggctggccttgaaacgcagagatctgcctgactctgccacttcaccagctattttatttgtttatttatttatttactgatttataaacagtagagtggaatgttgttgaaccttggggactagggactgttggaattgaaggcacacaccaccttgcccagcctttatctcagctcctctactcctgttgaaacaagtctaacctgctcaagggctcactcaaaatgcttttgaatagtttcctttcttggctcctcccactttcccagccttccgctccccaccccacccccatactgttctttcccctaaggtacttgtctgcgcacctctcactctaacactgcccattggtagaaggataagctattatggccccacccacctctcctggccgtctttggccgaaggccttttgttccttcgggccattttggctttgtaactgctgcgcctggcaggcccaatccggatggaagtgttttcaaagggtgtggtggtcacagctactttgttgccactctgggagaagggagggtaactcatttgttagtggctgctgggtcctggtccacaccccccacccatcgaagcccatccctacattcaccttcaggatcagctctaccacctcaggatgcaccataccatgcacgggctcaccattcacgtgagtgatgaggtccccagcacagagccctgcctcttgggctgggcctccttcctccacgtgctgtaaaccaacagggtcatgattgaaagattgttcggacagatccacgttttcttgcgttgactttttatgaagtagtaataactcgtctcccttttgcatagatgaataacttgaggttggagaactaactggaaagagaaatctcacccaaactgcactgtgcaccccaaggctcctttcccccctcattcattgtctgcgcatctcccactctaacaccgcccattggtagaagaagctacttatggccctacccacctctcttggccatctttagccggagaccttttgtatcttcgggccattttggctttgtaactgctatgagactatgagcctatgagactcacccaaacaatgtggtggacactgtagacatcggagtcgcccatgtagacacggatggctcgcagtgtgaacccatatttcttgcctgagcgttggatggtgatgggggaacggagtccactgacagctggtgagtagtctcggctaggcgaagagtcccgtgaggatggattggaggagagagatcgaggggacatgggactagccaggggtgagcctccatgtgggtccactacaggcacaaaaccatgatggttagagatcagggcaaacctcacactctgctcctctatcctaaaaccccagagcgggttcttcattactccaccctgaggccaaacaaccttcctgccacaattgcagggagccccttccctggtgtgtggtgccccacttcacctgcaggaatcatgactgacaaggctgtagctgaagccgacttgataactttgcccccagttcgagacggtcgcttctccacagcaagatccccagacagctgctggtgccttgcccttcgcaaaaccaggtcgttggtggccctagggcctgatgggtctccatccttggagggtgggccgaggtcacctggatgtgagcgctcagctgcaaaggataagagctatcaggtcagggactttcatgtgctgttcttattccttgaacttcacagagcaggtcacaaatacctgtgacacaacctctggcacagggaaagcatcactacccttcagtttggccaaatgctagcctagaacagtgagtgttcgtttgtttgtttgtttgtttgtttgtttgtttgtttgtttgtttggagacagggtctattctagagctcactatgtagaccaggctgacctcaaactcaagagagatcaccactgaaatgaggggctacagtgtgtgccaccactcttggtttagtgctcttattttgtttgtttgtttgtttgtttgtttatggtttttccagacagggtttctctgtatagctctggctgtcctggaactcactttgtagaccaggctggcctcgaactcagaaatccacctgcctctgcctcccgagtgcaccaccacacccggcttatatttatttttatgagtgagtgttttgcctgcatgtatgtatatgcatcgta

SEQ ID NO: 72 - DNA, 27368 bp, Mus musculus
tacgatgcatatacatacatgcaggcaaaacactcactcataaaaataaatataagccgggtgtggtggtgcactcgggaggcagaggcaggtggatttctgagttcgaggccagcctggtctacaaagtgagttccaggacagccagagctatacagagaaaccctgtctggaaaaaccataaacaaacaaacaaacaaacaaacaaaataagagcactaaaccaagagtggtggcacacactgtagcccctcatttcagtggtgatctctcttgagtttgaggtcagcctggtctacatagtgagctctagaatagaccctgtctccaaacaaacaaacaaacaaacaaacaaacaaacaaacaaacaaacgaacactcactgttctaggctagcatttggccaaactgaagggtagtgatgctttccctgtgccagaggttgtgtcacaggtatttgtgacctgctctgtgaagttcaaggaataagaacagcacatgaaagtccctgacctgatagctcttatcctttgcagctgagcgctcacatccaggtgacctcggcccaccctccaaggatggagacccatcaggccctagggccaccaacgacctggttttgcgaagggcaaggcaccagcagctgtctggggatcttgctgtggagaagcgaccgtctcgaactgggggcaaagttatcaagtcggcttcagctacagccttgtcagtcatgattcctgcaggtgaagtggggcaccacacaccagggaaggggctccctgcaattgtggcaggaaggttgtttggcctcagggtggagtaatgaagaacccgctctggggttttaggatagaggagcagagtgtgaggtttgccctgatctctaaccatcatggttttgtgcctgtagtggacccacatggaggctcacccctggctagtcccatgtcccctcgatctctctcctccaatccatcctcacgggactcttcgcctagccgagactactcaccagctgtcagtggactccgttcccccatcaccatccaacgctcaggcaagaaatatgggttcacactgcgagccatccgtgtctacatgggcgactccgatgtctacagtgtccaccacattgtttgggtgagtctcataggctcatagtctcatagcagttacaaagccaaaatggcccgaagatacaaaaggtctccggctaaagatggccaagagaggtgggtagggccataagtagcttcttctaccaatgggcggtgttagagtgggagatgcgcagacaatgaatgaggggggaaaggagccttggggtgcacagtgcagtttgggtgagatttctctttccagttagttctccaacctcaagttattcatctatgcaaaagggagacgagttattactacttcataaaaagtcaacgcaagaaaacgtggatctgtccgaacaatctttcaatcatgaccctgttggtttacagcacgtggaggaaggaggcccagcccaagaggcagggctctgtgctggggacctcatcactcacgtgaatggtgagcccgtgcatggtatggtgcatcctgaggtggtagagctgatcctgaaggtgaatgtagggatgggcttcgatgggtggggggtgtggaccaggacccagcagccactaacaaatgagttaccctcccttctcccagagtggcaacaaagtagctgtgaccaccacaccctttgaaaacacttccatccggattgggcctgccaggcgcagcagttacaaagccaaaatggcccgaaggaacaaaaggccttcggccaaagacggccaggagaggtgggtggggccataatagcttatccttctaccaatgggcagtgttagagtgagaggtgcgcagacaagtaccttaggggaaagaacagtatgggggtggggtggggagcggaaggctgggaaagtgggaggagccaagaaaggaaactattcaaaagcattttgagtgagcccttgagcaggttagacttgtttcaacaggagtagaggagctgagataaaggctgggcaaggtggtgtgtgccttcaattccaacagtccctagtccccaaggttcaacaacattccactctactgtttataaatcagtaaataaataaataaacaaataaaatagctggtgaagtggcagagtcaggcagatctctgcgtttcaaggccagcctggtttataaagtgagtttgtaaacagtcagggctaagtctataaagtgagtttgaaggcagggctatgtagagagaagctgtctcaaagaaccaaaacaaaaggtttcgaccaagtaagacagtccaacgtgggatacaattaagcagaccagttggggcacctctaattccagctcttgggaggatgaggcaagagtatctggattttgctaaaggccagtgtggtcctatgtaggaaggaaaaaagacaagaaacacagccagacatttttttaatgatgtaggcgtgttactacaaatgcatccttactttcaggatttctatcagtgaatttacacaactcacctatgagaattctaggccatataaccatatgggagttacgtagtgtgggtatttggaaatggttatatatggggcatgactgtaatttcttctctcatagagtggaagagttaagggggagggtgtgtgtgtgagtgtgtgtgactgaacccagatcttcataccaccgaaccacctctctagatgaaagagaaaaggcttatttattttaatttttaaaacattttaattatgtataggtttgtgtctgattgtggatgtgcctctgaaggccagaagagggtattggttggattgcctagatgctagagttacaggcattgtgagttagctgtctaacagaggcgatcaagagcaatataccctcttaaccaactgtccatggctccagccccaacagaccagttttgttttagtttttattgttttaaatttgtattagcattttgattgcttctgtttatgtgtactccatgtgtgcttgatgcctgcagaggccagaagagggcgccagattctttggaactagagttacaggtggttgttagatgccacatactgctgaaaagccagtctggtcctctggaagagcagccacggttcttaactgctgagtcatctctctagccccaaagacaaagggccgcatgcctttaatccttgaagaagcagggtgatctctgtgagtgcagagccagtcctatctatacaaagagttctagggtagcccgaagtacatagtgaccctgtctgtgagagagacagaacagaggagagagagagagagagagagagagagagagagagagagagagagagagagagagagagagagagagagagagagagagagagagagatttgaccaggactcgtgtgtcgatttgaaggaagcgaactaacctgtaaagtgggcttacaggggaaaggagtgtggctagatgtttgggaggggccagaagaggcggaggttttttttggatgggctttcttgcattgtaccgtagccagaaaaagagaaggcacggtcaagcagaactgagcagaactctagttctgctttgataaacgggttgtagggaaaggggaaatgctagaaagaggtaggaggttactgcctagtctagaaccggggtggggtgggggtgggggtgatccagagctccgaagttaaggaaagacaaataaataccttttggtatttgtcctccagcaagaagcggagctctctctttcggaagatcacaaagcagtcgaacctgctgcacaccagtcgatcgctgtcctctttgaaccggtccttgtcgtccagcgacagtcttccgggctcgcccacgcacggactacccgcacgctcgcccacacatagctatcgctctacacctgactccgcctacctaggtatgttctgcgcctgcgcggggtaggggactaggacactgaggtgctcagaatgtttgcaccttctctggcctgcaggcgcctcgtcacagagtagctcgccagcttccagcacgcctaattcccccgcctcatccgcctcgcaccacatcaggcccagcaccttgcacgggctgtcaccgaaactacaccgccagtaccgctcagcgcgctgtaaatcggctggcaacatcccgctgtcacctctagcgcacacaccatccccgacgcaggcgtcgccgccgccgctgccaggccacacggtgggcagctcacataccacgcagagcttccctgccaaactacactcatcgccacctgtcgtgcgcccgcgccccaaaagtgcagagccaccacgctcgccgttgctcaagcgcgtgcagtcagcggagaaactaggggcttcgctgggagcagacaagaagggcgcactgcgcaaacacagcctggaagtgggacaccctgatttccgaaaggacttccatggtgagctggccctgcatagcctcgctgagtctgatggtgagacgcctcctattgagggtcctggggcgacccggcaggtcgccgtgcgacgcctgggtcgccaggaatcacccctaagcttgggcgcggacccgttgctacccgatggtgtccagagacctatggcgtcaagcaaggaggattccgcgggaggtacagaggcttgcaccccacctcgcgcgacaacccctgggagccggaccctggagcgtgactcgggttgcacaaggcaccagagcgtgcagactgaggatggcccaggtggggtggccagggccctggccaaggcagcgctaagtccagtgcaggaacatgagacaggccggcgcagtagctctggtgaggcaggcacacccccggtgcccattgttgtagagcctgctcggccaggggtcaagacccaggcaccccagcctctgggcacagactccaagggattgaaggaacctgtagcccagatgcctctgatgcctgatgccccaaggggcagggagcgctgggtgctagaggaggtggaagagcggaccacgctaagcggacttcgctctaagcccgcctcccccaaactctctcctgacccccagactccaaccctagtcccaacaaagaatgtaccccgcagtgcagctccttcagtcccacctgcttccctcatggtcccaggcaccaagcctgaagcagggttgaactcccggtgtcctgctgaagctgtgactcctgcaggcctcaccaaaactggggcacctagccctgcatctctaggtccatagcggagcaggctttcggtgctgtgctgtacagatgcctgtatacatatgtacacatataaataaagtgcccatgctgcctgagattcttggggttcacacctcctctctggacaggaatggcccttggcttctcagaaagtaagaaggtggctttcattagggccttcctatgtcccatccactgccaattccacacgtggtaacagcttttgtaaggaaaaggtgtcccacccctggtctgtgtcttgggctccatcttaagaaaaaggttaccagtgccatgcacagagttggttgtattaacaacctcttagagacatgctgtgatgcccattttgcaacagacagctagaggttaaggcactgttaaggtctccagttaggaagggactgaactggtattcagattcatagctgggacagggagtgtggctcagcagcactgtacttgtgtcccatgtggtaagccctgggtttaacccaccaacagacacacaaacaaattcaagtcaaaactagtctctgagtcttttctttctttctttcttttctctttttcttgtttttctttttttttcttcttcttcttttctttgagacaagggttctctgtgttgccctggctctcctggaactctctgtagaccaggctggcctggaactcaagagatccacctgagccgggcagtggtggcgcatgcctttaatcccagcacttgggagaaagagacagaggcagaggcaagcagatttctgagttcgaggccagcctggtctacagagtgagttccaggacagccaaggctacacagagaaaccctgtctcgaaaaaccagagagagagagagaatcgatccacctgcctctgcctcccaagtgctggggtaaaggctagtccggcccccacctggttagactgcggagtcttagtcctttgctccgatgggcttcagtcagctcccctctatacagggtttccagtctttcaccagggactggaaggccttccaaaaggaaggcagttgggtgcatactgtgccgccacctcggtgtgtctctgctttgttcctattcatgtcacccacacaggcccagggcccttgaggggccacacaccatttggagtggtcctctgtggcactgaaagttagtctagatgggccagggaatcctgtctgtgtcacatccagaacctgataggctccagagcagttggagggcaggatgcctggagaattttgccagaactggacctgtaggttggtgccaagggcttctgccaaccatccggagtacaggtctgcaggggaaggaaggatgaggtgagggccactggtacattcctcggtatggcttcctgctcggctcaaatgtctacttttggaatgacgtgaacctaagcagcccctattaacaggtcaggtccctcttcaggtcacacctgcagccctaacactcagaagctggaacaagaggctctcagatggagtctagcctggaatgtacagagaggtcttacacaaacacataggctgggcatggagactcgagcctttaaagtctgcgctgagacagtagaggcagatggctctctgagagttccagaccagccagggatacacagtgagggcctgcctccccacacccctaaagggaatccttaccaaacaattatgtgttatttcacaacccactaagggaacccttaatatcctaatttttcaggtgagcaaacaggctcaggttgtattgtatattacacatccagaaaccaacatttgaacctaggtcttggctgacttcaagcttccatctccgcccccacagtgctgaggtcacagatatgtatcacccgcccaacccgtctgctggctgtttactgctcatagttattattgtaatatgactcccaaagacatctgggctctaaatgtgttgcccgcaggcctagggatactagggacccccttctacaacgaaagtgccctccccccacccctcaacatcaaggcttaccatctccaaattttccaaatttggcaaagctctggaaggtggccccagcttgggaagtgagtattacactgctattccagggctcatggaggacatgttggttcttgatcaccgtctctaggtcaggtaatttctgagcgaagaagccttccagcttgtggtcatagacaaggggataggtgtaggttagctgcttgcctagaagacaaggcgagggagccgtgtgagactggttcctcagaggagtttgaggcttggcttctcagtgattcaactcaccaatccttgcaaactgagtgaacgggagggacacacagagtagggtctggccgaaggtttgagcattaggaggccaggtgtatgcaccagaggacgcagggggtgggaagcgaggcacactgtggaccagccagaagcccccttcttggtccaggagcaggacacctgaaccagaaggaagaggtcaagctagctcacctgcaagcaggtacggggcctcagatggctggggtcttagagcgggaaacggaggccagtgacagggcaaatccccacccttcatcaggccaaaggttagtaagggtaaaatttacaattcagggaggctccacgaccaccagtccaagcctctcacccttcgtatgcccatggccggtagagtcccgagctgagctggatttaggaggttggtcgttgtagagtagaaaggccagctaggagaatgcacagaggctatgtaactaccctcccttccccgcgagacccaccacagtgtcccggcccgggttccgacggcactcaagtcacctggctggagttctttcggtacaatggctgcaagctgcggcccacggctccctccgagctgttgatgtaccctacaccgtcttgccaaccgtcggagttctggtccatgtatttatacgtcagtccctttggagtatccctagacccgctgtgagccggcagcttgtataccacgaacctggaggtccgtgaagacatgaggttgggggagagaaggaatctgaggttttttggattcccgcgccggtccccaggcagtgtgcgggggacagtcccgcgactacttactcaccaatccacaggctgcccggagtccccatagcagctcagggcttcggcagggacccacagcagcgcagccagcagcagcgatctcagtgttgccatgaggcgacagcaatggactctaaaagacccggggacagccgggtcacgagattcagatgaacttcccctaaaaaccgaagagatctgtgtcccggcttcgcgagggtggagacgaagcccgccaggcccaatacggaggcggggcttcctatgaagttgtcccacaagcggaccccgcctcctccaatgtcctccccgccccgtcctcccgcttctggccgactcagctccggataggcttcatccgtggacacgcctctcccttgggcattggctgtcacgtgacttctaaggcgctccaagttctggggcttttttgttttgttttttattcaggttctgaattaggaacaaatctgtctttctatttcttttccattactgctctacaactcttttaactttttggatggtcttgcctacatgtatgtttgtgcatcacttgtgtgcctggaccggtccaattctttcctttcccccgttctgtttttttagacaggatctcattatgtgcccctggctggcctggaactccctgatatctgcctgccccggcctctgcttctggaaggctttttaaaagcatgcagcaatttgtttttaaagatttatttatttattatatgtaagtacactgtagttgtcttcagatacaccagaagagggcatcagatctcattacgggtggttgtgagccaccatgtggttgctgggatttgaacttcagaccttcggaagagcagtcgggtgctcttacccactgagccatctcaccagcccgcatgcagcaattttaaagaatgcagcaattttaaagcttgcaacaatgcaacaatttttcctggtcccctccccccccttctctgacctcttaacactgtggcttacccttgaactcctgatcttcctgtctttaccgtccaagtgttcaaatcacaggggtgctcatgcacgtcgtacgtacgtgtaaatgcacgagcacatggcacagcatgcaagtggaggacaggacagtgtgtgggagcttctcctttcaccagatgggatttggaggtcaaactcagggcagcgagcttgagagcaagcacccttaaaggctgagtcatcttatcggcccttctcttttttttaagacaggatctcattgtagctcaggttagcctggaactctcaacttttgctcagcttcctgaaggatgctgggattataaatatgagccagtctccagcttttacctttttttaaatgtgtatctgtgtgtgtgtgcctatgccagtttgcatgtatcagatgtaggctgtgcagacacccataagtgttagatcccaggagttggagttacaggtgctgggacctgaatgccatgtgctcgtgcatttacacgtacgtacgacgtgcatgagcacccctgtgatttgaacacttggacggtaaagacaggaagatcaggagttcaagggtaagccacagtgttaataggtaagcactatgcgggtgctgggacctgaagtcagggcctctgcaaaaggtgcttataaccactgaaccatctctccagccaccaccacaccttccctcctgcttttgttttttttagcaagctctcactctgtggcccgggctaacctataacttaccattctccagtcccagcatcacacgtgctgggattcccagtgaatgggccaccccagctgggtcacccttgctaacttaatcacattgttttctgcaccctctccctgtccggtctgcaagttttctagctctgctcatgatgctgactgaggaatcacttagattgtgaaaagtcaggactattgcatttgctgatcactctaccacagatttgactatgtggctggggccttgacacctgatcctcctgttcctacctcctaaagtttggaattactggcctgaaccaccatagccctggctggttttgaatgctacataaaccaggctgaacccagctgaagaaattcacctgcctccggaatgctgggactaaaggcctgtaccacctttcatagttgttgtggttgttgtggttgttgaaaacaaggtctctctgtgtagacctggcacctggaagtcctgaaactattccgtagaccagggtagcctcagactcagagatcagcctgcctctgcctcctgaatgctggaattaaaggtgtacaccaccactcaacttttttctacttttttttttctttttgaaacaggatttctctgtgtagccctggctgtcctggaactcactctgtagaccaggctggcctcaaactcagaaatcggcctgcctttgcctcccaagtgcagaggatgctggaattaaaaacgtgtaccaccactgcacagcttttttcctacctttttaaaagacaaagtcgggctggtgagatggctcagtgggtaagagcacccgactgctcttctgaaggtctgaagttcaaatcccagcaaccatatggtggctcacaaccacccgtaatgagatctgatgccctcttctggtgcgtctgaagacaacagctacagtgtacttacatataataaataaataaatctaaaaaaataaaaataaaaaaaaaagatttaaaagacaaagtctctaggttatatagctctagctggccttgagggtcacctagtgcttccaagtgctgggattaaacacatataccaccatgcacagcggtttgctgttgttgttaactttctgagacatgaagaaaacaaacaaacaaaaaatattcaggaggctgaagcaggtagatctctgagatctcagtaccagcctgatctatagagtgagttcccagacagtcaaagctatacagagaaaccttttctcagagaaagaaagatacacagagagagagagagagagagagagagagagcgagccagaaactgactaaatttcccagtatgactttgaccttgttctgtattacaggccagtgtcaaatttgcctccagcctcagcctcgtaaacagctcagattacaggcctaaactacctctgtgactattgacccactttggccgaggaaatggacatattggacatatgatcacccacatctttaaaatcagcactcaggaggcagaggcaggaggataggatgatctctgtgaggttgatgccagcctggtctacataatttcaggccaaccagggctacatagtaagatcctgtcttaggaagaaaagggagaagggcaaagataatagttgtgagtatctcatcactggcttgacaacaggtgacaggattggaaggctgatcttgatggaggaggctgctggggtgggggtgatggtgggggaaggggatgggggagtgtcatcagaagtgaatgaattttagaaagtttaggaggtgtgtgtacaggtaagtgtgtcacctgccgggggactcaatgcttctcgtaatttccagctccatactacagtgaggcagacactggttttatatgggaaatttttatagtaacgacaacaatcctagcagatgggcacagtgtgaagctcccttctagatcttaggaaatctcaccccagtccatctgcgtccaggacacagggtcactcctctggtctaggggtccatttgagttgatttatctggtggtctatattgctgggtctgtggggccatgtgtggggctccctgaggacatgtgaggtttgtcctgaaggctcctttgtatggtcttctggtcagtttttgatctgggtaggactatataatggcccatcttttgggatacggtccttggatccactcttatttcatccccagtccttgtgcaggatcactcagaggtgacgcttcatgtgcagagctaagtggtcagagcgtgaaaaagcacgtgggcagaggccacagcagaagggacgatgtccagtgtgcttccggtagtggcgcgtcagttcgtctgagcgagcgaacctccagtcacagccgtcccaggagcaggcataaggcttctctcctgaaggacagggagctgtaagtaccaccctccaagcaacccagctccagtttgcacccttgatgaagtagagccaagtcttaggacatacctagcccacacagttaaaaggtcacataatcctgccttctgtgactcaatccttttctgtatctacagctgcaatcctgcagttttctcacttccggtctcctatcccacttccggtgtgctagttccctgcctttttatgtggctgcaccttcgttctttgttctccgcgttgcagctatttcttgctctggcagagcctcccgatgatatccagtcttgttcctcaacttggttcaagcccagaaatccaccccagtgttcaaggccctgtctctggtgattccctctcttcctgttacagcctgttgcgtgccctgccatgcttgggagaccctcagctgtcttccagtcctgggatgaccccgtttctctttctaggccctgtctctcagcatttccttctcttcttttcttttttctttctttctttttttttttaatttatttatttattatatgtaagtacactgtagctgtcttcagtcacaccagaagagggcatcggatcccattacagatggttgtgagccaccatgtggtgctgggatttaaactcaggacctctggaagagcagtcagtgctcttaaccactgagccatctctccagcccccttctcttcttttcttaactctgggacctctgtcagttgcccctgaaactgattttacttgagtgtctcaacctcctgatcccagatggttccagctcgagcatgcatgtaaatactggctatatcctgagctctggcattccaagcttgtacctttcgggttcacccctctagtttcttctcccatctctaacccaggccttacacatccacttctaacaccgaagtccccaaagtgttccccaggtcctctgttacacctatttatttatgaaccaggatctcactaagtagctcaggctgctgaaactcgctataatagcccaaatggcctcgaagtcactgctatccacctgcctctgcctcccgagtgtttgtattagcccatttgggtctggaatcgccccttctagacttgacccagtgtctcaggtgcggtcttcacgacccctagaactggggccgcctttagccacgcctctgactaccctccggcccctcccttcgttcactagcggctcccgccccgcccccgcccgtctggccccgcccttacccgtgtgcgtgcgcaggtgcgccttgaggtgcgagctcttggtgtagctcttcccgcagccttcgtgcccgcacgtatgtgccgcctgcctcttaggtgccaaagttcgccggctgcgtttgggcggcgcagttcccggggacaagcctgcgtctccggcgatcgcagtggccccgagttctgtggccacagtcccaggtcccagacaattcaagaaggaagggggcgccgtgggaccagcagaaggcgccgcgagcccgcgaaagagctggaagtggccttggtactgtggcgcggggtacagcgcggggtatcccgacagcagcccatagggggcgcctggagctgcgggcaccgcaagccccgcccgcgggaagaagccccctacggagcccgctcgcgagtcggagtacgagggctgagccttgggagcgagtcccggggccagggcaggggccacgaagggttcaggggctgggggtctcggagtcgggtgcgcccagcttgtgtgctcctcggagcccaaaggcccagtcaccaaccctgggccacccgcataggcgcccagagactcaggcggctcgaactgtgccactggccccacgctgggcgccagggcacaggtccgggaagtgccgggagactcggaacctggaaagtttgtaaggaaaagatccgggtcccacgcacaggtcacgtccctctcatcgtcctctccggaagggtcctccgatttcagactcacgtgatgggacggccccgtgggattcgggggccccggccccaaatcctgcgtctcctcagaccgccaccactgcgggagggagcgtactgcttgaatggtaggcactgggtacctggccctcaaacaaccctggctggaaacaccgttggtgcctgtcatttacccacacggttcccctaacccctttctcagctccagacaactccattaggtcttgctagagacagctaagacacttaccaagaatagtattcaggatgggagaaggggttgcagagttctgagtcaaaggggacagcttcgactccgttttccctagcctttccctgtcttcacatagcccagaaaattacagctcaaagcctggaaatcccaggacacctttatctggacctttgtctctatgagcctagtctcttaagatatagagcttagaattctgcttcctgttggagaaataggcctcaccttgatctcagacccctagaacatctcccccaaacaaggctcagaggctctcccactcctccacccccaaaaaacagagcagaggatattaaagtaagatagacgccccacccctaagcactatgccctatgcaagaccacctgccccctcccacacactcacactggccccaccttgaggaagtcctcctgggtgtccaggaactgtcccagggtggtgagtgtactgatggagggtaagacagtctcagctgaggccatggctggctggtgtccaccctggacctcaggcctcctctctctcttctgcctcatgggctatgaggctaggaaagtttcttggagggctcctgtctgcccacatctgattggctgtcttccctgataagacccaggcaaagcaaaacggcaaaggaggggtgtgtgcgatatgtgtgtggtgtgcttctttttttttttttttaaggttttcgaaacagggtttctctgtgtaactgagccctggctgtcctggactggcttatgtagaccaggctggcctagaactcacagacatctgcctacctctgtctcctgagtgctgggattaaagttgtgatgtgtcactttcaaggaatagacctcaccctggcctgttttcaaactggtccctgaaaaccaaccctgtatgtaaagtcaatcagatgtcaaggaataggggcttcaaagttttaggattcaggttgggtaaagaaaagtcctggtcgctgctccccacccccaccccacctcccacaggactgagaagacccctctggtttggtttcaagtctctctccaaggagtggaccaggaaggatagatttcttgggaaaggtctttgggaccctttgacccccatggagaccactgcagtccttactctcccagacaacagcagcaacggtgctagtggcgggccttggcaccggctccctttcaggcattatcagacacaccagatgtttcaggccgctatcaggtagggggcccagaacaaccatagctctgttcctccttgagcagaagagctgggggttggtgccacaaattattttagctttgaattgctctgttgtgttgaggtctgagctgtttagcaaaaggagtcccctcaaatcagcccactctggggctctgaggaccctcactggctactgcatggagctgaaggggatggctaggaagtttacagtgtggtgggctaggacccatagatggagctgcagctagtatgccgttcagaagagctcagccctgactctgcctaacggctcattgtgtgcgggaccccatgatagatggcctgctattcccatacttctattctggtgccctatgagtcagggtagggaaatggggtgtcacgggtacaataatatcacacatacaccatcattgctcggtgtccataggggacatcagatccattatagaaaatggtacctagtcaggcatggtagtgatgcctttaatcccagcacttggaaagcagaggctggtggatctctatgaatttgaaaggtctgtttggtctacataataagttccaggacaaccagggctacatagtctttgtctcgaaagacgacaacaagggtaaaacagtgctggggacttagcttcatggagtgcttgcaccgtattaactttaaaagaaaagcataaagacctaggttcagatccctggcactgacacaaaagccaagtgtcactgtgcatgtctaagactagtgctagacagatggaaacgggaagatacctggtgctcactggatagtcagcctagccgatcaggtccagtgtcaggcccagcataggaaataaggtaaagaaaacgaaggaagagaccatcaaccctgaccgctgggctgcacgcatgctcaagcacacactagacacacgccccaacaatcagtgtgctaagacgagtaaccggaggacaacaggctaatggaggagggcaggcaaccatggaaggttacatgcctcattattttgtctatataattgccagaacaggtcaggacgagcagtgcttcccagaggctggggcaggagactgctaggagacaaagtctcatttgggaggacagaaacattctgaaactcagtagaagtgtttgtcacaggacactgtggtgctacattgcccactgaatctgcatttatttattgattgattgattgattgattgtatgagtacactgttgctgtccccagacacaccagaagagtccatcatatcccattacagatgattatgagccacaaccaaagaagacattttactggggcttgctcacattttcataggtgtagtccattatcatagtggggagcatggtggcatgaaggcaggagctggtccaataactgagagaaacatcctgagagagagagagagactttgaacctcaaagccaacctccagcgacacacttcccaattcttacaaccctttcaaaaagtgccactctctggtaattaggcattcaatatatgagcctttgggggccattctgggatttattgtttttgttttttcaagacaaagtctctgtgtagcctggaacttgtttagcagaccaggctgacctcgaactccctctgcttctagaatgctcggattaaaggtgtatgccaccaccatccagctacggggactattctttttatttaattattttattattttatttatgtatatgagtacactgtcactgtcttcagacacagcagaagagggcgttgggtcccattacagatggttgtgagccaccatgtggttgcttgtaattgaactcaggacctctggaagagcaaacagggtgctctttcccacttctctccagtcccctattaggaccatccttaaacctccacagaacctttgataggaaagttttcttatatagccccacctgcacagggcatagtcagattcacaggaattaggggttgaagaggccaagggctgcaggataagggaggtgaccaagtggagaactatacatagtgtcagaaagcccagggtgatgatgcagtccctgttgtataaggggagagtcagaaggttttgttttactgttaagggtgagagagtgtgtgctctaaacaggaccagtaagagaaaggggagaacccaaagagacgataaactacctaagccagtctatttagccacccagacctagcgtctctcctacccaagtgataaagttacgtttgctttctctgcagctcaattttctttctttcacggactttcaatctttcatctgccaggaaaagacctcaagatcccctagacaaccaccagcaccccattagagcaggatctcgtgagatcgtcgtaaagggtgtagctcagagcatgtgcttagcatgcactctggggcagagcatgtgcttagcatgcaccagctctggtttgatgttggggtttgaattaaggtgaattatgtgaagataaagtgaatttgagaaggggcctaggaacatctggtgttgatgtttctcaagaaggatttgtgttacaacataatgtatgtttcaactcctagtggaagggacccaggagtgcctgagaccttcctccatctctagagcatagtcagggtaaatgatgttcccacacctcagatgtttttctgaagacaaataacattgttgtgctttatacaaccttgagcatgctggctgtgagcagccttctctgttaccaaaggagctctaataataaaaatgagccttgtcctgtaaattgggcttaggtgctgggctgtgtaaccaccgtgatttcctgcttcagttcttttggcattaataagaaaggctttagctagcctctcacaaataaataaataaataaataaataaataaataaataaataaataaataaagataataataaaaccaaacaactacaattacagaaaaattaaaacaaaagtttccaaagagaatagccacacccaaatagaaaaccaccttgctgagtactgcctagatacacagtaactaacagagaatacaagcttacactgaactatgtagacaagaaaccatcaagagagccaggtgtggtggcacaggcctggaatcccagctctctggaagcagaggctggcagttctgcaagtggccaacctggtctacaaagtgagttcctggacagccagggcggaacagagaaacctgtctcaaaacaaaacaaacaaataaaagccatcaaaagggttggagacaagcctggcaggctggaaaaagccttaaatcccagcactcaggaggcagatacaggcagatctctgagttaaagatcagcctggtctaaagagcgagatccaagacagccagggctacagggagaaaccctggagggggcagggctggaggctttgcagaggattccaggcatccacagagggtttctttgattaacaatccaggctgtcctggaactctttgtaaaccaggctggccttgaactcacaaaaatctgcctgcctctgccaccatacctggctataaataaatctttaaaacaatattttaaaccctgtaagactgagctgggtttgtagttcagaggtagagtgcctgcttatcctgtgctaggtgctaagtttgattccccaggatagaagggagggaagagggaggcagggactcatgtttcattcacatgaacagtcagagtttctgtcttctctcagtcacccacagtcaacagagacataggaacagtcaggactcaagcactggggtttgttgtgaggtgttcaccagagaagactgctcggatataagttcaagccaatagaaggtctttattagctggctgatgtctacactgagtgttcagggtctcagtgtagccatgagcctttttcagggtgagcttttttttttttttttagatttatttattattatatgtaagtacactgtagctgtcttcggacgcaccagaagagggcatcagatctcattacggatggttgtaagccaccatgtggttgctgggatttgaactcaggatctctggaagagcaatcagtgctcttaaccgctgaaccatcatctctctagccccctagggtgagcttttaatcataaaaaacatgtcctgggttggcacacttaggttaacaggaacaggcctttggcaggtatttctgtctgcctgctgagttctacagactgaatggcacttccatcatggagtcagttgtgctaaggtctggagtcctgtttcaggttgaggttgtaaatcaatgctggagggcttgtttagtgtttctgaggccctgggtttaatccatagtagtagcaggagaaggagggccacagaaggtaaaggtatttcccaccaagcctgaaaacctcagttcctccttgggactcatagtggtgggagtgagctgacacacacaggagtgacttggtatgtacatacacagtaaacaaatacaactttctgaggaggaggaaaccatgtaggagctggagaattggccctagtggtgaagagcactcgacagagcccaggggtggtggcatacacctctagtcccagcacttgtaaggaggaggcagagccaggtgcatctttgagttcaaggccagcatggtctatagagtgaattccaggacagccaggtaaagtggaaacttctcgtttctctggagggttggttgtgtcaaatgatgttttgctggggcacacaggtgaaaggatgtcttgttaaagcaggcaggtgaagaagtgttttcctggggtggacacagatgaaaggatgctttgctatggcagacatgtgaaaggccacatgatgaaggagtataaatatgactccacagatagtgggagagagagctggagcattggtttgctttgctccacctcagtcttcttcactaatgacatgcttatattggttcgccttatatagtgttgttgagctccacttgtggcacagccattgagagaaactcacccaagaacttatgaggttcctgtggcagcttgccactgaagcagccgtggccagttggcaagcctttcggcttcctcaggattggactacagctgctggttcatgcgtggtgtctgcctgcagagaggatgaaactactgctgctgcttcctttttggtatttgccacagggctgaactgctgccaaagaagattgagctagcccccgaagaactcttgctgtagggatccacttcctccatatcctaataactttcccactacctctggtgagtggtgggcaaggggagagcttgaatgtttattaaaataggctgtaaaaaaatttatacctacagtcagggctacacagagagaccctatctcgtaaaacaaacttcgatggactgatcttgactgttctagcaagatagaaggtcataagtctaatttatattcctgtttttgtaatcaaacttccttattccactcaaaaagatgactagggcaactataagacatatgttaaaactacgcccttcaggatatctataatattgtggagtttgactttataagccttttgtagatctggctaggggagagtgctctcaggtgcagccctcatcccacactggaagccatacctaaataagcctcttcttattaaaatttatttatggttatggtgaatctctaaggaacctgactgtaacagaggccctgtgttaaatgggcctgcctgagagactgtccagcaggtcaaggcacttgtcaccaagcctaaacacctaaggtggatccctaggacacccatagtggaaggcgaaatgactcttgaaagttgtcctttgtcctcctaaacatgggacatggagagctgtgcatacattgcgtgctctctctctctctctctcaccccccacactaaatagataaatgtaattaaaaaatgaaaacaatgccgggcgtggtggcacacgcctttaatcccagcactcgggaggcagaggcaggcagatttctgagttggaggccagcctggtctacaaagtgagttccaggacagccagagctacacagagaaaccctgtctcgaaaaaccaaaaaaaaaaaaaaaaaaaaaaaaaaaaaaaaaaaaagaagaagaagaagaagaagaaaagaaaagaaaagaaaacaactggaggaatatagtttagttcagtgatgcagtatttgttgagcttgagtagaatgctaggtttgcttcctagcacttcacacacacacacacacacaccacaagatacacttgtaaagatgactatcatagtagctttcacccacacacagctacaagaggagacatagccagttattttattttatttatttattttttttgagacagggtttctctgtatagctctggctgtcctggaactcagtctgtacaccaggctggcctcaagctcagaaatccacctgcccctacctcccaagtactgggattaaaggcgtgtgccaccactacccagctacatagccagttacaagatagaaatacaaccccataaaatgcgttacaggaaagtccaaatgacaagttgctgccctcagactttgacaactgagaagaggatcagaagaatttattactcacaagcccagaggagaaacctactgttggtctgagcaattgcacagatgggtttctataacatttatagttataacattattgctaagccaataatcttcattggtgccttaaactaaaaaccataaaagggtcgatgtaagtctataaggggaagtctctctgtgtggttggtcagtcaagcacttttgagaatcagatattggagctatggttagagctttctctttttgaaggacaattgttagatggctgctttgtcaggataaccagttactatttctcaggagagtttatacagttatgcccccccttcttttctattcttgtcttaattttctccaaatcagtgcatactccaatagaaactgtaacatccaagacacccagttataacatattctagattattctgcacaacacccagaaggtaggagaaccacacaggtacacagaaatgcagttactttgccacagaagatcacatccttccacgaagtacacacaaagcaacaagttgggatggggctcaccacctttctctctgcaggcaccccatttgcggatttcgcaaggtctggcctccaggcgttcttattgaacttgggatcccgcttctcaggctctgggcaactagctaaccaggaatgggcggggcagaaatacagttggccaatcgggtttgcacacttgtttccgccccttcctggttctgctgtttaaaggagagacctgcctgggcatggaagaacccgcttgcaaaaccaggcagctgccttggctcttttaaaaggcagagccacagaggaggcggtgttctgggaggaaccaaggaggaaccaatgagcaacccctattaggcctagtgtgctggtcccggagcacagcccgcaagcaccaggtatgaagggtatggggtgggagaaggctggtccccgctgacgctcagcccttccaggttatggttcctgcaatgctcaccggctacatgtccctgagaggagtctccgcgcggttgctgagccgcaggtccggcctgcgcttcccgcgttttccacgtacctggagctcggcggccgcccacaccggtcagtgcaaggctctggatgggtgggcagggagacacaggacactttctcagtgtggcgttctcgtcctttgtttgcagagaagacacagatccgaccggccaaatgtaagatcacctacccacctattcccagtccagctgtttctctgacccatgctagtccatgaatgcaaggacttctgggaagggaggctgggttatccccagggtcagaagtctaaagtagagggtatttgtttctacttggctggagaggggttgcgcttgtcagactgttttgaagccagaattcacctggagcgagatggggggcggggaatgggtacagcttaaaaatgtgaaagaggataaggggttctggctgactcgacccccatactctacccagcctctcgccccgtgtttgactggaaggacccactcatactggaggagcagctgactgccgatgagaaactgatcagggacaccttccgtaactactgccaggagcggcttatgtctcgaattctgctggctaatcgaaatgaaggtgccttggtggaagggtgggcatgctgggtttcacaaccatacatgatttgcatgtgctgcagtccctggagtcagggactccatgagactgagacagggtctgattctgacacccatctctgcagtttttcacagggacattgtgtatgagatgggggagctgggcgtgttgggacccaccattaaaggtaaggacatttctgtgtatactatgcagcctatacccacctacaacatcttgaaggaccatcccttttcctcagtcacgcatttcatctgtaaaatgggcaatggttatctctcctgaaaacagctgtgggtttgagaggaacaaagtcctaaccagggcagccccctgcccacttccagaagggccatattacagccctactcagtcccagggctgatctttggcctttggtctacccgttcttcttttgcaccagggtatggctgtgctggtgtgtcgtcggtggcctatgggctcctgacccgagagcttgagagggtggacagtggctacaggtcgatgatgagtgttcagtcctcccttgtcatgcaccccatctatacctatgggagcgaggaacagcgacagaaatatctgcccggactgggtaagcagctgttgccaagaggaggaaagtcagatgtcggtctggaatgcaggtcccgcctggtgtccctccacagcctgccttctttcctacagaccacctgtgtccatgtcaggtcctaggactcagttgtcttccttgatctcctgccagcactgtcggttcctctctccccccaaccctttgattttacctctggtcaccatcatctccccttggatttgttttctaggcctctcacccctgtccaaagtttaaagtcttaactgctaaccagatccacgaggctcatgagcggacctttcctctacttctttggctactcagattttatttgtagatatggtctcactgtgtagccctgtttggctgggagctttgtagaccagtagcatcaaactcaaaggtctacatgcctcggtctcccgaggagggacagcttggattaaaggcatatactatcatgcctatccttctggctactattctgattctgattgctcagatactggggattctccagtcaccttggtgacaactgttcctcataccctccttcaaactggatgtggtggcatacccctctaatcccagcagtctagaggccagcttggtctctgtagtgagttgttataggacagccaggggtacacagtgagaccacctcaaaacaaacaaacaagccaggtgccaccacacctttaatcccagcacttgggaggcaaaggcaggcagatctctgaatacaaggtcagcctggtttacagagtgagttccaggacagctagagctaagaaaccctgcctcaaaaaacaaacaagggctggagagatggctcagtcgttgagaacactgactgctcttctagaggtcctgagttcaatttccagcaattccatggtagctcacaaacatctgtaatgggatcccatgtcctcttctggtgtgtctgaagacagctacagtgtactcatataaataacataaataaatcttaaaaaataaacaaaagcaagtaacaagaaaaaaaaactctcaaacttcataccttccttcagctaaacctcttagtgcccttcaagatactcttgccaacccctttctttctggcatccttcacattataatttgattatggaccattttctcagcagctcactgagtgccatgatgcagggtgtatctgcctttattcaggtctgactcagtgagaagataatttatcaggagataaatgagaccctctcttgtgcttacagccaagggtgaacttctgggctgctttggacttacagagcccaaccatgggagtgacccaggtggcatggagaccagagctcgccacaatccatcaaaccagagctacactctcagtgggaccaagacctggtgagagacccaggtagactggtgggtgagaaggtgtgtacatggaagcagcagtcagatctctctataactctctggcctccaggatcaccaactcccctgtggctgacctatttatagtgtgggctcggtgtgaggataactgtattcggggcttcatactggagaagggtatgcggggcctctcagcccctaggattgaaggaaagttctccttgcgggcctcggctaccggtatgatcatcatggacagtgtggaagtgcctgaggagaatgtgctgcctaatgtatccagcctggcggtatgtggtaggcaccttgggctctagtaatggggcacctgctggctcacctttctcaccttttctattgattgattgtatatgagtatactgtatctgtacagataatcgctagccttcatctagttgttgggaattgaatttaggagctctgctcgatccagtcaaccctgctcgctccagcaggccctactcactcagtccctgctcactctggcccaaagatttatttattattataaataagtacactgtagctgtcttcagacgcaccagaagagggcgtcggatctcattaagggtggttgtggggccaccatgtggttgctgggatttgaactcaggaccttcagaagagcagtcagtgttctttttttttttaaagatttatttatttattatatgtaagtacactgtagctgtcttctgacacaccagaagagggagtcagatcttgttatggatggttgtgagccaccatgtggttgctgggatttgaactaaggacctttggaagagcagtcgggtgctcttacctgctgagccatctcaccagccccagtcagtgttcttaatggctgagccatctctccagccctttctcaccttttcaagtgtagagcaaacatagtccttgtggttatggagcattgtgaagttagtgatcctccctgttcacagatgtgctaagttcacctttccagttaccacttagctcattatctctgcccaaaatgcatcttggccttggaccacttactactctgtatgcatgagtagctt

SEQ ID NO: 73 - DNA, 28915 bp, Homo sapiens
ggagtttgagaccagcctaaccaacatggagaaaccccgtctctactaaaaatacaaaaaaattagccgggcatggtggcccatgcttgtaatcccagctattctggaggctgaggcagaagaatcgcttgaacccaggaggcagaggttgcggtgagccgagatcaagccattgcactccaacctgggcaacaaaagtgaaactctttctcaaaacaaacaaacaaacaaacaaacaaaaaaattagctgggcatggcggcacatgcctgtagtcccagctacttgggaagctgaggaagaagaatcacttgaacccgggaggcggaggttgtagtgagtcgagatcgtgccactgcactccagcctaagcgacagagtgagactccctctcaaaaaaaaaaaaaaaaaaattagccaggcatggtggcgcgtgcctgtaatttcagctatgagcgaagctgaggcaggagaattgcttgaacctgggaggtggaggttgcagcgagctgagctcatgccactgcactctagcctgggcgacagagtgagactccatctcaaataaataaataaaattatatatatatatatatctcaagcagttacacaatccatccatccatccacccatacgtacatacaggccccaagattcctcactagccctgttcagctgggtgactgcttttcccccagcctggacagaaggttagaggtttactctctggggaactcgatccaggggctctgaactcagagaagccaggcacagctgaggataggttactcagagagcagtcatacagcaggcttcctcctctgggtgggctccaggagacactggctaactcccttacttagctgcacaatcctgggctggatttaagcactctatactgcagtttatttggttgtttttattttatttttatttttattaatttatttttttgagatggagtctccctctgtcacccaggctgaagtgcagtggcatgaccttggctcgatgcagcctccgcctcccaggttcaagcgattctctgcctcaatcccaagtagctgggattataggtgcacaccatcacgcccggctaattttgttcgttttgttttgttttgagaaggagtttcgctcttgttgcccaggctggagtgcaatggcgcgatctcagcccactgcaacctccgcctcctgggttcaagtgattcttctgcctcagcctcctgagttgctgggattagaggcgcccgccgccatgcccagctaattttttgtatttttagtagagacagggtttcaccatgttgaccaggctggtcgcaaactcctgacctcaggcgatctacccacttcggccttccaaagtgctgggattacaggcatgagctaccatgcctagctaatattgcagtttttttaaaactgtaaaatggggtttatgtattaaacaagtatgtattgagcacctattatgtgccagcaaactgtattacattctgtaataaaaataagtcagttacttcctgctgacaggtcaaaaaaaaaaaagtaagtcagccaggtgaggtggcccacgcctgtaaccccagcactttgggaggctgaggcaagaggattgcttgagcccaggagttcaagaccaacctaggcaacacagtgagaccctgtctctacaaaaaaatttaaaaataagctgggtgtggtagtacatgtctgtggtcccagctactaagcatggtgagataggaggattgcttgagccagggagttcgaggctgcagtgagccatcattgcgccactgcactccagcctggctaacagagcaagaccttatctcaagcaacaaaacaaaataaaacaaaaacttatgattaaaaagaaagtaatggctggtcacagtggctcacgcctgtaatcccaacactttgggaggctgaggcagggggatcacctgaggtcaggagtttgagaccaggctgaccaacatggtaaaacactgtctctactaaaaatacaaaaattagtcgggatgggccgggcgcggtggctcacgcctgtaatcccagcactttgggaggccgaggcgggcggatcacgaggtcaggagatcgagaccatcccggctaaaacggtgaaaccccgtctctactaaaaatacaaaaaaattagcggggcgtagtggcgggcgcctgtggtcccagctacttgggaggctgaggcaggagaatggcgtgaacccgggaggcggagcttgcagtgagccgagatcccgccactgcactccagcctgggcgacagagcgagactccgtctcaaaaaaaaaaaaaaaaaaaaaaaaaaaaaattagtcgggcatggtggcatgcgcctgtaatctcagctacccaggaggctgaggcaggagaatcactggaacccgaggggcagaggctgcagtgagccgagattgcgccactgcactctagcctgggctacagagcaagactctgtctcaaaaaaaaaaaaaaaattagctgggcagggtggcgcgtcctctagtcccggctactcaagaggctgaggcgggagaaccgcttgaacctgggaggcagaggttgctgtgagccgagatcacaccactacactccagcctgggcaacaagagtgagactctgtctcaaaataataataataataaataaaaataacataaaaaataaaaagaaagtcatacaactgtgatatatcagtttttaaaatatacacacacaaaaagagtatattttaaaatatacacacacaggcagcgtctctgccccctgaagcctgcattctagcagcaatggcagcaccaacctcagagaagtaatgtgaagacaagtaacttaatgcatgaaagtacttatcgcagttacctggtacagcgtctgagagcagtgatgttaatgaatttgaaggtccctgctccctccttttcctggagggagaacccagcagaccctttcagtacccttctaggaaagacaaggttagaactttgctaacactgtcaatgactatagaattcttcaatgttgaatttgactttgaaattatctttcgtccaacctaactcttgactggcttatcaagggtcaaggtcactgtctttagggatttgacatagccacaaaaggcctttgcaagtcatggagtgaccctaggaagtgagattcccaggttaatgtataccttccctacttaaaacagtgtctttgtgagattttctgtgagcctggtctttggttgtggatctgtagtgacactgaaatattttggggaaagaaaatactgtgacaaagcatttcactcttcaaaccaagatattatatcatcttccagtgctgaatactgcaggaccaatttgaagttatcaaagggggattaactgtgtaaggtttcactggtagaggggacacactaacattaatgccagtatctcacttaatgctcacactggccttggaagcaggtacattcgtagacccattttgcagacaaggaaagtacagtgcaactagatgatgtagcttgtccaaggtcacctggcttgtaagatgcaactcagggcctggagtccaaacccttgcgtggcagatcctacctatgcccccagagtctgtgcactattcatccctgtcatttcttctcccacagcccagagaattctgtcaagttctcctccttaattgagttacggcaagatggctctaagaattaaagtcagacaaggacactctaatctgcactcagatagaccaaagatattgtcttgtctttaaagaaacccaaatgagcttcttttcaaatggaaaactgagtttgctgaatgaaacatcagaacattgaaattcaacactttgctctgagaactgttaggtaaatgtagcaaccagaaaaattcatcaataactgacaccatagaccaagttcactctttcactagattaccttttttattatcaatgataatgctgggaattcttctaagattaggtaactattccaggggcttccccctttaagaagcttctggtcatccctggatataagaggagtttgcatctagattcgagtttgaataaggcatcacacactgtatgagatatttagttgctgccagaacattcgtttggcttttttttttttttttttcctccacattggcactcgctagcccccttcccactagccaggacattaaaattgattaacaaacacaatgtttgtgaaaaaaaagtcaactacagggtaataaaatgcattcttaatttttttttaaatcatttccctggctcaaagtacataatttcaaattggcaaaaataagctcccctcttgtccagcccacaaactgaaagagaattaaacacagaattgtttttttcttgtttgcatttctcagggtgtgaagcattcatttttgtaccttcaacattcctacattttccataaaacaaaaatgttacctccaatccaatctaaacctagggactttgttttcctcagaagaacgacgttgtcttagtctaagaatctgaggcactgaggcttttaaataaaggaagtagactcttggttctcttttcagagataattctcccccaggggaagcaggcaaaacttggtgaaccaagtgaagaagaaaattccagcaacaggtttttctctgcccactgacttctttgctggttcatttaagtacttttattctttcattaaaatttaaatacttttaaaatttgctagttcatttacttttaaatgtgtttcaaatgcatatagtattggagtcatgctctacgaagatggtaaatgctagcctgcaatttcttttattaaggaaaatattactgagatgcccctcactcttacaaaatgttttgttaagggaaatactactgagatgtacctcactcttacaaaatatttctttttttatttttgaggcggagtcttgctctgttgcccaggctggagtgcagtggtgcgatcttggctcactgcaacctccgtctcctgggttcaagctgttctcttgactcagcttcccaagtaactgggactacaggcatgcgccaccacgcccagctaatttttgtattttttagtagagatggggtttcgctatatgttggccagtctggtcttgaactcctgaccttgtgattcacccacctcggtctcccaaagtgttgagattacaggtgtgagccattaaaaaatatttctctctgcttaaacagacatttaaaaataagcaacctggccgggtgtggtgactcatttatttattaaaaaataaataaatacataaataaataaagtaaaaaaaatcagcaacctaaaaagagggattttttttgtatcctttttaatatctcagaacaagttgaggacactgaaaagctgaatttaatatattgcagtcagaatatttcaaaagtcttgaaaataatttcattaattttagattttatttttaaatagcttaaaggatgtattgggcctaagttttttgagctaagaatgtaacttaagtgatcaaacctaagggttcacgaaaaagattctaatgaaatttctgagaattgatttttaaatgtctgtgattcattttctgctctaaaaacttcaacccttaaggtttgggttttgaaaggcaatgaatttggctgcagaaaagagtggactctttctccatttggttttggtttggattttggttatttttgtttgtgttttcaagtttgttttattacaatgccttggccagcactgttctattactttgtccaactgtttttgagagtacagagttatgaaggattttatttccttcataactttctttgaaaagttttccttcatagaacttttcaaagaaagagatgaagtggtgaagaaagagaagggatggaaaatgaagtaccaaaccaatgaccctctcaactagagagaaatgctattgacaaggaccaggtcccctgactccctccctgcctctaccccattaatagtttaccaagtcagttttgctctcttcattcattctacaattaatggtcattgggcatttgtcctgaagatgccataggggaacaggagctacaaacaaccagatcatgcaagtccactgggtaaacatcctagcagtcattacacagctttgttagagctcagagaaaaaaggactggcttaaaagggaactcatagaccaaggaacaattaagagggactttttggagtttgggtacgatgagggccctgaggggagaaagggcatttcagacaggaaaaacagctgatgaaaatacacatcctgtattcagggatttgagagaacatccagttaagagtttagagagggtgaggtcagtctctagagaagattctggaaagtttgtctagggccagagtagtaagtgttgggtacatcaagccaaacagtttggttttattcctctaggcaaagtggagctgttgaaagactggctggtggggaggtgagtagagacagaactgtggtggtctgttagcaaaatggattagatctagctggagaatgccagtggggctctgagggaggagacaagaggactatttggagtgtacagacataattaaatctgtaaatgaggctgggcacagtggcttacgtgtgtaatcccagcactttgagaggtcgaggtgggtggatggcttaaacacaggagtttgagaccagcctggccaacatgacgaaatctctatcaaaataaaaaaaaaaaaaaaagaatcagtgccacaagatactcgctactcgggaggctaaggtgggaggatcgcttgagcccgggcagtggaggttacagtgagccaagatagtgccattgcactccaacctgggcaatagaatgagacccgtctcaaaacaacaacaacaacaacaaaaagctgtaaatgaggcaagcttaaaccaaagcagcccgagagtagtaaaaagatagtggggatatttaggaatggaaatggctgagttttgtagatgtctggatgctcaggtcaaagaaaataaggcaggagttgaagaaaatctaggtttctgtcttagaaaccggggagagaatgacgaaattttaaatctgggtgtgttgcggttcttgataagaaagaggattaatgagtctacagtggatgctgaaagatgagcttcctgctaatggattattcaaaaagaaaaaacacattaaatatgcattattcattcactcaacaaacacttacagggcattaccatgtgctaggtaggcactataataggacttggggatatagcagtgaacaaaacagtagcctcagcctcatcatgtttatgataccctggggaatactgatgatagtaatagctactatgtgttgagtgttaagtctgtgctaaatactttactttagattatctgatttgatcctcatcactctaagaagtaggcattattaatatccccattttacagaagaggaaacaggcaaagtgcaaagtgaggtcagtaacttgcccagctagaaagcagcagagtcatgttgggaaacacagagtcaaagcctactttcctaacctctaaagtctacacaagacagagggtaaaaagaggctggcattcttatggttttaggtctaacatttaagtctttaatccatcttgaattaatttttgtataaggtgtaaggaagggatccagtttcggctttctacatatggctagccagttttcccagcaccgtttattaaatagggaatcctttccccattgcttgtttttgtcaggtttgtcaaagatcagatagttgtagatacgcggcattatttctgagggctctgttctgttccattggtctataatgagaacacatggacacaggaaggggaacatcacacactggggactgttgtgggcgggggggaggggggagggatagcattaggagatatacctaatgctaaatgacgagttaatgggtgcagcacaccaacatggcacatgtatacatatgtaacaaacctgcacgttgtgcacatgtaccctagaatttaaagtataataataataaaatttaaaaaaaaaagaggctggagttcacaaggagatgagggtggagactgagaaaagctttgccaccttgtgaaagctgcaagctccttttacagttatttattagcagggatttcatttcaaagcaattcgggtacttaaaatctatctcttgttttcacttttttaaaaagcagtttttcaggcagggcgcagtggctcatgcctgtaatcccagcactttgggaggcggaggcgggtggatcgcccgagctcaggagttggagaccaccctgggcaacatggtgaaacccccatctctactaaaatacaaaaaattagctgggcatggtggaacgcgcctgtagtctcagctactctggaggctgaggcatgagaactgcttccacctccaccctggaagtggaggttgcagtgagccaagatcacgccactgcactccagcttgggctacagagtgagattctgtctcaaaaaaaaaaaaaagtttttttttttttgagtttttcttgagtcctgcggcagttatgcagagacacccagccagggtgcagccaggtcacggggtgctctatgtgtccagaccccatacccagttatgggtgctgaatctttcatttgaaacatggatgcagcttcttcagtctatcacacccctccatggctccacattaatcccctagcactaatggtgttcatcacatcttctgacaactaatgcagtttgtgctggaaaaaaaattattttataactccaaggacattaataattaacttctagtccacaaaactagtaatatcagtttgctgaaataaagtcaccagtgagtgtttcattcttctttaaagggtgtcttctattattattattctacagtgcaatttagtcatcaaaggtttactcagcctcatgtttataaattatatagggcaaggatttaagtcttctggccctacctgttctgaagacagggagggccataaccttgttgtcatacagggcacctgccttgagagatgatttgtgaacttgaagtttcttgcttcttttagaaatctggggtgaatatacagatttccctttgtgacgcaatcagaggaataaccagctagttgcctgccacgaagagagactggcttttatccttcagaaggccggttggaaacaagttcatctttttcaatcgagtttcagaatcttgtcttgattatgtgacataataatggtggctttccaattcttctgtgcaatattgttttttcattgtggtggttacagatagttttttttttgagggggaagggctactgccttagagaaataaaagtaaagcagaaataatctagtgtgctgcctacctaagttggaaattccaagtcctgacccacgtttacatcccaagggagatggctgccaatcaagggctcatccactgttcatccagggtgagggactttggctttcctgaaaaagtggtgagtttcccatgcagccctcaaatcacagcatcccaagatgttgccatcacaattaaaggagtaggggaggaagtggcaggtgtcttccttttttggttcctccgtttgaaaagggcttaaagtaaaaatcagagttaaagtaactggcctgatcctatataggggggtggggttgaactcctcgaggtcataggaaggaggacctcggtttccctgccaaaacactctcatcccccagctgcaaccctggcagcccttggccagagccaagctagaggatggaagtcacactcaagggcgtccgactctggatcttagagggattcctggcgttggcagggagggccgagtcaattcattcggggcgagatgcattccaagaatgcttctgtggtcggcgaggagtggaaaaatcaggtatcacaaatattctgaggaaacctaataggtaccagaatcgcagggttcaaacaggtgacaacgacaaaggacattggcaactagaactcaaaaaggggtgagcgcactctctgcccggtgcccgagcttccaccactttccccagtgtcccctctcttctctttcctaggttgacaccagcctaagcgccagcgttcgccggtgagggggctccgtggagaggggggcggagtcccgcgccgaacgccggaatccaaagtaaacacctcgccaaacctacgtttagaaagtgataccgaacaccacattcacgttttaaaaaaaaatactgtttgctaagaagatgagagcaaaacatttcccagctggaaaattactgatcacaaaccaaggggagagtgggggtgggggaggcagcgttataagattgaagtaaagatcgccgtttcctattcccttcccggtgggcaaggacgcctgcggcgggctcggtgtgcactttttgagagctaggatcccaccgcatcgctccacttcctggcacatggtcacttcccagggaagtccctttaggggggcctgacctacccggagcctgagccgaaggaacgagttgtcctttgacctttactggccatttcacctctttatgactcaatttctcatccataaagtggaaaggagagtgcgtggcttgaaaagtcatcagtgagtgtttaattcttctttaatgggtgtcttctattattattattattctacagtgcaatttagtcatcaaatattacaggcagtggctcacgcctgtaatcccagcacttcgggaggccgaggcaggctgatcacttgaggtcaggtgttcgagacctgcctggccaacatggtgaaaccccgtctccacgaaaaatacaaaaattagccggcgtcgtggcgcacgcctgtaatccccgctactcgggaggctgacgcaggagaatcgcttggacgcaggaggcggaggttgcactgagctgagatcgtgccactgcattccagcttgggcgacacagcgagactctgtctcacaaaaaaaaaaaaaagaaagaaaaaaaaaggaaagggcttcgagatggctggttgaaaactgtctccgcgcctcacagtccctcttctctcccttatgcctctgagtaaatcttgagccctttcactccctttctcgctatttaaagtatcaaaaccataactccccattcgtgcctctttccgcctgttcccggcggaacactcctctggccttctcttgaggctcccagttcacgctgcacagtgctgggcactgcctcctctccacacccctagcgccccccacccctcagcagaagggcccgcgaggaaccgtgcgaggtcaggccgagcgccggcaccgccaccggcactggcgctgagcgacgagagcggactcctgcgagcgcagagagggagggggagatggagggctggatgagtcacgcggataatcgcgctcttctccagcgcgcagacagcgcggcaagcgcgtatgctagcaggggtgcggacgcgtgaccgtgccgcccgctgaccccaccagtcttcgcgggcttcgaacccagggagccgacaatggcggtgagtacggccctggtcgcgcagcgaccgaacctgcgcccggttcctcgcgccccgcgctggggcggacgccgccgccgccgccgacaccactgccgccggcgtcagctcggctccagcccgccagctgcctggctggcgtcacggcccggcccagccccgcccgcgcccctccttcccctcccccgcccccacgtgcgccgagtttgttgatttagctgccatagcaacgatggaagggagcctcggggggggcggagagaagaaagggaggggcggggcatgggagaaggcggaggaaaaggctgtagcgaaggaagttataagtaaggaacgcgcgccggcggccggcagtttcccgaccagagagaacgaacgtgtctgcgggcgcgcggggagcagaggcggtggcgggcggcggcggcaccgggagccgccgagtgaccctcccccgcccctctggccccccaccctcccacccgcccgtggcccgcgcccatggccgcgcgcgctccacacaactcaccggagtccgcgccttgcgccgccgaccagttcgcagctccgcgccacggcagccagtctcacctggcggcaccgcccgcccaccgccccggccacagcccctgcgcccacggcagcactcgaggcgaccgcgacagtggtgggggacgctgctgagtggaagagagcgcagcccggccaccggacctacttactcgccttgctgattgtctatttttgcgtttacaacttttctaagaacttttgtatacaaaggaactttttaaaaaagacgcttccaagttatatttaatccaaagaagaaggatctcggccaatttggggttttgggttttggcttcgtttcttctcttcgttgactttggggttcaggtgccccagctgcttcgggctgccgaggaccttctgggcccccacattaatgaggtaggtgaggcgcgcggcgctgggagcagggaggggtgaggaccggtgggacgcgccggaacgacggccgaaagccgcccctgactctcctgtctccgctccctgccttgctcgcaggcagccacctggcgagtctgacatggctgtcagcgacgcgctgctcccatctttctccacgttcgcgtctggcccggcgggaagggagaagacactgcgtcaagcaggtgccccgaataacgtgagtatcgctccgggccgccgggaacgcccggtgggttttcgtgggtgtggtgggggcgggcggagccttggggtcaccaagagccactgaacgagggtaaggagcggccaccgcgcggactccgcaaccttcccgggatagcttccgtgtccttggctcagctgtgtatgcccgtggtgcgagcactgcggagccgcctggggcgcaagccgggtcttcaccagtccccgggcgcgctgtcggtagggcgggcgctctcgggccaccgggcgggaggtggccgcgtccccagacactggctgggccagagtgagtttagcgcgtaggcggccccgtggcgagagcgcaccgagagagcctcggtgtgccaattccggggacgtccacgggacctggagggggagggaccagccgcggcgctcgctcacacgcaattgggcagacaggacataacacccgcaatacagacgcatcacctcttcttcgacccgggagtgggccgagattgcagcgctggcgccctgggttcccgggtgcttcctgcctgaccagtccccatgtctgggcggtgcagtcgcgcgtggcccgccagcacgtcagtatgtcgggtggcaacaggggaccaccactgacaggtctctcccgccctgtccccgcagcgctggcgggaggagctctcccacatgaagcgacttcccccagtgcttcccggccgcccctatgacctggcggcggcgaccgtggccacagacctggagagcggcggagccggtgcggcttgcggcggtagcaacctggcgcccctacctcggagagagaccgaggagttcaacgatctcctggacctggactttattctctccaattcgctgacccatcctccggagtcagtggccgccaccgtgtcctcgtcagcgtcagcctcctcttcgtcgtcgccgtcgagcagcggccctgccagcgcgccctccacctgcagcttcacctatccgatccgggccgggaacgacccgggcgtggcgccgggcggcacgggcggaggcctcctctatggcagggagtccgctccccctccgacggctcccttcaacctggcggacatcaacgacgtgagcccctcgggcggcttcgtggccgagctcctgcggccagaattggacccggtgtacattccgccgcagcagccgcagccgccaggtggcgggctgatgggcaagttcgtgctgaaggcgtcgctgagcgcccctggcagcgagtacggcagcccgtcggtcatcagcgtcagcaaaggcagccctgacggcagccacccggtggtggtggcgccctacaacggcgggccgccgcgcacgtgccccaagatcaagcaggaggcggtctcttcgtgcacccacttgggcgctggaccccctctcagcaatggccaccggccggctgcacacgacttccccctggggcggcagctccccagcaggactaccccgaccctgggtcttgaggaagtgctgagcagcagggactgtcaccctgccctgccgcttcctcccggcttccatccccacccggggcccaattacccatccttcctgcccgatcagatgcagccgcaagtcccgccgctccattaccaaggtcagtcccggggatttgtagctcgggctggggagccctgtgtgtgctggccccacttcgggacacacgggatgatgctcaccccaccttcttcacccctagagctcatgccacccggttcctgcatgccagaggagcccaagccaaagaggggaagacgatcgtggccccggaaaaggaccgccacccacacttgtgattacgcgggctgcggcaaaacctacacaaagagttcccatctcaaggcacacctgcgaacccacacaggtagggggacaaactgcagaagggaggggggttagcttccagccccataggctaccagtggacactcctcagtgcctccttgacttcccaggttagcttccagccccataggctaccagtggacactcctcagtgcctccttggcttcccagggcagtctatcgccttgatctccgggatcactggagagaacagcaaaccggcgcctacttttctgcccaggagccttttgcttgatggatggtatctgtgtttgaatgtgcaattttgttaggcttttaaaaggcaggagattccccgcggtctgtgggcctctcctagcttggcattataatcaagaaattatactttgctatgcaaaagcatgatggcttttttaaaaaaatcgttttttaatgttcccttcccaggttcaccctccctttttgttattttgaattctggtcgtaacaattcggtcttacttttttattttttattttttgttcgttttgatttacatttttattttttttcccccacaagcagaaggttttattttaaattccaagaatatgatggtcaaaattgctgggaagattctgatttagggttgtcactgcagagcatttccatgtcaatgtaagtaggtacccaaagtcgtttaggtgcagcattcagtaacgtaaaggtaaagaaaaaaaaagtagccacctgtggctttttatccccagtcgtagtaggaataagattgcatggtttgggcacactaccaatcacaatttccaaatttcatttccaccactgagatgccttgactcaaatgaaacattagtataggtttaggtggtgtttgtgtgtttttggtgaaacattagtataggtgtaggtggtggttgtgtgcttaactgaccccctaaaaacaagaccaaatacttaagcacggaatgtatttctgtttatgatatggaattcaatacaccccttcagtggtataaagacattcctggatttctttaggatagggtcagagttggtttactatctggccttcagtttttaaaaggggcgattctttgatatagcaatagcgtcaattttttttttcttttacctttacaggtgagaaaccttaccactgtgactgggacggctgtggatggaaattcgcccgctcagatgaactgaccaggcactaccgtaaacacacggggcaccgcccgttccagtgccaaaaatgcgaccgagcattttccaggtcggaccacctcgccttacacatgaagaggcatttttaaatcccagacagtggatatgacccacactgccagaagagaattcagtattttttacttttcacactgtcttcccgatgagggaaggagcccagccagaaagcactacaatcatggtcaagttcccaactgagtcatcttgtgagtggataatcaggaaaaatgaggaatccaaaagacaaaaatcaaagaacagatggggtctgtgactggatcttctatcattccaattctaaatccgacttgaatattcctggacttacaaaatgccaagggggtgactggaagttgtggatatcagggtataaattatatccgtgagttgggggagggaagaccagaattcccttgaattgtgtattgatgcaatataagcataaaagatcaccttgtattctctttaccttctaaaagccattattatgatgttagaagaagaggaagaaattcaggtacagaaaacatgtttaaatagcctaaatgatggtgcttggtgagtcttggttctaaaggtaccaaacaaggaagccaaagttttcaaactgctgcatactttgacaaggaaaatctatatttgtcttccgatcaacatttatgacctaagtcaggtaatatacctggtttacttctttagcatttttatgcagacagtctgttatgcactgtggtttcagatgtgcaataatttgtacaatggtttattcccaagtatgccttaagcagaacaaatgtgtttttctatatagttccttgccttaataaatatgtaatataaatttaagcaaacgtctattttgtatatttgtaaactacaaagtaaaatgaacattttgtggagtttgtattttgcatactcaaggtgagaattaagttttaaataaacctataatattttatctgaataatgttttttattgttttgttttcctcctggaaaaatatgaacagtgtttggtttaaacacaccgggttaataaggcatgtaagaagcacgcacaaaaaagccaactttatgtcaacaaattaaaatacctttttttattaaaaaaaaactatttagttttaccataaatactatcaatatagggctgagaactcttgattattgtacgtttaaaaattacaagattaaaaacccagttcaggtttgctctttccaaatgtacgtaaagctacgtgaaagcagtttccttacctatgattttcccagtagaaacagcttaatcatccttaaatttgctcagtttagtatgaaaatatttatgaaatatatacatttcagtttcatatttgaaaaaaatctttatggtttgtcttttaaagtaaataaaaataaaaaagttttctgtggaggcctgtcccagcacccctcacatctgagtaacaaaagaaccttcctacagcagacaaccctaagaacgtagttccacagtgccctcctgaggattaaagggttcatttatgcttggtgtgtgttaaagatacatcacttctactagttacagccttaaagaggtcagaaccaaagtttctggcagattgttttaaagctaaatcagttcccctgactgaaggtgggaaaacaaactgaaataaaataatttaaaaattattcaaattcataaaactaagtgtaaagtaagatggtgttatggtaagtttgtagcgtttatattagaagttttaatattaaaactcaaaactgccctgttagaatctgaagttcttgagatgggtgcctgaaagattgaaattcatttggggctatcgcaaaatggaaaaagcatttgtgacacttgttgacaccttatatacttgtaatagtgatgtgggtgactaaacatcatcaaggggacagagctcactgctcactggcattttttttagagtgcttattaactattgattgtatctagtgtccagaggtgcgtttgtaccatgggtacatgtaataaatgaaataaaaaatggatgtttataagaggcttatggtagatcagcacaaggtattttctttggcttttgagagtccaccatgactggaaagcatagcatgtgtctctgcttaaaagaaaacaggtgcatcaataggatggaattttatgtggccaagaacatattcaaagcatatttaatgacatggaaaaatgctcatagtaatgttaagtggaaaaagcaggatataagactatcaacagtaccaattcaactgtgtacatttaagtgtatgtgtgctttgaaggagagagagagaaacaaaaggaaattaagagaaaaccctagaaggaactgccaaaatattcatactggttttctcagttttaattttcttttctttttttttgagatggattcttgcttgtcaccaaggctggagtgcagtggtgtgatctcggctcactgcaatctccacttcacaggttcaaacgattctcctgcctcagcctcctgagtagctgggattacaggcgcccaccaccacacccgacgaatttttgtatattcagtagagacagggtctcaccatgttggccaggctggtttcgaactgctgacctcaagtgatccgtccacctaggcctcccaaagtgctgggattacaggcataagccaccgtgcccagcctaaattttcttttttgaagttttcaaatattctaaaacagctatagtaagtttgaaaaactttttcataagaatgaagatataaagaacaattaaaattatttaaacaaaaagccctcattagaacacattattctgtaaattatgtttagatttctttaagtttaaatttcttaaatttctgttaaattgtggttggttgcttttgtaatccacctctgttatacagaatcttttggcacacggtgtatgaaaatgactgaaaaatgccatctttatatttgctaagtgcatattatctcgaatagaagaaacatgcataaactatcaagaattttaaatttatttaaaattttctgatgtcatagattaacattcctctacgttaactttttctttattcttaatttttatttaattctttttcttcagcttttaagttcagggtacatgtgcaggatgtgaaggtttgttacataggcaaacatgtgccatggtggtttgttgcacctagatattaaacccagcatccattagctattctaactgatgctccctctccccaacccctatttttttaatttttaatttaattttaaaaaattttatagaggcagggtctcactatgtcgcccaggtttggtctcgaactcctgagctcaagcaatcctcctgcctcggcctcccaaagtgctgggattacaggcatgagccatagcacccagcctacattaactttttctagcctgaaaaagaaagcttcaatatctaaaatgaatgaggaagatttcccaaaactgtgaccaaacaaaatactattcgacatacgccaatagctaaattatttactctgggacctatcagctgtgggctcctaggtgtgctgtcattatggtgttacagagccgtttatacactatacaataaagagtacctaataattgtgatgcctgcttattatattttccttatgacacttaattttactgtttcttattttaacttgtgtgcctacacacacaaaggattaacaatgatgtttcctacacacatcaacagactttcagtccacctattttccagcaaaatgtctcttctgataaaattctttctgcctgaaaacgtatttgactcttgctatcctgtttcagtttgtaaaacaaaacagatgctttcactatctcaagtaggatggtcatgaggaatatttctttttcttccaaaaattgttccaggccgggtgtggtggctcacacctgtaatcccaacactttgtgaggttgaggtgggaggactgcttgaggccaagagtttgagagcagcctgggaaacatagcaagacctcatctctatcaaaaaaaaaaaaatcaatgaaaaagtgttacaatttttagaaacatgaaatgctcttcacagttggagattgataatttttacatataatttatttccatataaggaagcccaggggaggtagtctttatgctacagaagcaagtccacagagaaaatattaaaacaagcagtggtggtacctgttgtacttcaacaaatgggagtatctaaatttagcagcctgtatcagccacctgtcctattaaatgttctggcttctgaagctccattcaacacaacatacatacatagatggatttgtagcctagatactccctcacccactcttgtccatttatttccctgtctctcatacagacatgaatgccacccagtcccacataaacccttttactttatgtattattcttatcattttattcatgattttattacatattgcgttttatctatttgttttacttctttgtattttcgtagcaccttctacaggctattgtatagtgacatgtttttatagtgctaaaccgaagctatgtctgcctcctaaaggttgtttatgaaactatcattcattgttcacacgcagagtcattcaataatatttcatataaaacctccaagaccagtctatataatgaatgctgtaaaaaatatcatggaatgttctacctgtgggggggaggaaaaccacaaactactgttaaagttagaatactgcatgaaaataaaaactttttttctacattaaatgaaactaaaatgaaagttggaaagtttccctttggaaaactttatcttaaacagcaaggtgaatcttgagtaaatttctcaccatctcctgaaaaactaataaattcttaaatccatttgaagaacctggtgctttactcccctggtcacagtcaaaacagagggaaagcaactgctaaaatgttagcatacacagaaaaatctttcaggctggaatcaaggctaccacagccagttaacttagctggggaggaacgggtgcatggggttgaaatattagtcaaactgcttctctggagtcatgtgcatctggagcccatctttttaattgttttccacggtgcccttgatataatatacttttttaaattgcttcggtcttctcgacaccctagatgagtcagcatgttgcaatcattcgcccaaatgtctttctccacttggtcttttttttttttttttttttttgagacgttgctctgtcgcccaggctgcagtgctgtggcgcaatctctgctcactgcaaccctccgccacctgggttcaagccattctcctgcctcggcctccagagtagctgggactacaggcaagcaccaacacgccaggctaattttgcatttttagtagagacggggtttcgccatgttggccagttctcgaactcctgacctcaagtgatcctcccgcctcggtcccccaaagtgctgggattacaggtgtgagccaccacgcgcggcctccacttgttcttaaaggaaaggaggaaataaacaaattcaatttaataacagcaaaaagtaaattcacagttagaaatccctttgacatctcacctgaggatacctaacacaacatttttcttttttttttttttttttttggtattattagtagagatggggtttcaccatgttggccaggctgttcttgaattcctgacctcaagtaatccacctgcctcggcctcccaaagggttgagattacaggcgtgagccaccgtgccgggcctgcttttgttttttgtaaagacagggtctccctatgttgccaaggctggttatgtttcttttcatgtccattttacatgttataataatataatctaagtagagcaggaaacaagaaagttaggtttttagatagagagagaggaccagaaggtcaagtggggctataattcctgtctcacgtataatatttgaatctgtactaactggcactggatcaatatattactaaatagtgtccaaatccccatgatacaaaaccaatgcactcaggtgctatacctatatatccatttaaaagcttaaagagcaaataactttatggagaaattggagaaaccctgaatacacttgctgagagaccaggagatggtaattggtacaaactatgaaagaataatgtcttagacatgacaaatagaagagattttatctgtaaggacaagcatgcttcttgcctgctccaggtcactttttgttggtgtataacaatcccttctgcacagctctatgaggcttacaaagtacttacaccctacattacctcaatcttacaaagtagggatgggattttcctctcccatctccagtatgcggatgaagaaactcaggttccctttacaggttagcattttgctgtcacttctcattcttgctgacatactcaaagcacttcttttctaatacctttgtttcagtctgctgggcaggtagggctacaggtataaaggatccaccccaattcaaaaggatttgctaacgtccaggttcttccagtaaacctgtttaagagtcaaaagcctcagactttctgtctccctatcaatgtactatctcctttgtcaaagtagacagatagggaaggcagagtttcctgcagatgtttcttcagctggggccactatgccatgtacacagttcatactttttgttctgaagttcttgtttctggcctcacctctggcccagcacatagctctcctggtcaaatagatctggtcaagcccttcccctattctgtaacttcccatggtccccagtgcttagtggatatagatttaacatggtctcttccctatttgtggcttccagctgcttgttcaagatcctatctagggccgggtgtggtggcttatgcctgtaatcccaatactttgggaggccaaggagggcggatcacgaggtcaggagttcgaaaccagcctggccaacatggcgaaaccccggctctactaaaaatacaaaaactagccaggcgtggtggaaggagcctgtaattccagctactcgggagtctgaggcagaagaatcgattgaacccaggaggtggaggttacagtgagctgagattgtgccattgcactccagtccgggtgacaagagcaagactccgtctcaaaaaaaaaaaaaaattagctgggcatggtggcaggagcctgttatcccagctacttgggaggctgaagtaggagtattgcttgaacccgaggtggaggtggcagtgggctgagatcatgccactgcactccagcctgggcgacaagagtgaaactccgtctcaacaacaacaataacaaaagaccctatctagttcctccttagataaacctgccatgctcaacaacttctggtcctccagtgcacatggctgtttcagcatttgaaacttgcctgcagatactggtctccactgcttctggaaagacccctactaccctgacaaaagcctatatgtctcttaaaagcccagctcttaagaatacacctccattctatttagatcttgcattaaacccttattcgtgtgtattacaaggttatgtggggtttttctgtgtattttgtttgtttgtttgagacaaggtcttgctctgttgcccaggctgaagggcagtggtgcaaacatggctcacagcaacctcaaactgctgagctcaaatgatcctcccatctcagcctcctgaggagctggaaccacaggcatgtgccactacttctggttaatttcattattatttttctgtatagatggggtctcactatattgcccaggctggtctcttaactcctggcctcaaacgatcctcctgctttggcctcccaaagtactgggattacaggtgtgagccactgcacccagtctattataaggtcttatgggtctggcttcccctaaagacatgagcttctggagggcactaggaggtttcttgatgtgtccttgaataccctcagttactaaacttaattgaataaaagtaatcattgactgaatatttagccaaaatcctgggttatccaaggaaaggataaaatatctcctttccccaaattttggcatcctggaggacaggcccagtggtctctcaattgcttcctgtaggtcgcctgacatccatctgccttcctcaacacacaacaaacccctcaaatgaacaaaactctttccagagtcaatcccacactttgggaggccgaagtgggtggatcacttgagatcaggagttctagaccagcgtggccaacatggtgaaaccccatccctattgaaaatacaaaaattagccgggcatggtggcctgcacctgtaatcccagctacttaggaggctgagacaagagaattgcttgatcctgggaggcagaggttgcagtcagctgagatcacgccactgcactccagcctgggtgacagagtgagactctgtctcaaaatcctggcatctcctttttgtgaactcttccttgccatgtaattctctgcattgactctggaaagagttttgttcatttgaggggtttgttgtgtgttggggaagacagatggatgtcaggtgacctacaggaagcaattaagagaccactgggcatgtcctccaggatgccaaaatttggggaaaggagatttttttttttttgagacagagtcttgctcagttgcccaggctggagtgcagtggtgccatctcagctcactgcaagttccacctccccggttcacgccattctcctgcctcagcctcccaagtatctgggactacaggcacctgccaccatgcctggctaattttttttgtatttttagtagagacggggtttcaccgtgttagcctggatggtctcgatttcctgacctcgtgatccacctgcctcagcctcccaaagtgctgggattacaggcatgagccactgcacccagcagggaaaggagatattttatcctttttttggatgacccattgggcctcctttcaagaaaaaaggtatgtgtaccatggacatatgacaaataatgaaggctaaaaaaaaaaagaaaaaaattgcactttaaaagcttaggccaggcacggtggctcacgcctgtaatcccagcactttgggaggccgaggcaggtgaatcacttgaggtcaggagttcaagaccaggctgaccaacatggtgaaaccccatctctactaaaaatacaaaaatcacctgggcgtggtggtgggcacctgtaatcccagctactcaggaggctgagtcaggagactcgcttgaaaccgggaggcggaggttgcagtgagccaagatcgtgccactgcactgcagcctgggcaacagagcgagactccatctcaaaaaaataataataaaataaaataaaagctaaaagagggtactttcctgacctcatgatccacccgcctcggcctcccaaagtgctgcgattataggcgtgagccaccataccagctaaaagagggtactttctactctaggatattgagtgggccagtctgcccaaacaggaaggtttagctttgggtgctgtgaaaccctcccatttggtttgctccaattcaagcttgagactcttctagtttgcctggatgacagtagttttctgacctctgaatacatctaaataaactcactctgacagtgcgcggaattgaccattgccctgcctttgaggcactgttaccgcctcacctaggaatgggtaacattgcaaggactgaagctgtaaaattacgtaggtagctcacaactataatgccaatactttgggaggcagaggtgggaggatcacttgaaaccaggagttcaaaaccatcctggtcaatatagggagactctgtctctccaaaaaataaaaaataaaataaaaaaataacaaaattagccaggagtggtggcatgttcctgtggttctggctcctcaagaggctgaggtgggaagatcccttgagcccaggaggctgaggctgcagtgagctatgattgttttactgcactccaacctgggtgacagagcaagaccctgtctcaaaaataaaataaaattacgtaagacgtttgaaaaggaaagcatcttcaagaccatttaactcaaggaaaagacccagataaaggacttgtgaccttgcccaaggtcacatcaagttgacatctgaggaaccagcacctagatctgatttacttaacaggccaatcatccatggcttcatcctaacagcccaagggaagcttagaggaatcaagatgatcaaaaacatcttgctggctgggtgtggtggctcatgcctgtaagcccaacactttgggaggccaaggtgggtggatcacttcagatcaggagttccagaccggcgtggccaacatggcgaagccctatctctattgaaaatacaaaaattagccgggcatggtgtcgtgcaccagtaatcccagctacttaggaggctgaggcaagataattgcttgaacctgggaggcagaggttgcagtgagctgagatcatgccactgcactccagcctgggtgacagagtgagactgtctcaaaaacaaaacaaaaccaaccaaccaaccaaacaaaaaacaccatgctcacctcggcagcacatatcctaaaattggaaaaatacagagattagcatggcccctgcgcaaggatgacatgcaaattcgtgaagtgttccatatttttctgttcttgcacaggctcttaagcaacatggaaataaggttgatggaaaataaacatcagtttctaaacaaacaaacaaagaaacaacaacaaaacaaaaaacaccatgcagaaaagatggctttcagaggaaagttctgtttttttgttttttttcctttttttgagatgggggatgaggtctcaccctgtcacccaggctgagtggtgcaatcacagcacactgcagcctcaaccgcctgggctcaagagattctccctctcagccccccaagtagctgagaccacagacatgcaccaccatacctggctaatttttttaaaaaattattttgtagagacaagggtatccctatgttgcccaggctggtctctaactcctgggcttaagggcctcgacctctcaaagtgctaggattacaggcatgagccacagtgcctggccctggaaagttctaaattcaatgtaatgttgtgctctaacatccaaaaaagtattttactgtgctttatcatccttctgtatagtgctctgttaccggccagctaggacaggactactcactggtcactgtgttccctctagagagaacataggaaccattccctcaaaatgtgatagtatcattctggctttgttccactttctctttccatgcaattgattcaaacacatgtaatcaattcaaggatctactttactagccactgtgcaaagggcaggagaagcaaagatgagtaagaatctgtaaatatggccagtcgcagtggctcacacctgtaatcccagcgctttgggaggccgaggcgggtggatcacctgaggtcagaggttcgagaccagcctggtcaacatgatgagaccctatctgtacttaaaatacaaaaatgagctgagtgtggtggtgggcacctgtaatcgcagctacttgggaggccgaggcaggagaatcacttgaacccagaaagtagaggttgcagtgagctgagatcatgccactgcactccagcctgggtgacagagtgagactcagtctcaaaaaaaaaaaaaaaaaagaatacgcaggtttacagatactgtttcctcctgcaactgctctgcaaagggcataaagtgtaagttaaatgaaaatcagctttctagccccagtaaaaaaattgttacctttcttaaaaaagtgatacatgattctttgcaagactcaaccatgttaactacaaccacatataccattctcccccctacaattttcttgattgcttcttcttcttcttcttattttgagactttgtcttgctctgttgcccaagctggattgtagtggcgcaatcgcagctcactcctacctctgcctcctgggttcaagcaattctctgcctccacctcccgagtagctgggattagaggtgcccaccacggccagctaatttttttgtatttttcgtagagacagggtttcaccatcttggccaggctgatcttgaactcctgacctcatgatccacccaccttggcctcccataatgctgggattacaggtgtgagccaccgtgcccggccgattgcttattattttttagatacatttaacttgtttatcgggtgcatgttaaggcatattaagatgtgtttttcagattcagcatgaaggttttggccctattcaaaaatatcacaaaattctgttggaattaataatttggtcagaatgggtcttaattttcaaaccaagacaccttgggttgctatggattggaaactgcatatctagaccacgagaacacgtgattttgttttaagcacaattaactttacagcgagagagcataactgacatcacatatagctctcgctgtgccaaagcccacagaaagagaagaggctttgcctaggggattctttgcattaacgactttgttagacaaagccactctggcatgggaattggatttgcaatttgggtctttgtaaaaggattagatgatctctattgtttaatgtttggatctcaatttgcatttggaaacacatgaccccattggaggtttagttctcttttattttcatgttcttgttctgatacacaaatgatactatttgttaaaaagttgataaaactgcttggtcgaatggttgtactgattaggaagtgtgatacgttgatcttctctgtgaatggtgga

SEQ ID NO: 74 - DNA, 28915 bp, Homo sapiens
tccaccattcacagagaagatcaacgtatcacacttcctaatcagtacaaccattcgaccaagcagttttatcaactttttaacaaatagtatcatttgtgtatcagaacaagaacatgaaaataaaagagaactaaacctccaatggggtcatgtgtttccaaatgcaaattgagatccaaacattaaacaatagagatcatctaatccttttacaaagacccaaattgcaaatccaattcccatgccagagtggctttgtctaacaaagtcgttaatgcaaagaatcccctaggcaaagcctcttctctttctgtgggctttggcacagcgagagctatatgtgatgtcagttatgctctctcgctgtaaagttaattgtgcttaaaacaaaatcacgtgttctcgtggtctagatatgcagtttccaatccatagcaacccaaggtgtcttggtttgaaaattaagacccattctgaccaaattattaattccaacagaattttgtgatatttttgaatagggccaaaaccttcatgctgaatctgaaaaacacatcttaatatgccttaacatgcacccgataaacaagttaaatgtatctaaaaaataataagcaatcggccgggcacggtggctcacacctgtaatcccagcattatgggaggccaaggtgggtggatcatgaggtcaggagttcaagatcagcctggccaagatggtgaaaccctgtctctacgaaaaatacaaaaaaattagctggccgtggtgggcacctctaatcccagctactcgggaggtggaggcagagaattgcttgaacccaggaggcagaggtaggagtgagctgcgattgcgccactacaatccagcttgggcaacagagcaagacaaagtctcaaaataagaagaagaagaagaagcaatcaagaaaattgtaggggggagaatggtatatgtggttgtagttaacatggttgagtcttgcaaagaatcatgtatcacttttttaagaaaggtaacaatttttttactggggctagaaagctgattttcatttaacttacactttatgccctttgcagagcagttgcaggaggaaacagtatctgtaaacctgcgtattcttttttttttttttttttgagactgagtctcactctgtcacccaggctggagtgcagtggcatgatctcagctcactgcaacctctactttctgggttcaagtgattctcctgcctcggcctcccaagtagctgcgattacaggtgcccaccaccacactcagctcatttttgtattttaagtacagatagggtctcatcatgttgaccaggctggtctcgaacctctgacctcaggtgatccacccgcctcggcctcccaaagcgctgggattacaggtgtgagccactgcgactggccatatttacagattcttactcatctttgcttctcctgccctttgcacagtggctagtaaagtagatccttgaattgattacatgtgtttgaatcaattgcatggaaagagaaagtggaacaaagccagaatgatactatcacattttgagggaatggttcctatgttctctctagagggaacacagtgaccagtgagtagtcctgtcctagctggccggtaacagagcactatacagaaggatgataaagcacagtaaaatacttttttggatgttagagcacaacattacattgaatttagaactttccagggccaggcactgtggctcatgcctgtaatcctagcactttgagaggtcgaggcccttaagcccaggagttagagaccagcctgggcaacatagggatacccttgtctctacaaaataattttttaaaaaaattagccaggtatggtggtgcatgtctgtggtctcagctacttggggggctgagagggagaatctcttgagcccaggcggttgaggctgcagtgtgctgtgattgcaccactcagcctgggtgacagggtgagacctcatcccccatctcaaaaaaaggaaaaaaaacaaaaaaacagaactttcctctgaaagccatcttttctgcatggtgttttttgttttgttgttgtttctttgtttgtttgtttagaaactgatgtttattttccatcaaccttatttccatgttgcttaagagcctgtgcaagaacagaaaaatatggaacacttcacgaatttgcatgtcatccttgcgcaggggccatgctaatctctgtatttttccaattttaggatatgtgctgccgaggtgagcatggtgttttttgtttggttggttggttggttttgttttgtttttgagacagtctcactctgtcacccaggctggagtgcagtggcatgatctcagctcactgcaacctctgcctcccaggttcaagcaattatcttgcctcagcctcctaagtagctgggattactggtgcacgacaccatgcccggctaatttttgtattttcaatagagatagggcttcgccatgttggccacgccggtctggaactcctgatctgaagtgatccacccaccttggcctcccaaagtgttgggcttacaggcatgagccaccacacccagccagcaagatgtttttgatcatcttgattcctctaagcttcccttgggctgttaggatgaagccatggatgattggcctgttaagtaaatcagatctaggtgctggttcctcagatgtcaacttgatgtgaccttgggcaaggtcacaagtcctttatctgggtcttttccttgagttaaatggtcttgaagatgctttccttttcaaacgtcttacgtaattttattttatttttgagacagggtcttgctctgtcacccaggttggagtgcagtaaaacaatcatagctcactgcagcctcagcctcctgggctcaagggatcttcccacctcagcctcttgaggagccagaaccacaggaacatgccaccactcctggctaattttgttatttttttattttattttttattttttggagagacagagtctccctatattgaccaggatggttttgaactcctggtttcaagtgatcctcccacctctgcctcccaaagtattggcattatagttgtgagctacctacgtaattttacagcttcagtccttgcaatgttacccattcctaggtgaggcggtaacagtgcctcaaaggcagggcaatggtcaattccgcgcactgtcagagtgagtttatttagatgtattcagaggtcagaaaactactgtcatccaggcaaactagaagagtctcaagcttgaattggagcaaaccaaatgggagggtttcacagcacccaaagctaaaccttcctgtttgggcagactggcccactcaatatcctagagtagaaagtaccctcttttagctggtatggtggctcacgcctataatcgcagcactttgggaggccgaggcgggtggatcatgaggtcaggaaagtaccctcttttagcttttattttattttattattatttttttgagatggagtctcgctctgttgcccaggctgcagtgcagtggcacgatcttggctcactgcaacctccgcctcccggtttcaagcgagtctcctgactcagcctcctgagtagctgggattacaggtgcccaccaccacgcccaggtgatttttgtatttttagtagagatggggtttcaccatgttggtcagcctggtcttgaactcctgacctcaagtgattcacctgcctcggcctcccaaagtgctgggattacaggcgtgagccaccgtgcctggcctaagcttttaaagtgcaatttttttctttttttttttagccttcattatttgtcatatgtccatggtacacataccttttttcttgaaaggaggcccaatgggtcatccaaaaaaaggataaaatatctcctttccctgctgggtgcagtggctcatgcctgtaatcccagcactttgggaggctgaggcaggtggatcacgaggtcaggaaatcgagaccatccaggctaacacggtgaaaccccgtctctactaaaaatacaaaaaaaattagccaggcatggtggcaggtgcctgtagtcccagatacttgggaggctgaggcaggagaatggcgtgaaccggggaggtggaacttgcagtgagctgagatggcaccactgcactccagcctgggcaactgagcaagactctgtctcaaaaaaaaaaaaatctcctttccccaaattttggcatcctggaggacatgcccagtggtctcttaattgcttcctgtaggtcacctgacatccatctgtcttccccaacacacaacaaacccctcaaatgaacaaaactctttccagagtcaatgcagagaattacatggcaaggaagagttcacaaaaaggagatgccaggattttgagacagagtctcactctgtcacccaggctggagtgcagtggcgtgatctcagctgactgcaacctctgcctcccaggatcaagcaattctcttgtctcagcctcctaagtagctgggattacaggtgcaggccaccatgcccggctaatttttgtattttcaatagggatggggtttcaccatgttggccacgctggtctagaactcctgatctcaagtgatccacccacttcggcctcccaaagtgtgggattgactctggaaagagttttgttcatttgaggggtttgttgtgtgttgaggaaggcagatggatgtcaggcgacctacaggaagcaattgagagaccactgggcctgtcctccaggatgccaaaatttggggaaaggagatattttatcctttccttggataacccaggattttggctaaatattcagtcaatgattacttttattcaattaagtttagtaactgagggtattcaaggacacatcaagaaacctcctagtgccctccagaagctcatgtctttaggggaagccagacccataagaccttataatagactgggtgcagtggctcacacctgtaatcccagtactttgggaggccaaagcaggaggatcgtttgaggccaggagttaagagaccagcctgggcaatatagtgagaccccatctatacagaaaaataataatgaaattaaccagaagtagtggcacatgcctgtggttccagctcctcaggaggctgagatgggaggatcatttgagctcagcagtttgaggttgctgtgagccatgtttgcaccactgcccttcagcctgggcaacagagcaagaccttgtctcaaacaaacaaacaaaatacacagaaaaaccccacataaccttgtaatacacacgaataagggtttaatgcaagatctaaatagaatggaggtgtattcttaagagctgggcttttaagagacatataggcttttgtcagggtagtaggggtctttccagaagcagtggagaccagtatctgcaggcaagtttcaaatgctgaaacagccatgtgcactggaggaccagaagttgttgagcatggcaggtttatctaaggaggaactagatagggtcttttgttattgttgttgttgagacggagtttcactcttgtcgcccaggctggagtgcagtggcatgatctcagcccactgccacctccacctcgggttcaagcaatactcctacttcagcctcccaagtagctgggataacaggctcctgccaccatgcccagctaatttttttttttttttgagacggagtcttgctcttgtcacccggactggagtgcaatggcacaatctcagctcactgtaacctccacctcctgggttcaatcgattcttctgcctcagactcccgagtagctggaattacaggctccttccaccacgcctggctagtttttgtatttttagtagagccggggtttcgccatgttggccaggctggtttcgaactcctgacctcgtgatccgccctccttggcctcccaaagtattgggattacaggcataagccaccacacccggccctagataggatcttgaacaagcagctggaagccacaaatagggaagagaccatgttaaatctatatccactaagcactggggaccatgggaagttacagaataggggaagggcttgaccagatctatttgaccaggagagctatgtgctgggccagaggtgaggccagaaacaagaacttcagaacaaaaagtatgaactgtgtacatggcatagtggccccagctgaagaaacatctgcaggaaactctgccttccctatctgtctactttgacaaaggagatagtacattgatagggagacagaaagtctgaggcttttgactcttaaacaggtttactggaagaacctggacgttagcaaatccttttgaattggggtggatcctttatacctgtagccctacctgcccagcagactgaaacaaaggtattagaaaagaagtgctttgagtatgtcagcaagaatgagaagtgacagcaaaatgctaacctgtaaagggaacctgagtttcttcatccgcatactggagatgggagaggaaaatcccatccctactttgtaagattgaggtaatgtagggtgtaagtactttgtaagcctcatagagctgtgcagaagggattgttatacaccaacaaaaagtgacctggagcaggcaagaagcatgcttgtccttacagataaaatctcttctatttgtcatgtctaagacattattctttcatagtttgtaccaattaccatctcctggtctctcagcaagtgtattcagggtttctccaatttctccataaagttatttgctctttaagcttttaaatggatatataggtatagcacctgagtgcattggttttgtatcatggggatttggacactatttagtaatatattgatccagtgccagttagtacagattcaaatattatacgtgagacaggaattatagccccacttgaccttctggtcctctctctctatctaaaaacctaactttcttgtttcctgctctacttagattatattattataacatgtaaaatggacatgaaaagaaacataaccagccttggcaacatagggagaccctgtctttacaaaaaacaaaagcaggcccggcacggtggctcacgcctgtaatctcaaccctttgggaggccgaggcaggtggattacttgaggtcaggaattcaagaacagcctggccaacatggtgaaaccccatctctactaataataccaaaaaaaaaaaaaaaaaaaagaaaaatgttgtgttaggtatcctcaggtgagatgtcaaagggatttctaactgtgaatttactttttgctgttattaaattgaatttgtttatttcctcctttcctttaagaacaagtggaggccgcgcgtggtggctcacacctgtaatcccagcactttgggggaccgaggcgggaggatcacttgaggtcaggagttcgagaactggccaacatggcgaaaccccgtctctactaaaaatgcaaaattagcctggcgtgttggtgcttgcctgtagtcccagctactctggaggccgaggcaggagaatggcttgaacccaggtggcggagggttgcagtgagcagagattgcgccacagcactgcagcctgggcgacagagcaacgtctcaaaaaaaaaaaaaaaaaaaaaagaccaagtggagaaagacatttgggcgaatgattgcaacatgctgactcatctagggtgtcgagaagaccgaagcaatttaaaaaagtatattatatcaagggcaccgtggaaaacaattaaaaagatgggctccagatgcacatgactccagagaagcagtttgactaatatttcaaccccatgcacccgttcctccccagctaagttaactggctgtggtagccttgattccagcctgaaagatttttctgtgtatgctaacattttagcagttgctttccctctgttttgactgtgaccaggggagtaaagcaccaggttcttcaaatggatttaagaatttattagtttttcaggagatggtgagaaatttactcaagattcaccttgctgtttaagataaagttttccaaagggaaactttccaactttcattttagtttcatttaatgtagaaaaaaagtttttattttcatgcagtattctaactttaacagtagtttgtggttttcctcccccccacaggtagaacattccatgatattttttacagcattcattatatagactggtcttggaggttttatatgaaatattattgaatgactctgcgtgtgaacaatgaatgatagtttcataaacaacctttaggaggcagacatagcttcggtttagcactataaaaacatgtcactatacaatagcctgtagaaggtgctacgaaaatacaaagaagtaaaacaaatagataaaacgcaatatgtaataaaatcatgaataaaatgataagaataatacataaagtaaaagggtttatgtgggactgggtggcattcatgtctgtatgagagacagggaaataaatggacaagagtgggtgagggagtatctaggctacaaatccatctatgtatgtatgttgtgttgaatggagcttcagaagccagaacatttaataggacaggtggctgatacaggctgctaaatttagatactcccatttgttgaagtacaacaggtaccaccactgcttgttttaatattttctctgtggacttgcttctgtagcataaagactacctcccctgggcttccttatatggaaataaattatatgtaaaaattatcaatctccaactgtgaagagcatttcatgtttctaaaaattgtaacactttttcattgatttttttttttttgatagagatgaggtcttgctatgtttcccaggctgctctcaaactcttggcctcaagcagtcctcccacctcaacctcacaaagtgttgggattacaggtgtgagccaccacacccggcctggaacaatttttggaagaaaaagaaatattcctcatgaccatcctacttgagatagtgaaagcatctgttttgttttacaaactgaaacaggatagcaagagtcaaatacgttttcaggcagaaagaattttatcagaagagacattttgctggaaaataggtggactgaaagtctgttgatgtgtgtaggaaacatcattgttaatcctttgtgtgtgtaggcacacaagttaaaataagaaacagtaaaattaagtgtcataaggaaaatataataagcaggcatcacaattattaggtactctttattgtatagtgtataaacggctctgtaacaccataatgacagcacacctaggagcccacagctgataggtcccagagtaaataatttagctattggcgtatgtcgaatagtattttgtttggtcacagttttgggaaatcttcctcattcattttagatattgaagctttctttttcaggctagaaaaagttaatgtaggctgggtgctatggctcatgcctgtaatcccagcactttgggaggccgaggcaggaggattgcttgagctcaggagttcgagaccaaacctgggcgacatagtgagaccctgcctctataaaattttttaaaattaaattaaaaattaaaaaaataggggttggggagagggagcatcagttagaatagctaatggatgctgggtttaatatctaggtgcaacaaaccaccatggcacatgtttgcctatgtaacaaaccttcacatcctgcacatgtaccctgaacttaaaagctgaagaaaaagaattaaataaaaattaagaataaagaaaaagttaacgtagaggaatgttaatctatgacatcagaaaattttaaataaatttaaaattcttgatagtttatgcatgtttcttctattcgagataatatgcacttagcaaatataaagatggcatttttcagtcattttcatacaccgtgtgccaaaagattctgtataacagaggtggattacaaaagcaaccaaccacaatttaacagaaatttaagaaatttaaacttaaagaaatctaaacataatttacagaataatgtgttctaatgagggctttttgtttaaataattttaattgttctttatatcttcattcttatgaaaaagtttttcaaacttactatagctgttttagaatatttgaaaacttcaaaaaagaaaatttaggctgggcacggtggcttatgcctgtaatcccagcactttgggaggcctaggtggacggatcacttgaggtcagcagttcgaaaccagcctggccaacatggtgagaccctgtctctactgaatatacaaaaattcgtcgggtgtggtggtgggcgcctgtaatcccagctactcaggaggctgaggcaggagaatcgtttgaacctgtgaagtggagattgcagtgagccgagatcacaccactgcactccagccttggtgacaagcaagaatccatctcaaaaaaaaagaaaagaaaattaaaactgagaaaaccagtatgaatattttggcagttccttctagggttttctcttaatttccttttgtttctctctctctccttcaaagcacacatacacttaaatgtacacagttgaattggtactgttgatagtcttatatcctgctttttccacttaacattactatgagcatttttccatgtcattaaatatgctttgaatatgttcttggccacataaaattccatcctattgatgcacctgttttcttttaagcagagacacatgctatgctttccagtcatggtggactctcaaaagccaaagaaaataccttgtgctgatctaccataagcctcttataaacatccattttttatttcatttattacatgtacccatggtacaaacgcacctctggacactagatacaatcaatagttaataagcactctaaaaaaaatgccagtgagcagtgagctctgtccccttgatgatgtttagtcacccacatcactattacaagtatataaggtgtcaacaagtgtcacaaatgctttttccattttgcgatagccccaaatgaatttcaatctttcaggcacccatctcaagaacttcagattctaacagggcagttttgagttttaatattaaaacttctaatataaacgctacaaacttaccataacaccatcttactttacacttagttttatgaatttgaataatttttaaattattttatttcagtttgttttcccaccttcagtcaggggaactgatttagctttaaaacaatctgccagaaactttggttctgacctctttaaggctgtaactagtagaagtgatgtatctttaacacacaccaagcataaatgaaccctttaatcctcaggagggcactgtggaactacgttcttagggttgtctgctgtaggaaggttcttttgttactcagatgtgaggggtgctgggacaggcctccacagaaaacttttttatttttatttactttaaaagacaaaccataaagatttttttcaaatatgaaactgaaatgtatatatttcataaatattttcatactaaactgagcaaatttaaggatgattaagctgtttctactgggaaaatcataggtaaggaaactgctttcacgtagctttacgtacatttggaaagagcaaacctgaactgggtttttaatcttgtaatttttaaacgtacaataatcaagagttctcagccctatattgatagtatttatggtaaaactaaatagtttttttttaataaaaaaaggtattttaatttgttgacataaagttggcttttttgtgcgtgcttcttacatgccttattaacccggtgtgtttaaaccaaacactgttcatatttttccaggaggaaaacaaaacaataaaaaacattattcagataaaatattataggtttatttaaaacttaattctcaccttgagtatgcaaaatacaaactccacaaaatgttcattttactttgtagtttacaaatatacaaaatagacgtttgcttaaatttatattacatatttattaaggcaaggaactatatagaaaaacacatttgttctgcttaaggcatacttgggaataaaccattgtacaaattattgcacatctgaaaccacagtgcataacagactgtctgcataaaaatgctaaagaagtaaaccaggtatattacctgacttaggtcataaatgttgatcggaagacaaatatagattttccttgtcaaagtatgcagcagtttgaaaactttggcttccttgtttggtacctttagaaccaagactcaccaagcaccatcatttaggctatttaaacatgttttctgtacctgaatttcttcctcttcttctaacatcataataatggcttttagaaggtaaagagaatacaaggtgatcttttatgcttatattgcatcaatacacaattcaagggaattctggtcttccctcccccaactcacggatataatttataccctgatatccacaacttccagtcacccccttggcattttgtaagtccaggaatattcaagtcggatttagaattggaatgatagaagatccagtcacagaccccatctgttctttgatttttgtcttttggattcctcatttttcctgattatccactcacaagatgactcagttgggaacttgaccatgattgtagtgctttctggctgggctccttccctcatcgggaagacagtgtgaaaagtaaaaaatactgaattctcttctggcagtgtgggtcatatccactgtctgggatttaaaaatgcctcttcatgtgtaaggcgaggtggtccgacctggaaaatgctcggtcgcatttttggcactggaacgggcggtgccccgtgtgtttacggtagtgcctggtcagttcatctgagcgggcgaatttccatccacagccgtcccagtcacagtggtaaggtttctcacctgtaaaggtaaaagaaaaaaaaaattgacgctattgctatatcaaagaatcgccccttttaaaaactgaaggccagatagtaaaccaactctgaccctatcctaaagaaatccaggaatgtctttataccactgaaggggtgtattgaattccatatcataaacagaaatacattccgtgcttaagtatttggtcttgtttttagggggtcagttaagcacacaaccaccacctacacctatactaatgtttcaccaaaaacacacaaacaccacctaaacctatactaatgtttcatttgagtcaaggcatctcagtggtggaaatgaaatttggaaattgtgattggtagtgtgcccaaaccatgcaatcttattcctactacgactggggataaaaagccacaggtggctactttttttttctttacctttacgttactgaatgctgcacctaaacgactttgggtacctacttacattgacatggaaatgctctgcagtgacaaccctaaatcagaatcttcccagcaattttgaccatcatattcttggaatttaaaataaaaccttctgcttgtgggggaaaaaaaataaaaatgtaaatcaaaacgaacaaaaaataaaaaataaaaaagtaagaccgaattgttacgaccagaattcaaaataacaaaaagggagggtgaacctgggaagggaacattaaaaaacgatttttttaaaaaagccatcatgcttttgcatagcaaagtataatttcttgattataatgccaagctaggagaggcccacagaccgcggggaatctcctgccttttaaaagcctaacaaaattgcacattcaaacacagataccatccatcaagcaaaaggctcctgggcagaaaagtaggcgccggtttgctgttctctccagtgatcccggagatcaaggcgatagactgccctgggaagccaaggaggcactgaggagtgtccactggtagcctatggggctggaagctaacctgggaagtcaaggaggcactgaggagtgtccactggtagcctatggggctggaagctaacccccctcccttctgcagtttgtccccctacctgtgtgggttcgcaggtgtgccttgagatgggaactctttgtgtaggttttgccgcagcccgcgtaatcacaagtgtgggtggcggtccttttccggggccacgatcgtcttcccctctttggcttgggctcctctggcatgcaggaaccgggtggcatgagctctaggggtgaagaaggtggggtgagcatcatcccgtgtgtcccgaagtggggccagcacacacagggctccccagcccgagctacaaatccccgggactgaccttggtaatggagcggcgggacttgcggctgcatctgatcgggcaggaaggatgggtaattgggccccgggtggggatggaagccgggaggaagcggcagggcagggtgacagtccctgctgctcagcacttcctcaagacccagggtcggggtagtcctgctggggagctgccgccccagggggaagtcgtgtgcagccggccggtggccattgctgagagggggtccagcgcccaagtgggtgcacgaagagaccgcctcctgcttgatcttggggcacgtgcgcggcggcccgccgttgtagggcgccaccaccaccgggtggctgccgtcagggctgcctttgctgacgctgatgaccgacgggctgccgtactcgctgccaggggcgctcagcgacgccttcagcacgaacttgcccatcagcccgccacctggcggctgcggctgctgcggcggaatgtacaccgggtccaattctggccgcaggagctcggccacgaagccgcccgaggggctcacgtcgttgatgtccgccaggttgaagggagccgtcggagggggagcggactccctgccatagaggaggcctccgcccgtgccgcccggcgccacgcccgggtcgttcccggcccggatcggataggtgaagctgcaggtggagggcgcgctggcagggccgctgctcgacggcgacgacgaagaggaggctgacgctgacgaggacacggtggcggccactgactccggaggatgggtcagcgaattggagagaataaagtccaggtccaggagatcgttgaactcctcggtctctctccgaggtaggggcgccaggttgctaccgccgcaagccgcaccggctccgccgctctccaggtctgtggccacggtcgccgccgccaggtcataggggcggccgggaagcactgggggaagtcgcttcatgtgggagagctcctcccgccagcgctgcggggacagggcgggagagacctgtcagtggtggtcccctgttgccacccgacatactgacgtgctggcgggccacgcgcgactgcaccgcccagacatggggactggtcaggcaggaagcacccgggaacccagggcgccagcgctgcaatctcggcccactcccgggtcgaagaagaggtgatgcgtctgtattgcgggtgttatgtcctgtctgcccaattgcgtgtgagcgagcgccgcggctggtccctccccctccaggtcccgtggacgtccccggaattggcacaccgaggctctctcggtgcgctctcgccacggggccgcctacgcgctaaactcactctggcccagccagtgtctggggacgcggccacctcccgcccggtggcccgagagcgcccgccctaccgacagcgcgcccggggactggtgaagacccggcttgcgccccaggcggctccgcagtgctcgcaccacgggcatacacagctgagccaaggacacggaagctatcccgggaaggttgcggagtccgcgcggtggccgctccttaccctcgttcagtggctcttggtgaccccaaggctccgcccgcccccaccacacccacgaaaacccaccgggcgttcccggcggcccggagcgatactcacgttattcggggcacctgcttgacgcagtgtcttctcccttcccgccgggccagacgcgaacgtggagaaagatgggagcagcgcgtcgctgacagccatgtcagactcgccaggtggctgcctgcgagcaaggcagggagcggagacaggagagtcaggggcggctttcggccgtcgttccggcgcgtcccaccggtcctcacccctccctgctcccagcgccgcgcgcctcacctacctcattaatgtgggggcccagaaggtcctcggcagcccgaagcagctggggcacctgaaccccaaagtcaacgaagagaagaaacgaagccaaaacccaaaaccccaaattggccgagatccttcttctttggattaaatataacttggaagcgtcttttttaaaaagttcctttgtatacaaaagttcttagaaaagttgtaaacgcaaaaatagacaatcagcaaggcgagtaagtaggtccggtggccgggctgcgctctcttccactcagcagcgtcccccaccactgtcgcggtcgcctcgagtgctgccgtgggcgcaggggctgtggccggggcggtgggcgggcggtgccgccaggtgagactggctgccgtggcgcggagctgcgaactggtcggcggcgcaaggcgcggactccggtgagttgtgtggagcgcgcgcggccatgggcgcgggccacgggcgggtgggagggtggggggccagaggggcgggggagggtcactcggcggctcccggtgccgccgccgcccgccaccgcctctgctccccgcgcgcccgcagacacgttcgttctctctggtcgggaaactgccggccgccggcgcgcgttccttacttataacttccttcgctacagccttttcctccgccttctcccatgccccgcccctccctttcttctctccgccccccccgaggctcccttccatcgttgctatggcagctaaatcaacaaactcggcgcacgtgggggcgggggaggggaaggaggggcgcgggcggggctgggccgggccgtgacgccagccaggcagctggcgggctggagccgagctgacgccggcggcagtggtgtcggcggcggcggcggcgtccgccccagcgcggggcgcgaggaaccgggcgcaggttcggtcgctgcgcgaccagggccgtactcaccgccattgtcggctccctgggttcgaagcccgcgaagactggtggggtcagcgggcggcacggtcacgcgtccgcacccctgctagcatacgcgcttgccgcgctgtctgcgcgctggagaagagcgcgattatccgcgtgactcatccagccctccatctccccctccctctctgcgctcgcaggagtccgctctcgtcgctcagcgccagtgccggtggcggtgccggcgctcggcctgacctcgcacggttcctcgcgggcccttctgctgaggggtggggggcgctaggggtgtggagaggaggcagtgcccagcactgtgcagcgtgaactgggagcctcaagagaaggccagaggagtgttccgccgggaacaggcggaaagaggcacgaatggggagttatggttttgatactttaaatagcgagaaagggagtgaaagggctcaagatttactcagaggcataagggagagaagagggactgtgaggcgcggagacagttttcaaccagccatctcgaagccctttcctttttttttctttcttttttttttttttgtgagacagagtctcgctgtgtcgcccaagctggaatgcagtggcacgatctcagctcagtgcaacctccgcctcctgcgtccaagcgattctcctgcgtcagcctcccgagtagcggggattacaggcgtgcgccacgacgccggctaatttttgtatttttcgtggagacggggtttcaccatgttggccaggcaggtctcgaacacctgacctcaagtgatcagcctgcctcggcctcccgaagtgctgggattacaggcgtgagccactgcctgtaatatttgatgactaaattgcactgtagaataataataataatagaagacacccattaaagaagaattaaacactcactgatgacttttcaagccacgcactctcctttccactttatggatgagaaattgagtcataaagaggtgaaatggccagtaaaggtcaaaggacaactcgttccttcggctcaggctccgggtaggtcaggcccccctaaagggacttccctgggaagtgaccatgtgccaggaagtggagcgatgcggtgggatcctagctctcaaaaagtgcacaccgagcccgccgcaggcgtccttgcccaccgggaagggaataggaaacggcgatctttacttcaatcttataacgctgcctcccccacccccactctccccttggtttgtgatcagtaattttccagctgggaaatgttttgctctcatcttcttagcaaacagtatttttttttaaaacgtgaatgtggtgttcggtatcactttctaaacgtaggtttggcgaggtgtttactttggattccggcgttcggcgcgggactccgcccccctctccacggagccccctcaccggcgaacgctggcgcttaggctggtgtcaacctaggaaagagaagagaggggacactggggaaagtggtggaagctcgggcaccgggcagagagtgcgctcacccctttttgagttctagttgccaatgtcctttgtcgttgtcacctgtttgaaccctgcgattctggtacctattaggtttcctcagaatatttgtgatacctgatttttccactcctcgccgaccacagaagcattcttggaatgcatctcgccccgaatgaattgactcggccctccctgccaacgccaggaatccctctaagatccagagtcggacgcccttgagtgtgacttccatcctctagcttggctctggccaagggctgccagggttgcagctgggggatgagagtgttttggcagggaaaccgaggtcctccttcctatgacctcgaggagttcaaccccacccccctatataggatcaggccagttactttaactctgatttttactttaagcccttttcaaacggaggaaccaaaaaaggaagacacctgccacttcctcccctactcctttaattgtgatggcaacatcttgggatgctgtgatttgagggctgcatgggaaactcaccactttttcaggaaagccaaagtccctcaccctggatgaacagtggatgagcccttgattggcagccatctcccttgggatgtaaacgtgggtcaggacttggaatttccaacttaggtaggcagcacactagattatttctgctttacttttatttctctaaggcagtagcccttccccctcaaaaaaaaaactatctgtaaccaccacaatgaaaaaacaatattgcacagaagaattggaaagccaccattattatgtcacataatcaagacaagattctgaaactcgattgaaaaagatgaacttgtttccaaccggccttctgaaggataaaagccagtctctcttcgtggcaggcaactagctggttattcctctgattgcgtcacaaagggaaatctgtatattcaccccagatttctaaaagaagcaagaaacttcaagttcacaaatcatctctcaaggcaggtgccctgtatgacaacaaggttatggccctccctgtcttcagaacaggtagggccagaagacttaaatccttgccctatataatttataaacatgaggctgagtaaacctttgatgactaaattgcactgtagaataataataatagaagacaccctttaaagaagaatgaaacactcactggtgactttatttcagcaaactgatattactagttttgtggactagaagttaattattaatgtccttggagttataaaataattttttttccagcacaaactgcattagttgtcagaagatgtgatgaacaccattagtgctaggggattaatgtggagccatggaggggtgtgatagactgaagaagctgcatccatgtttcaaatgaaagattcagcacccataactgggtatggggtctggacacatagagcaccccgtgacctggctgcaccctggctgggtgtctctgcataactgccgcaggactcaagaaaaactcaaaaaaaaaaaaacttttttttttttttgagacagaatctcactctgtagcccaagctggagtgcagtggcgtgatcttggctcactgcaacctccacttccagggtggaggtggaagcagttctcatgcctcagcctccagagtagctgagactacaggcgcgttccaccatgcccagctaattttttgtattttagtagagatgggggtttcaccatgttgcccagggtggtctccaactcctgagctcgggcgatccacccgcctccgcctcccaaagtgctgggattacaggcatgagccactgcgccctgcctgaaaaactgctttttaaaaaagtgaaaacaagagatagattttaagtacccgaattgctttgaaatgaaatccctgctaataaataactgtaaaaggagcttgcagctttcacaaggtggcaaagcttttctcagtctccaccctcatctccttgtgaactccagcctcttttttttttaaattttattattattatactttaaattctagggtacatgtgcacaacgtgcaggtttgttacatatgtatacatgtgccatgttggtgtgctgcacccattaactcgtcatttagcattaggtatatctcctaatgctatccctcccccctcccccccgcccacaacagtccccagtgtgtgatgttccccttcctgtgtccatgtgttctcattatagaccaatggaacagaacagagccctcagaaataatgccgcgtatctacaactatctgatctttgacaaacctgacaaaaacaagcaatggggaaaggattccctatttaataaacggtgctgggaaaactggctagccatatgtagaaagccgaaactggatcccttccttacaccttatacaaaaattaattcaagatggattaaagacttaaatgttagacctaaaaccataagaatgccagcctctttttaccctctgtcttgtgtagactttagaggttaggaaagtaggctttgactctgtgtttcccaacatgactctgctgctttctagctgggcaagttactgacctcactttgcactttgcctgtttcctcttctgtaaaatggggatattaataatgcctacttcttagagtgatgaggatcaaatcagataatctaaagtaaagtatttagcacagacttaacactcaacacatagtagctattactatcatcagtattccccagggtatcataaacatgatgaggctgaggctactgttttgttcactgctatatccccaagtcctattatagtgcctacctagcacatggtaatgccctgtaagtgtttgttgagtgaatgaataatgcatatttaatgtgttttttctttttgaataatccattagcaggaagctcatctttcagcatccactgtagactcattaatcctctttcttatcaagaaccgcaacacacccagatttaaaatttcgtcattctctccccggtttctaagacagaaacctagattttcttcaactcctgccttattttctttgacctgagcatccagacatctacaaaactcagccatttccattcctaaatatccccactatctttttactactctcgggctgctttggtttaagcttgcctcatttacagctttttgttgttgttgttgttgttttgagacgggtctcattctattgcccaggttggagtgcaatggcactatcttggctcactgtaacctccactgcccgggctcaagcgatcctcccaccttagcctcccgagtagcgagtatcttgtggcactgattcttttttttttttttttattttgatagagatttcgtcatgttggccaggctggtctcaaactcctgtgtttaagccatccacccacctcgacctctcaaagtgctgggattacacacgtaagccactgtgcccagcctcatttacagatttaattatgtctgtacactccaaatagtcctcttgtctcctccctcagagccccactggcattctccagctagatctaatccattttgctaacagaccaccacagttctgtctctactcacctccccaccagccagtctttcaacagctccactttgcctagaggaataaaaccaaactgtttggcttgatgtacccaacacttactactctggccctagacaaactttccagaatcttctctagagactgacctcaccctctctaaactcttaactggatgttctctcaaatccctgaatacaggatgtgtattttcatcagctgtttttcctgtctgaaatgccctttctcccctcagggccctcatcgtacccaaactccaaaaagtccctcttaattgttccttggtctatgagttcccttttaagccagtccttttttctctgagctctaacaaagctgtgtaatgactgctaggatgtttacccagtggacttgcatgatctggttgtttgtagctcctgttcccctatggcatcttcaggacaaatgcccaatgaccattaattgtagaatgaatgaagagagcaaaactgacttggtaaactattaatggggtagaggcagggagggagtcaggggacctggtccttgtcaatagcatttctctctagttgagagggtcattggtttggtacttcattttccatcccttctctttcttcaccacttcatctctttctttgaaaagttctatgaaggaaaacttttcaaagaaagttatgaaggaaataaaatccttcataactctgtactctcaaaaacagttggacaaagtaatagaacagtgctggccaaggcattgtaataaaacaaacttgaaaacacaaacaaaaataaccaaaatccaaaccaaaaccaaatggagaaagagtccactcttttctgcagccaaattcattgcctttcaaaacccaaaccttaagggttgaagtttttagagcagaaaatgaatcacagacatttaaaaatcaattctcagaaatttcattagaatctttttcgtgaacccttaggtttgatcacttaagttacattcttagctcaaaaaacttaggcccaatacatcctttaagctatttaaaaataaaatctaaaattaatgaaattattttcaagacttttgaaatattctgactgcaatatattaaattcagcttttcagtgtcctcaacttgttctgagatattaaaaaggatacaaaaaaaatccctctttttaggttgctgattttttttactttatttatttatgtatttatttattttttaataaataaatgagtcaccacacccggccaggttgcttatttttaaatgtctgtttaagcagagagaaatattttttaatggctcacacctgtaatctcaacactttgggagaccgaggtgggtgaatcacaaggtcaggagttcaagaccagactggccaacatatagcgaaaccccatctctactaaaaaatacaaaaattagctgggcgtggtggcgcatgcctgtagtcccagttacttgggaagctgagtcaagagaacagcttgaacccaggagacggaggttgcagtgagccaagatcgcaccactgcactccagcctgggcaacagagcaagactccgcctcaaaaataaaaaaagaaatattttgtaagagtgaggtacatctcagtagtatttcccttaacaaaacattttgtaagagtgaggggcatctcagtaatattttccttaataaaagaaattgcaggctagcatttaccatcttcgtagagcatgactccaatactatatgcatttgaaacacatttaaaagtaaatgaactagcaaattttaaaagtatttaaattttaatgaaagaataaaagtacttaaatgaaccagcaaagaagtcagtgggcagagaaaaacctgttgctggaattttcttcttcacttggttcaccaagttttgcctgcttcccctgggggagaattatctctgaaaagagaaccaagagtctacttcctttatttaaaagcctcagtgcctcagattcttagactaagacaacgtcgttcttctgaggaaaacaaagtccctaggtttagattggattggaggtaacatttttgttttatggaaaatgtaggaatgttgaaggtacaaaaatgaatgcttcacaccctgagaaatgcaaacaagaaaaaaacaattctgtgtttaattctctttcagtttgtgggctggacaagaggggagcttatttttgccaatttgaaattatgtactttgagccagggaaatgatttaaaaaaaaattaagaatgcattttattaccctgtagttgacttttttttcacaaacattgtgtttgttaatcaattttaatgtcctggctagtgggaagggggctagcgagtgccaatgtggaggaaaaaaaaaaaaaaaaaagccaaacgaatgttctggcagcaactaaatatctcatacagtgtgtgatgccttattcaaactcgaatctagatgcaaactcctcttatatccagggatgaccagaagcttcttaaagggggaagcccctggaatagttacctaatcttagaagaattcccagcattatcattgataataaaaaaggtaatctagtgaaagagtgaacttggtctatggtgtcagttattgatgaatttttctggttgctacatttacctaacagttctcagagcaaagtgttgaatttcaatgttctgatgtttcattcagcaaactcagttttccatttgaaaagaagctcatttgggtttctttaaagacaagacaatatctttggtctatctgagtgcagattagagtgtccttgtctgactttaattcttagagccatcttgccgtaactcaattaaggaggagaacttgacagaattctctgggctgtgggagaagaaatgacagggatgaatagtgcacagactctgggggcataggtaggatctgccacgcaagggtttggactccaggccctgagttgcatcttacaagccaggtgaccttggacaagctacatcatctagttgcactgtactttccttgtctgcaaaatgggtctacgaatgtacctgcttccaaggccagtgtgagcattaagtgagatactggcattaatgttagtgtgtcccctctaccagtgaaaccttacacagttaatccccctttgataacttcaaattggtcctgcagtattcagcactggaagatgatataatatcttggtttgaagagtgaaatgctttgtcacagtattttctttccccaaaatatttcagtgtcactacagatccacaaccaaagaccaggctcacagaaaatctcacaaagacactgttttaagtagggaaggtatacattaacctgggaatctcacttcctagggtcactccatgacttgcaaaggccttttgtggctatgtcaaatccctaaagacagtgaccttgacccttgataagccagtcaagagttaggttggacgaaagataatttcaaagtcaaattcaacattgaagaattctatagtcattgacagtgttagcaaagttctaaccttgtctttcctagaagggtactgaaagggtctgctgggttctccctccaggaaaaggagggagcagggaccttcaaattcattaacatcactgctctcagacgctgtaccaggtaactgcgataagtactttcatgcattaagttacttgtcttcacattacttctctgaggttggtgctgccattgctgctagaatgcaggcttcagggggcagagacgctgcctgtgtgtgtatattttaaaatatactctttttgtgtgtgtatattttaaaaactgatatatcacagttgtatgactttctttttattttttatgttatttttatttattattattattattttgagacagagtctcactcttgttgcccaggctggagtgtagtggtgtgatctcggctcacagcaacctctgcctcccaggttcaagcggttctcccgcctcagcctcttgagtagccgggactagaggacgcgccaccctgcccagctaattttttttttttttttgagacagagtcttgctctgtagcccaggctagagtgcagtggcgcaatctcggctcactgcagcctctgcccctcgggttccagtgattctcctgcctcagcctcctgggtagctgagattacaggcgcatgccaccatgcccgactaattttttttttttttttttttttttttttttgagacggagtctcgctctgtcgcccaggctggagtgcagtggcgggatctcggctcactgcaagctccgcctcccgggttcacgccattctcctgcctcagcctcccaagtagctgggaccacaggcgcccgccactacgccccgctaatttttttgtatttttagtagagacggggtttcaccgttttagccgggatggtctcgatctcctgacctcgtgatccgcccgcctcggcctcccaaagtgctgggattacaggcgtgagccaccgcgcccggcccatcccgactaatttttgtatttttagtagagacagtgttttaccatgttggtcagcctggtctcaaactcctgacctcaggtgatccccctgcctcagcctcccaaagtgttgggattacaggcgtgagccactgtgaccagccattactttctttttaatcataagtttttgttttattttgttttgttgcttgagataaggtcttgctctgttagccaggctggagtgcagtggcgcaatgatggctcactgcagcctcgaactccctggctcaagcaatcctcctatctcaccatgcttagtagctgggaccacagacatgtactaccacacccagcttatttttaaatttttttgtagagacagggtctcactgtgttgcctaggttggtcttgaactcctgggctcaagcaatcctcttgcctcagcctcccaaagtgctggggttacaggcgtgggccacctcacctggctgacttacttttttttttttgacctgtcagcaggaagtaactgacttatttttattacagaatgtaatacagtttgctggcacataataggtgctcaatacatacttgtttaatacataaaccccattttacagttttaaaaaaactgcaatattagctaggcatggtagctcatgcctgtaatcccagcactttggaaggccgaagtgggtagatcgcctgaggtcaggagtttgcgaccagcctggtcaacatggtgaaaccctgtctctactaaaaatacaaaaaattagctgggcatggcggcgggcgcctctaatcccagcaactcaggaggctgaggcagaagaatcacttgaacccaggaggcggaggttgcagtgggctgagatcgcgccattgcactccagcctgggcaacaagagcgaaactccttctcaaaacaaaacaaaacgaacaaaattagccgggcgtgatggtgtgcacctataatcccagctacttgggattgaggcagagaatcgcttgaacctgggaggcggaggctgcatcgagccaaggtcatgccactgcacttcagcctgggtgacagagggagactccatctcaaaaaaataaattaataaaaataaaaataaaataaaaacaaccaaataaactgcagtatagagtgcttaaatccagcccaggattgtgcagctaagtaagggagttagccagtgtctcctggagcccacccagaggaggaagcctgctgtatgactgctctctgagtaacctatcctcagctgtgcctggcttctctgagttcagagcccctggatcgagttccccagagagtaaacctctaaccttctgtccaggctgggggaaaagcagtcacccagctgaacagggctagtgaggaatcttggggcctgtatgtacgtatgggtggatggatggatggattgtgtaactgcttgagatatatatatatatataattttatttatttatttgagatggagtctcactctgtcgcccaggctagagtgcagtggcatgagctcagctcgctgcaacctccacctcccaggttcaagcaattctcctgcctcagcttcgctcatagctgaaattacaggcacgcgccaccatgcctggctaatttttttttttttttttttgagagggagtctcactctgtcgcttaggctggagtgcagtggcacgatctcgactcactacaacctccgcctcccgggttcaagtgattcttcttcctcagcttcccaagtagctgggactacaggcatgtgccgccatgcccagctaatttttttgtttgtttgtttgtttgtttgttttgagaaagagtttcacttttgttgcccaggttggagtgcaatggcttgatctcggctcaccgcaacctctgcctcctgggttcaagcgattcttctgcctcagcctccagaatagctgggattacaagcatgggccaccatgcccggctaatttttttgtatttttagtagagacggggtttctccatgttggttaggctggtctcaaactcc

SEQ ID NO: 75 - DNA, 29339 bp, Mus musculus
atagaatgctgctgaacgctgctgcatctttggtcctagcagttattttattcgtttgtttgcatgtttgtgattatttgattaggtaattccagctccctgtgggctaggagtgcatcttcatttatgctgatattccttctcagtgtctagctctggcccacacacatggatcgtgttccctaaaccaacttcataaatgaaggagtagatttgttttattccacatgtgcagtcagtctcttagctcttagactgctgtatagttcattgagggggtggatgcttggcacaaagactgctgttaactctcctgtttgttttttcgggccaactataatggaaatgtaaggtttgccaacaatcaggggaattcgggatggtaaatggagcacccttgctttcaggacctggtaaaggtttgacaagcaacacatagccaaaataaaaattttaaaactataccccaggaaagagttggccatgtcctttcaagaaactccccaagcagagaaaaaaagtgagagagaacagagaaggcaaggaaacccgttacatatgctaaccacgtctcagaacatggagaacacagagaccacggaaaggacaaagaattgagcagtgttaaactaaaatgaaggcaaagccactcagcgctgtatttgtctaggcagacaactgggtttttaaaaggatcacacaaagattttgtttggtcttgttttactgtcttgcttctaaatggaggtctcactctactgcaggctagcctcaaacttccgctggtcttcctgcctcaagcctcctatgtgctgggactacaggtcaagccaccatgtctatctcaaggatactttctgactcggtcttcagcacagttgcaaaaaggattcaggcaggctgggggtctagctcagctgatagtgtctgctgcacatacacaaaggcctgggctctatccctggcatcccataaccaggcatggttctaaatgtaatgtctataatcacagcactcaaggggtaaaggaaaaaggatcaaagattaaggtcatccttagaagagagtttgagacctgcctgtctcaaaacacctagagcgtggcacatgcttgaagtccacgggtttctaaccttgggaataccttggctggggtcagcaagaccaatggtcaaggactcatctgtccattcatacccatgttgattggaccttagacttgctcagtttccctcccatggcacagagggaggattcatcatgccaactgattggagggctaacccaagcttacatgtgcaacagccaagtccagactagaaccttggccttccccctcagcagccagcccctgccctgcacacaccagctctgtggtgagacagaaacaaacattaagcttctccctgctgcccaggacatccaacagctgaccggctgaagctttgtcttcaagtcagtggtttctgccccctgtacgctggtccacagtctattatctctctgtggtttttctatccccacaggcattcctgagacatctgcaaataagtggctagtctcttagtactatttttttttctttcatctgtactgacttccctgcaatctaatgcaatcatggcacagctatctgaaattccaagagctttttagctggtcctgaagcacctcagagacaggaagtatgccttacttatttgggacatgccaatacctcagccagtgactggcacacagtagatcagcaaaatgagagacccagaaagctaggcttggtggcacacacctatgatcccagcactcgcaaagtggaattaagagtttaagaccaatctgggttttattttctgtattaaaatacaaaaggaaaaagatataacacagaagtagatattgaagccagaaatgggtgagttaaaattagatagatgctttcaaagggctgggaagtgtcactcagtactagggcactcacaagcctagcagagataaggctctagggtcgtatcttagcactacaaaaaaagataaaatgaaggctttgagttgtagctcagttggtagaatacttgcccagcatgtacaaagccctgagttctattcctagtacacataaatgagcacacttcataatgagaggtgcacacctatacagttccagcgctcaggaggtagtagtttaaggtcaccctaggctatagattgaattttttatgtatctagtctaggctacctaagaccctgtctcaaaagatgtaataataattattaataataacaataattcaaatatctctatttcctagtattgctgtgaggataggaaaaaaagagatactccatcagttgtagcccaggtaaggacatcagcctttgaacttaagacagaaaaggatgaagtcaaatttaaattagttatttcctaggagacaagcaagaaataaacaagaacagtggatgtgattatccagtgttcagtgtttccttggctatttattgtcagagctcagagcccatgtaaagctggccctgcctcatcccccaacttctgcttcatcccccagtgaagtcatagcgctgggctcgctcatctgtctattgacacagagagcctgtgagtcacaaattcaacaggatgacttgctgcagtgtgattgactggaaaatgttccctcatctaatttttttttttacaagctaaagaacacacttggttttgcagcatgaagtgcaggcttttttatttatttgacgttggtcttttcaacacgttggcagagggagggccccccatgttcatgttttgctttatggaatgacatacattctctccctgcctcacctcctcttcctgctaactattatatctaaagcaaacagttctaggacaatggttagattgcacttgaatttgatgtttacttgacatttacacactggccatgctggacagctcaggcatacccaagcaggggctcagccaggaaaggactgtgctcagctgcacagccctctcctgaggagccaagatcccgagccaatgggacacggtggtgacatgttgcttatgctgattcatatgacagaactaggctatgaggggagaaagggtcatcagaatgtcttcagtgctctcaggaaatctctcccttcgctgtggaaggaagactagttagatcatcgagactctccctgccccagttccttatctgcactatgaggggtgtgtgagccttccagtgctggatttgtctcagggtgggctggaaatgactgatttcacttcatttccagtttcctcacttcttcagcaaatttggttgttgtgggtctgatgtaacaagtaacaagtctctgggcagatttggactctgagaaagcccttggtgaaggcttgtttgcccggtgtgtactgacacaggagggaagggggctcacagaagcactcaacacaggcttctgtcatcactgctgtccaatgcctgagctcggacagcaatcaagatgcctgttttctcattccagttccacaagcaaagagcaatagcctttgattcaacaggcctctgattctgtgggtgcaggctaggacagtggggggactccagttcaattctaactttagtacagtttctgtgctttcagagttggaaagaagtcagaacttactgccataaatgcctgagtaacccaaatgcagtgatgcttactggaggacaataactgggagacagtgcatcccaatctttgaaccaagacaattcaccatggcccagcattgtataatgaagaagtaattaactatgtagagtctcactgattgagggacaaaagtaatattgattggcacctttcatgcctacagtttcaattaatgttcaccgtagtctatgaagcacatatattcaagcccttctcacagtcagatgcactgcgaccatatgaacgatgtgctaaaggtcatcgggacctcaggctaattacttgggtggcatcattcatgactttcccccagcagtcttggcacgcttccacttcctaccattcttccatcttccatagtccaatgaattctggcaaagcccctctaccccccacctccttaaatgagatacagcaaaacggctcaaagaatcgaactccgataatgataatctgcgcttggaaaaaccaaagatgctgttttgtcttgagcttgttgaatgaaacatctgaacactgaattcaatatgccaatgtttcccacaacgcttggcgccgagaactctgtcggttaaatttagcaaccaggaaaaaaaaaaaaaactgcatcagcaactgactccacagactgaactcagtccgaatggactgccctccttgaatatctaccatgatgttgggaatttctcaagatccggaacaatgccaggggctttcacttcagggatgattgtggcctttccatatatgtatatgaaagcatctagatttgagttattgactcctatgcatcaaatacactacgagacgtgcaaaagctctgcttgaaagttctcttggcttttccttcctttctgaacattcgctcttgtcatctttccagctctctccccaccaggcaggacactacaattgatcaacgaacacaatgtgaaggaaaagaacaatcagtaatcaaatgcattgttaaatttgaaaaaaaaaaaaagatccctggctcaaaaggacataaagtcatattggcaaaaataacctatcctctgccccacaaactgagaagaaaattaaacacagaaaggcttggtttttgtttgcgtttctcagggtgtgaagcacttgttttcaactcatttctaaatcctacacttggcccaaggcaaaagaaaaaaaacaacaacaaacaaacaaagctcccacaagatggacagcaggaatctgttttcccctgaaagatgagcgatcccagcagataatcctggtaccaaagctctcacctgcaaacggtagcatctgggacaggaggttctccttcggaggtcagttttccctattcccagaagcagaaaaacttggtggaccagggcaagaagaaaattacgactttctttttaatcctcttaggcccccaaacacacatgggggttggggaggagaaagagggagatccaactcattttttcccttagtggattttcttttaaacggtctcctgtcacttaggctagctttgaactcctgatcttccagcctccacctcccgagtgttgggattaggggcttgtatcattacacctgttcagctcattaacttttaagtgtttcagatgactatagtatccagtaagattcttctcttatgcttaagaaaaaattatgccattaatgatggtttacaatagcccataatttcttaagagaattgttactgcaatatactactcttaagttactcttctatgttgtcactaagaataaaaagataagcacagtatgggggaactacggtatcagcactggagaggcaggattgtgataagtttggggccagcctggtctacctactgagttccagggcttcatagtgagaccctatctcaaaagaccagaataaggaaaaaaaaaaaaaaacaaaacaaaacaacaacaacaacaaaaaaaaaaacaggcggtggtggcgcacacctttaatcccagcacttgggaggcagaggcaggcggatttctgagtttgaggccagcatggcctacaaagtgagttccaggacagccagggctacacagagaaaccctgtctcaaaaaaaaaacaaaaaaaaaaaaacaaaaacaaaccaaaccaaaacaaaacaaaactcctaaataggacatagtagctcagcctgtgatctcagcactgatatccaggctgaggcaggaggactgccatgagtttgagggtagcctgggctccagagaaagaagaacctgtatcaagaacaaaacaaaacagcacaacaaaacatcaaaagttttaaaaatacttggtactctcattaattttagatttttctcaataaatagcttaaagggtgtgttgggcctgatcttttggttttggtttttttggtttgggtttggggtgtgtgtgtatgtgtgtatgtgtgtgtgtgtgtgtgtgtgtgtgagagagagagagagagagagagagagacagagacagagacagagacagagacagagacagagacagagagacagagaaagacagacagacaaagacagacagatggcgcacactaattcgcaatgcacatgcgcctcgaccactaagactgcaactaaagtgatcaaacctaagaattcacgaaaaagattttaattaaatttctgagaattgattcttaaatgtctgtgattcattttctgctctaaaaacttcaatacccaaagttctgggttttgaaaggcaatgaatttggctgcagaagagagtcgctctccatttggttttggtttgggttttggttatttttgtttgtgttttcaagtttgctttagtacaatggctgggcatgggctcttcacccactttgtccagctgctctgagaagagtcaagcgattttggtttgtttgtttgttttttgtcttgttcagagaactttacaaaggaaagaaaatgaatgggtaagaggaataaaaagagctaaatacctaataaaaaatggaaaaaaaaagaggaataaaaaggatgaaaaattaagtctcatcctgccaacactggacttgagaaaaatatataagtaaaagaactggaggccagtgatggctcagaggacaaggaagttgccaccaagacaggtacccttacctgagttcaatccctgagctctaaacagtagaaggaaagaaccaacactagaaagtgatcccctgaccgagagagagagagacagagagtgacagagagcgagagagagagacagagagagagagagagagagagagagagagagagacagagacagagagcaagagagagagagacagagagagacagagcgagagagagagagagacagagacagagagagacagagagacagagagcgagagagagagcgagagagagagagagacagagagacagagagagagagacagagagacagagtgagagagcgagagagagagagacagagagagagacagagacagagagcgagagagagacagagagagagacagagagcgagagagagagagagacagagagacagagacagagagacagagagacagagagcgagagagagagcgagagagagagacagagagacagagagagagagacagagagacagagagcgagagagagagcgagagagagggagagggagagagattagataagaaaaaataaatagatcagttaaaaaaaaagaagaacaacaatttggggctttgatcatgattacagcccagcagagaggatatttcagacagaaaaagacatcacagattcatgggtttgagagttgagagtttaaggatcttagactggtctctaaagagagctctggaaagtttatctagggctagaataggaagcgtttggtctagccaggggtaagcagttaggtcttgcttctctaggcaaagagatctgtctgctggcagagcttgggatgtagctcagtgggtagagtgcttgactagtgcacatgaagccctgggttcgaatatcaaaataagcataaagcagtctattggtgtacccctgtaatccaagtgtgagcaggacaggtgtgaagttcaaggtcacctttttctacctctgctaccttagaaagtcccaggagaccaacctgggatatataacacccctgcctcaaaaagaaaaggaggccagtctgaagatgacagccttgactaaaggctaaatcaaggtagccaggacaggaaaaggagcaatttaggaatcaagtttgccaacctccgtgaacacatgcatgcctgggacaaggtaaggaagaacctgaaggaaacccaggtttcaatgggaagagaggtgaggttgtaagagtctgagcagactcaccttgaagaggggcagctaatgagtctagagctgagagcagaaagaacagcttcctgttaagactcctttccacagggaaagtgtacatccttcagaaatactcagggcacagcatgtatcaggcaggtcctaagtgagtggctggaaacgctacaggggataaagtgatggtccccatctatctccagtttattgtgcctggagaaaactggtgatattaaaacctattaagtcctgagtgtcaagcctcacttctttagatgatctaattagatcctcattactctaagaagtggctactattaacatccccattttatggaagagaaaacgggcaaagtgagttcatttgccaagctacgaaccagcaaagttaacatttgaaaatctagtgttaaagccatcttccttctactttttcttttctccctcctaagacaaggtttcactctgtagcctgggctggcctcaaatcctaggtgcttctgcttcggcctacgaataccggattccaggcatgtaccatcatgcccaacttttgacaatgcacgtatttaacctcagcgtaagtctgacgtcaacgccaagcttgataggcatggtgggacctgcatgtcattcctggtgatcaaaagcttcaagaagcttcaagtgggaggaacgcatggtcccagaagttcaaggccagcctggaaacacagcaaaaccacacaggaaacaaaaacagtgacactaaagtcagggtggcctttacaagatggcagcagatacccaaaagagaccatggtccatttcgggagttcaagtcctcacagttgggattttacaacctgagccccgaaagtcaccctttcctctgcctagcttttaacccagggctttagctcagtgacagagtgctcaccttgcacaggtaaggcccctgtattcaattcaacttcctgtactcaatttttaaaaaatcatttttttttactgggcctggtgattggcacctacagtcccagcacctatgagctgtggtgagttcaagacctgattgtgctataagttccagaccagactgggcaacagtgggggactctacaccaatttaaaacaaattaaaagaacaccttttcttgaatcctattggcaaccatatacagaaaacccaggaaaaggagcaggtgcccagatactccatgtgccctgacctgtgcccagctatgtgtggagtcctgcactgcagatactcatacagtctcccccacagctgggcagtcatcccaccccaccccacccttcctccctagctctggctactgccattacatcatctgccaactgctgcagtttgtgctggaaaaaaaagtattttaaaactccaaggacatcaataattaacttccataccacaaaacttgtaatatgagtttgctgaaataaagtcaccagtatttaattcttctttaaagggtgtcttctattattattattttagagtgcaatttagtcatcaaaggtttacacagcctcatgtttataaattatatggggcagggatttaactcttctggccctacctgttctgatgagagggagggtcataaccctgttgtcacacccggcacctgccttgaaagggatgagttgtgagctggaacttcatagctcttttagaaatctgggatgaatatacagatttcctcttatgatgcaatcgcaagaagaacccgtgtgttgcctgctggcttttatcctccagaaggctgttgggaaacttcatctttttcagttgcgtttcagaatcttgccttgattatatgacataataatagtggctctccaattcatctgtgaaatcttttttcattgtggtggttactggttagatggtcaagaggggggagggactactgtcctaggtaaataaaaaccaccgagctgaaagagtttagggccctgactgactttatgtgtttacatcctcatctaagttcatcgagggtttgagaccttggccttaaagtggctcactttacaaagtaatgctcaatcctagctttccaagccagaatttttttctttctttcttgacaccacaatgggggcgaaggggtgggaacaggtgttctttttgttgttcctttgtttgaacgagtaatattttcagagttaaactggcctagttccaagggaatggggatgaacccctcgaggtcacgtgaagggggagcgccactttccaggcgaagtcgggctcttccccaccccttagcgcgcctagtcctctgccaaaaccaagagaaaggatgaaaagtccttcctcaaaggctcccagctcgagccctgcctttgacagactgactgggcagccccacttcattgggaagagatgcattccaagagcgcttctgtggtcggccagaagtggaaaattcaggatgacaaatattccgaagaaaactaatataggtcccaaggattccgggactcaaacaggtgaaacgacagaggacgtggcaccgacgccccgagaggagcgagtgcacacgctgcctatgctggagcatcgaccccctttcccgagtgcctttcttcagtccccgccctcagctgtctccgccagggttcaaccatgagggcggcggagcccaactctgctccccaatccaaaataaacacctagccttaaaaaaaaaaaaaaagtaaacctagtttagcgagttatactgaacaccacactcacggtttttgttttgttttaagtacttggtagagatgagggcgaaaacctttcccggctggaaaattactgagggtagtggggaatgggaaaaggagtaataagactaaaacaaagactgccttttcccctcccggtaggcaagggcctgaggtgccactttggagcactagggtcccattgcagcgctcctcttcccagcgcaggatcacctcccagtgaagtccctttgagtgggttggctagctcagaacctaagttgatgggagcgagttgtcctatgacctttacctcgccgcttcacctctttatgactcacttctcatcttcaaaatgaagagtgcgagtgcgtagcttgtaaagagctttgagatccctggtgaaaggtatctccgcgcctcggtccctctccgcgttcccactcccccacccccaatgtaaatctggaacgccttccttgttccttccattatcaagatgactacgtgcccaatcccggccgctctctttcatagcaggcgcggaaccccttctcctagcttctgagattcctagcgcccccccccaatcacccggccctcacccccaccctacgggaggccccactggcacccgcgccaggccaggccctgcgccgacacggcccggcgtctgcgtgcgtatgcgagagagggcgggctggatgagtcacgcggataatcgcgctctcgagtgcgcagacgacaggacaagcgcgtacgcgagcaggggtaggggcgcgccgcctcttcccccccacacacacacacccccaacctcctgtcccccgccagggttcccgtggcaggactttcgagcccagggaaccgaccgtggccgcccagaggaccccgagtagcgcggccacgggagccacgccgtactcccagcgccggagccgccgtcgccgccaccgccgccggcgtcagcacggctccagcccgccagctgcctggctggcgtcacggcctggccccgccccgcccgcgcccctccctcgcccccgcccccacgtgcgcggagtttgtttatttagctaccatggcaacgcgcagtgggggctgcgggaaggcggggagaagaaaggcagggggcggggcctggcggcggagccccgcgcgccgccacagggaggaggcggggagcaagcgagcgagaagttataagtaagaagcgcgcggcggccgccggcagttccccggccaagagagcgagcgcggctccgggcgcgcggggagcagaggcggtggcgggcggcggcggcacccggagccgccgagtgcccctccccgcccctccagccccccacccagcaacccgcccgtgacccgcgcccatggccgcgcgcacccggcacagtccccaggactccgcaccccgcgccaccgcccagctcgcagttccgcgccaccgcggccattctcacctggcggcgccgcccgcccaccgcccggaccacagcccccgcgccgccgacagccacagtggccgcgacaacggtgggggacactgctgagtccaagagcgtgcagcctggccatcggacctacttatctgccttgctgattgtctatttttataagagtttacaacttttctaagaatttttgtatacaaaggaacttttttaaagacatcgccggtttatattgaatccaaagaagaaggatctcgggcaatctgggggttttggtttgaggttttgtttctaaagtttttaatcttcgttgactttggggctcaggtacccctctctcttcttcggactccggaggaccttctgggcccccacattaatgaggtaggtgagatgttggacttgggaacagaaaggggtgaggattggagggaagcttcggagcagtggccagggtgtcccctgactcctggtccctgtgcgccccgcccggcccgcaggcagccacctggcgagtctgacatggctgtcagcgacgctctgctcccgtccttctccacgttcgcgtccggcccggcgggaagggagaagacactgcgtccagcaggtgccccgactaacgtgagtgtcgcgctagtgccctgtagatttctgcagatggggtggggtgtatgggcggaatccgggggtcaccaagagtccttggttaggacaaggattgccctccattggaactctacagccttccgaggtggctcctcggcccttgagtcggccttaagtgcgtgtggtcccggcactgcggtaccgccaggggcgcacagcggttccccactagtcttcgggcgtccggaccgtggggtgggcgcactcagtccactatattttaggtggacaagtctcgagaccctttgggccggagtgatcgtagcgcgtgggcgacccggtggctatggtgcatggggagaaagccaccgtgtcccagtgtcccaattccgtgggcggctggagcgtcccgcggatctggcggggaagaggactgggctggtggagcgacggcactagcttgcaggagaacgaacgcgccacctcttaccttggtgttagctgagattgcagtgtggcccctggagtccccgaggctgccttcctgttctgtccagttcctatagcagggtgttggtgtgcttcacccaacaagtcaatattaggggtggcaacagggtgctacaattaacagtttctctctccctccctgttcttgcagcgttggcgtgaggaactctctcacatgaagcgacttcccccacttcccggccgcccctacgacctggcggcgacggtggccacagacctggagagtggcggagctggtgcagcttgcagcagtaacaacccggccctcctagcccggagggagaccgaggagttcaacgacctcctggacctagactttatcctttccaactcgctaacccaccaggaatcggtggccgccaccgtgaccacctcggcgtcagcttcatcctcgtcttccccggcgagcagcggccctgccagcgcgccctccacctgcagcttcagctatccgatccgggccgggggtgacccgggcgtggctgccagcaacacaggtggagggctcctctacagccgagaatctgcgccacctcccacggcccccttcaacctggcggacatcaatgacgtgagcccctcgggcggcttcgtggctgagctcctgcggccggagttggacccagtatacattccgccacagcagcctcagccgccaggtggcgggctgatgggcaagtttgtgctgaaggcgtctctgaccacccctggcagcgagtacagcagcccttcggtcatcagtgttagcaaaggaagcccagacggcagccaccccgtggtagtggcgccctacagcggtggcccgccgcgcatgtgccccaagattaagcaagaggcggtcccgtcctgcacggtcagccggtccctagaggcccatttgagcgctggaccccagctcagcaacggccaccggcccaacacacacgacttccccctggggcggcagctccccaccaggactacccctacactgagtcccgaggaactgctgaacagcagggactgtcaccctggcctgcctcttcccccaggattccatccccatccggggcccaactaccctcctttcctgccagaccagatgcagtcacaagtcccctctctccattatcaaggttagtggggggaagggactggctggtagagatggcgctgggagctttgtttctggggatcttgagactatccagattgaagttgaccccactttctttacccccccccctcccagagctcatgccaccgggttcctgcctgccagaggagcccaagccaaagaggggaagaaggtcgtggccccggaaaagaacagccacccacacttgtgactatgcaggctgtggcaaaacctataccaagagttctcatctcaaggcacacctgcgaactcacacaggtaagggaaccagcactgtggaggagggttggtgcctgtctgctccgtaggctggctgtgggctccttagggctttcttgggtgctggggtgtatctcttctccatctcctggatcacagaggagggcagcaaacaggcgcctatggttttgcccagaagccttttgcttgatggatgctatctgctgcctgaatgtgcagtttctcattgggcctttaaaagatagggagtttcctgtgtgtgcctgcccctcctagcctggtaatcaagaagttatactttgcaatgcaaaactgtggcggtatctttaaaagaaaagttttaaattttctagattattttcattgttgtctcctcctcctcttagatctacctacccttgactctattctggtctttagaataattagatcgtatttacgtttgaagaatttaatggttcccattgcagggattctggtgtaaaactgtccctgcaagctgggtagggtgacactcaactttggagttacaaataccaaagttgaaagaatcctgttgattcaagaccgatctggtcaagaacccgagtctcgaaataacaaagaacgcacaggtagtcttttagtgggtagagtcttccagatgcatttatgaaaacagccagaacggctctgctggagaaattagccacgggtggcattctggacccagcgtaatggcatgggatcctttgggtttcaacagagccaacttcttttttttttttttccattttttattaagtatttagctcatttacatttccaatgctataccaaaagtcccccatacccacccacccccactcccctacccgcccactccccctttttggccctggcgttcccctgtactggggcatataaagtttgcctgtccaatgggcctctctttccagtgatggccgactaggccatcttttgatatatatgcaactagagacaagagctccagggtactggttagttcataatgttgttccacctataggattgcagatccctttagcagagccaacttctaatccagtccatttccagtgctggttaggctcgagagtgaaaactccgtactgtgggggtggacgctttgagagggtatctgctttttttttttttaagttactaactactgtttctccatgagtttaaactcataacacatgtcattcctcttcatctgaaattcagtatggccctaaagtgtcataaagacattcctgaaggttttttttattattattattatatttttactttcttgaaaggagagagggtggggcatgcagtagaatttgctctctggcctctcccttttttttaagaaaaaaaaggggggtggctaattcttccttctagcaatggcttcagcagcccgttctctttccctttacaggcgagaaaccttaccactgtgactgggacggctgtgggtggaaattcgcccgctccgatgaactgaccaggcactaccgcaaacacacagggcaccggccctttcagtgccagaagtgtgacagggccttttccaggtcggaccaccttgccttacacatgaagaggcacttttaaatcccacgtagtggatgtgacccacactgccaggagagagagttcagtatttttttttctaacctttcacactgtcttcccacgaggggaggagcccagctggcaagcgctacaatcatggtcaagttcccagcaagtcagcttgtgaatggataatcaggagaaaggaagagttcaagagacaaaacagaaatactaaaaacaaacaaacaaaaaaacaaacaaaaaaaacaagaaaaaaaaatcacagaacagatggggtctgatactggatggatcttctatcattccaataccaaatccaacttgaacatgcccggacttacaaaatgccaaggggtgactggaagtttgtggatatcagggtatacactaaatcagtgagcttggggggagggaagaccaggattcccttgaattgtgtttcgatgatgcaatacacacgtaaagatcaccttgtatgctctttgccttcttaaaaaaaaaaaaagccattattgtgtcggaggaagaggaagcgattcaggtacagaacatgttctaacagcctaaatgatggtgcttggtgagtcgtggttctaaaggtaccaaacgggggagccaaagttctccaactgctgcatacttttgacaaggaaaatctagttttgtcttccgatctacattgatgacctaagccaggtaaataagcctggtttatttctgtaacatttttatgcagacagtctgttatgcactgtggtttcagatgtgcaataatttgtacaatggtttattcccaagtatgcctttaagcagaacaaatgtgtttttctatatagttccttgccttaataaatatgtaatataaatttaagcaaacttctattttgtatatttgtaaactacaaagtaaaaaaaaatgaacattttgtggagtttgtattttgcatactcaaggtgagaaataagttttaaataaacctataatattttatctgaacgacaatctctttgtttttttttttcgaaactggaaaagaactttttaacggggggggggggggggccactggtgagaaccacactgtgaagccaaccttaccttagcaagaggatgtaggcaacttgcttttttagactactcagttttacatgaagtagtgttggagttgagagctgtacggatgggaccttaaaaaacatctggttcatgtttgtttagtacgaatgcagaagtatacctccttacccaaacgcacatttccaggtaggtggctcagttattctttgatctgctcaattttagcagggagcactaaacagtaggccagaacactctagtttcatacatttatatttatacacatagacacatacacacacaaacgtgtgtgtatatgtacatgttacattttgtctttaaatgaaattatgaatcattttctgtgcaggcctggccttgtagtccccacagaatctaagtaacaaaagaaccttccccaggcaaacaaccctaagaacagaatgtagttccacagtgccctcctgaggattaagggcttcatttatgctgcatatattatccctaaagagatccaaaatatactatctacagagtatctcaaagcttcctgaatgtctctgaaggcatggaaacaatttaaaaattactcaaaccctgaaggacaggactgtgtagcccagtggtggggtgcaactgagcaaaaccctggagaggtagccacctctccaggttgaagcaaaactatttttagctgtcacaaaatggaaaagtctgtgtgatacttgtagacatgttaatggtggtgtgggtgactcagaagatgaaaggagcagaagctgactggcttattctttagagtgcttattaaccatccattgtacctagtgcctggagttgtatttacaccgtattatgctttataaatggaatttagaaacgtagattcacaaggagctcatgggagatcggcaaagtagtttctttgacttttaagaggccagtgtgattgaaaccacagcatgtgtctttgcttaaaaggaaacaggtgcatcaggaagatggaattttatgtggtcaagaatatattcaaagcaaagctaatgacatggaaaaatgttcatggtatgttaagtggagaaggcaggatataacacaataaacagcgagactccaattgtatacttgagtttgggcttgtctcctgtcacccaggctggctcaatcctaactctgttgctgagaatggccttgaactggtcaccttgcctctccctcccaaactcctgggttatgggcatgctctagcaaacctggctgtgttttgtttcctgtttggttttgtccttgctttttgttgtttgtttgtttaagtaggtttgcttattgtagctccaggcaagcctggagctccttgcaactcaactgtccttttaacccagggactctcttgccccggcctccccagtgctgtatgtatatatgctcactgtcatatgtggcttgggtatgtgtgttgaggagcagaaaaaacaataggaaataaaaagattggaaagaaacacgaaaaagtgaatagtagtttgcttggcttcaaatttcagtccaaatggatttgagaaccaaatactacccctccccatcaatttgcaaacactcacaaataataagtacaggaaaattgcttttctaagaataaaagtaaaatacacctgggcttttttttttaaagaatttaacctatgtaaaataaaactgcagtatgcttaatgactttttctttgtaataaataatggtggttgcttttataacctacctgtcttataaatggtttactccacctggggtgtagtgcagttggcagagtgcttgcctggcatgcatgaggccctgagtttgatccccaacacgacataaaacaaggtctggtggtactaatgttaatcccagtacttggaaggctgaggccggaggaatagaaagtcaaggtcatccttacctgcactcacctgtacacttcaaggacagcctgtaaggctctgtctcaaacaaacaaaaaggggggggaggggacagaggggaagaaacatctttctgaatgattgttaccataatcacgcataaactatcaggacggctcaaatctattcaaaaatgtctgaggtcataaggaaacatcagtacacattagcttcttctaatctgcaaaagtcagctcaatatcgcaaacgaatgaggaagaagagtactctaacaggacaaaacattattcaacacagcctaaaccatttcctctcacacctagtagctctgggctgccaggcacactgtcattgtggaggtacggagccactcacgtacaagagagcacctaataattgacatgcctgcttattatattttccttatgacatttaattttatatgtcctagattttaactggcatgcttacacaaggggattaactgtagtgtttcctgcctgtcaacagacaggtaggctgatttttattctgtcaaaatgtactttctaccggaagagacttgcaattctggttgtttgtttgtttgtttgtttaaattctgttttctttttgttcgttcctgttcttgtgttgagacagtgtctcatgtgttcccatctggcctggaaatcactgtatagccttgaacttctaatcttcctgcctcttcctctcaagtgctaggtttccaggcatgtgccctagtttgtatgatgctgaagacaggttttcatacattctggacaagcactccactatttgagctgcattctcagattttgggggtcttaggggggaagcactcttaatatgtagctcagtctggtctcaaactcactctgtagatatctcttccaatttttatatactatatgagtgaatgaacatatatgcatagatacataaatacacacacactcacaaagaaagtgagacagggagagctatgtagcagaggctggccttgaactcataccctagcctcgacctccagagtgctaagattgggtatgagtcactatgctctgctacatgagtctttataaggaaaaccaggcactgcaatgtgtagaagccgttccataggaaaaatattaacataagtacgcatacctgttgtcctctgacaatacagggagtctctctggatttagcaacgagtggcagttacctgctccattaaagttctggattctgatgctgtatttagcactctacagaccagatcatctccatacacacccctttctctccccacccccacccctctctttctcatatagacaaaggtagcacccagtcctacaaaaacactttcatatagttgttgtttttatcattttattattttattatgtattgtgctttttatatttattttagctctttgtatttccatagcaccttctacaggctattgtataccatcaagtttttatagtgctaaactgaagccatgtctgcctcctaaaggtcctttatgaaactgtcttccattgttcgcatgtacagtcattcaaagatgtttcctataaaaccatcctgatctgctgtcttcataaagaaggctgtggaatgtgctgcctgcgaaatccagtgggaaaggaacatggacatctgaacactgtgtgaacttagtcttcttaaagtttgcattaaatgaaactcaaaagagctggaagtgaacaagcttttggaaggctttgtcttaaacacaaaaggaacacaagacacaaaagaaagtcttaaggaaatttctcaccatgtcctgaaaaaaatgattagtgcttcagttgctttaaattatgcattgtgtctatggccagaccacagtcaaaacagaggggaagggggcttcaaaacatgtgctgaaacacaatttcccaggctggtgtgaagcctccggtagccaattaagttggtggaggaaggagatgccgcggaggtgtcattcatattgctgtaacattatatacttggaggccttcttttttaattgttttgaccatactctcgatagagtctcacttgaattgcttcggttctctcacacctaaatgagtcaacatgttgcaaacaggtccgcccaaaagtctcccaattgttcttaaaggaaaagaagggaaatagatagaaacctaagaggagccaaacagagacaacccacaccggcagtctcctcctggtcacctgatagaaccacgtgctttgtggatacaactcaatgattagaaaacaacggctccagaaggttagttagggccattggctgtgttttaggtttgttctcctgtttatgttatatgttgtcatttaagcagggcagaaaacaagcagttaaggaaaatatatgtcaatggctgatgatgtatagacagacagacagaggactcctgctgatggttggacaattatctagttaaaccaactacaacaaatagatatttccagttcactgtgtctgaggccagaagttcctatccctttttatttgtatttagtatgtatgagacagggtctcaaacttcccagctggggcttgagctcttaatcttcctgcctccgcgtcttgaatgctgggattgcagtgtgtgatacagtacccagttcacacagtgctggggaccaaacccagggtttagtactgctaggcaggcactttcccaactgagcaaatccttaggcagttcttataccataggcactgacaggatcaatgggttgctctgcggccaaatcgccatggcaagaacccaacgcactcaggtgcaacatctgcatactcactctgcagcctgtacggtaagtagttgctgcaacagagatgtggaaggaagcttgggtgattccctgaaagcctgagaagtaaagtaaggcagtataagccacgacagaagaaagcaatccagcacaatcgaaaggggctctccacaggggtaggcacatctcattctgatctgggttcccttagttctgcacaactctttatgccttacaacaaaacgcaggggtgggcttgccccctcccgaccctgttacatagatgaagacgcccagattctcttttgataaagttaccatttgtttttttgttttttgtttttttttttttttcatttctcattcttctgctatacactgagtactttttcttgttggtttttccttttgttttgggggcgtttcttttagctggggtctcatacagcacaagttagtcttaacttcagccttcctaccaccaactcctaagggctgagattataggcaggagccaccacgcccggccacgctcgaagcatttctaatacttttgtcttcagtcggctggacaggtagggcggcaggcaaaacagacgcatccagttcagaaggatttgctaacagccaggttcttccagtcatgctgctcagaatcgaaagccagagactttctgtctcccaacccgtgcgtgcgctcttcttcctcatcaaactggggaggtttcagcttcctgtgcctgcctctgtctctctgtctctctgtctctctgtctctctgtctctctctctctctctgcctctctctctctctctgtctccctcccttcctccctccctccctccctccctccacgcttcctttctctttttccttcttcctccatttttatgggaaagggtctcactctgtagctcaggctggcctcaaactcaccacctcaaccctcttgggtcagcttctcaagtggtgggattacaaatatgtgccaccccactaggctcaaagctgagttcttgaaaacactcctttgtgctcctccctcaacactcatctgctgcaaggttttctggtgtggcttcccctggcagacatgagctgctggaatccatagggagtttttcttgatcgcctctggaccctcatcatcatcctcctcagcaaaacgaaatcaatggttaatgagcatttagcccccaaactcggaatctccattcagggggactgggtgatctgctgggtgatcatggcattgactgtggagtctgacatattttaggaatgtgttggaggaagcagagggtatgggggtactgtcaggaggtcagaagaccaagagcaggtttgctatgaagcaacgcttaggagaaaggagctattttacccccttccttgcatggcctgttggctaccttcctttcatgggaaaatgtatgggaaaggaatgctgagggtatacaacagtaataaggggagcacctttgggtttctgaatgggtgaatgagacagagggaagggacgagctcgtcatctgtctgatgccctccctagggtttctaggcattttctgactttatactatgcctagataaagtgacatgcgcaagggtcagagggacaacatctgagagccagttctttcctcctgtaatggactctagggctgaaactcaagtcatcagcttggcttcaagagcttctacctgctggcccatcttgctaccactagtttggagtattttattttgagacaaggtctcttgtaggccacatacattccctgtgtatggaggtagacctaacctagaactcctgatcctcctgcctctgcctccctagtgttaagatcatcctgtgagtatctcctgagttctgagtccatctggggtgcatggtactctgtctcagtaaaggaaatcagcatctcagcctccatcagttctttggttggcttgtaggttggttttatttttaacttttcttgggaaagtagatttttctttgactcggccacaatccctgcaccccacatgccatgtgcctcgtacagttttcttgattgcttattattttatatacattcaacctgttattcgggtgcatgtttaaacatgctattcaggttgagcaaaaggattttagtgttatttaacaaaatagtttaaactttggggatttatgattcaagtaaaatacaacactttcgaggagggggaggatgttaacccgtgaaataccttgagtttctatggtacaagggaccttgtatgttagccatgggaagaaaattattttcttttaagcacagtgaagtttatggcgtgagaataactgacttcataagaagagcctggtgccaaagtctgagaagacagagcaggctttgcctgggggattctttgcattaagaactttgttaggcaaagccattatggcttagaagtctgatttgcaatttgtgcctttgtcaaaggattagatgatccctactgtttaatgttcaggtctcaatttgcatatggaaacacaaggccccttccaggtttggctctcttttattctcagcttctcggcctagtctgcagcagatactctgtaaaacttagtaaaagtgtttgcagtgattccagacctcccggaggttggctttagggtgaattctatctgggcttcaaagttaccaagctaaggatacaggagaaagtgacaaagaactcatagtgataggtgtacaggtgtcgccagttttctgagttagaacacagggcacaccattaacaagagaactctgcagagatgcgatcagttaacagaaggaagagagctctgactgctctgggatgaatttggacacctctgctcggtgtcttcctttatacataaaggcttgagtagactgattttagagttgccataacaatgctctcatcacaacccagcgttcagcagccaaattctctggcaaacagtttttacctaacatttttggcgctgacgctgttcccagatgggcaacctacaagctggaatagaaacctcacaaggaaggacaattttacaggttgtgagtttagaaggaatggtttatttgtttattttttgaagtctgtttctctgtcctttagcgttgtcactagccccagcttggaagtgtttcctctgtggcagtaggaatgcactggggcatgtgaacttggaggtgctggttgaatagggtagaggtggatagagaggaaaggggggggtgggattcacagtcattaagtatccctggtatgctgagaactttgctagaggatgaagatcttgctacacatacacacacacacacgcacacatgcatataaaatatatatattaaaacaaagtctcatgtagccctggctagcttcgaactctctgtgtggaatgatcttgaacttctgactctataactcagcccccgaccaagttctggggttgcaggagcatgccaccatgccactgtgttagagccctgtaagtcagcagttctcaacctgtgggtcatgacccccaaaatgaccatcccaaacagatatttatattatgattcataacagtagcataattaccgttatgaagtagcaatgatagtaattttatggctggaggtcaccacgacatgagaaactgtattaaagggtcgcagcatcaggaaggttaagaaccactgttttagatcaaagacagaagccctacaggagtgtgacttctctaagactgcacaggtacaaaaggaatccgtgtgtgtctaccttggaagcccactatcttactggaaaaaatatacacgctccttctcagataaacgaaagctcctccctccctgccattttgaatctaaatagggtgatattttctgcatgcagaaatacatgggcaggactggcctaaccatccatttttctaatagagacaagtaatcttacctgtctgtcattctattaaaaaaataccccacattcctccagtttgcagtttgaacaatggcctcggaaagaatgaccagctcctgcactgtagcaacccgtagccctgactaaagcaccacgaataagtcatggcttttcttcgaggataattcccgcatggttccaaaacattttatgcacgccttccatcgctgagaagaagaaccagcatctctatttatagctgggtccactggaggtgagtttaagaaaacatcttaggaggctgggtatgctggaaaaacgcaagtgatcctagcaccctggaggtggaaggagaagaggtttgatgccgacctctgccacatggctagactcgcgcgcgcgcgcgtgtgtgtgtgtgtgtgtgtgtgtgtgtgtgtgtgtgtgtgtgtgtgtgtgtgtgacacagagagagagagagagagagagagagagagagagagagagagagagagagagagagagagagagaatcaagcctcttcaatgctcaaaagcatccgaggaagctggttactctgaagcacatgctgagccagggccatgggaaacactcctatttcttgcccatcttccaaaaccctttgccaacattcttctaatgctcccaatatctaaagataatcccttttcccctaaccaggatctcaactgaaaatagcaccggacatgtgccgccaggcatgaaccaatgactcagaagccatttcggatctcagcagcctggaaggcatcgctgaacacgggatccaagtctgggagcctgtgagtgactggctaaaaggcattccaaagactggctcgctcaaagtctccttctcacaaatggggaagcaggggtttctcatctcttcaacgttatgctcctgtagaactccattttagcctcagactcccaacccttggattcagcttgcaataaaaggttttggggtaagtatctaaaccaagtagtcctaacggaggtatcctaacagagactgggtgtggtgggggggggcgggtgtgaaccagtgggcaggcctttgagagcaggagtgttcaacatcaggaacttagaaggcaaacagtgtcctccaaaacctgggctgatgtgggttattagctccattgagcttttttgtgtgtgtgtgggggggggggtgttggcttttttgagacaggatttctctgtgcagccctggctgtcctggaactcactctgtagaccaggctggcctcgaactcagaaatctgcctgcctctgcctcccgagtgctgggattaaaggcgtgcaccaccaatgcacggcccattgagcttcttttcagctgtgttgagtcttatttgctactgtttcatctttctcctttggctcataagcatatgtcctctctttggccaacagtggggcattggctacgatagtcctagtgtaacctcagaagcagctacacaccattcaagtgatcagcaatgaagacaggccagcatgtgtggaggcttccgtcctagcgttcccatgctcagcattttatgcatttttctcattcagtccctgtgataatcatgggagattacagttcttctcattctggggcggggggggggggacagacatgagaacctagatgaggctggacaactgaaacagaagaaaagcaattgagcaatgaagtgatggcttcactctctccccccctctctctctctcgtctctctgcatatttatggagaatgttcaaaacttcatggttgaggtgattgttcacactaaggacattccagaaggaatgctgtctaggagttactctttccagattgtactaaaagagctttgctgcttcgtctttagctctttaccctgcttggtttcctcttgatacttatttaaaacatatcaggattgtttcttctatttctcttccatcacacaacacagtgaagacaataccatgacatacttcatctgaaatcccggaatgacgacagcacagcccattccacttagtgtgaagactctgcagtggcctttcggatggaaaaggacagcctgcccgttgctcacgtcagacctactctacagtagatagttctttcaatggctaaggagaagcctattggaaatctgcttggataaacaaacccgcattgagtccagaggtaatcattaatgtttcaagggctaactcactggatgcccttttccctctgatggcttccaagcacccctgatgatgggtttcgggagataaactttccagtcagcagactccaattgagaagacaatggattggagatgcagagattaacaggagtttgggtgatgaacgattactcctatctggtctgtgtgaaatgaaaggagcttgcagcatccccagataggagttgtttgggtttcaggcccataataccctccctctctccacaaaggattagaccctctctgaacaaagctagaacagaatcgtgtgggtcggccagactctgggccttgaccttgctctgctgtttctggtcacgtgccacttgtttgggattttgtttttctgtgttcttccgaagggcgactttcccagcgtcaagagccttttcaaagtcacaagcgaatcatcccttagttcttccaggccgctttggcaggctttctctaccttccccaaacaggaccaagctcctatataaaattcataaaattcttggcaggaaagaaaccctcccattggaatgaacagatgttgggcgagtaactttgccatgatgagttgttcctaatactgtaggtctaaaacgtgtgaggatgttagcttgtattttaatgaatgtcaacaagttctgggcagttcttccatcgctatctgtggcacacacataacaatcacacacctgaatttctacagagtccttggggattggaaagctatgaaaaagcgaaaatggaaatccaacgtgcatgctgatgtattattataagctaactctcagaaacacctttcctctctgcccagcacctggatggtctacgtgcttctcctgaggcaattagctttgggggaatcagcagagacgaccagggtccccaccccggagactggagtgtcagttgcctgggcttctgctggctgcaatgcaagcccagaaccagcctatccactttgggattcaaagtcggaaatagggttccctgtggggtgggatgcggtgcgagccgctccgctacagctggcggaggagacttggg

SEQ ID NO: 76 - DNA, 29339 bp, Mus musculus
cccaagtctcctccgccagctgtagcggagcggctcgcaccgcatcccaccccacagggaaccctatttccgactttgaatcccaaagtggataggctggttctgggcttgcattgcagccagcagaagcccaggcaactgacactccagtctccggggtggggaccctggtcgtctctgctgattcccccaaagctaattgcctcaggagaagcacgtagaccatccaggtgctgggcagagaggaaaggtgtttctgagagttagcttataataatacatcagcatgcacgttggatttccattttcgctttttcatagctttccaatccccaaggactctgtagaaattcaggtgtgtgattgttatgtgtgtgccacagatagcgatggaagaactgcccagaacttgttgacattcattaaaatacaagctaacatcctcacacgttttagacctacagtattaggaacaactcatcatggcaaagttactcgcccaacatctgttcattccaatgggagggtttctttcctgccaagaattttatgaattttatataggagcttggtcctgtttggggaaggtagagaaagcctgccaaagcggcctggaagaactaagggatgattcgcttgtgactttgaaaaggctcttgacgctgggaaagtcgcccttcggaagaacacagaaaaacaaaatcccaaacaagtggcacgtgaccagaaacagcagagcaaggtcaaggcccagagtctggccgacccacacgattctgttctagctttgttcagagagggtctaatcctttgtggagagagggagggtattatgggcctgaaacccaaacaactcctatctggggatgctgcaagctcctttcatttcacacagaccagataggagtaatcgttcatcacccaaactcctgttaatctctgcatctccaatccattgtcttctcaattggagtctgctgactggaaagtttatctcccgaaacccatcatcaggggtgcttggaagccatcagagggaaaagggcatccagtgagttagcccttgaaacattaatgattacctctggactcaatgcgggtttgtttatccaagcagatttccaataggcttctccttagccattgaaagaactatctactgtagagtaggtctgacgtgagcaacgggcaggctgtccttttccatccgaaaggccactgcagagtcttcacactaagtggaatgggctgtgctgtcgtcattccgggatttcagatgaagtatgtcatggtattgtcttcactgtgttgtgtgatggaagagaaatagaagaaacaatcctgatatgttttaaataagtatcaagaggaaaccaagcagggtaaagagctaaagacgaagcagcaaagctcttttagtacaatctggaaagagtaactcctagacagcattccttctggaatgtccttagtgtgaacaatcacctcaaccatgaagttttgaacattctccataaatatgcagagagacgagagagagagagggggggagagagtgaagccatcacttcattgctcaattgcttttcttctgtttcagttgtccagcctcatctaggttctcatgtctgtccccccccccccgccccagaatgagaagaactgtaatctcccatgattatcacagggactgaatgagaaaaatgcataaaatgctgagcatgggaacgctaggacggaagcctccacacatgctggcctgtcttcattgctgatcacttgaatggtgtgtagctgcttctgaggttacactaggactatcgtagccaatgccccactgttggccaaagagaggacatatgcttatgagccaaaggagaaagatgaaacagtagcaaataagactcaacacagctgaaaagaagctcaatgggccgtgcattggtggtgcacgcctttaatcccagcactcgggaggcagaggcaggcagatttctgagttcgaggccagcctggtctacagagtgagttccaggacagccagggctgcacagagaaatcctgtctcaaaaaagccaacacccccccccccacacacacacaaaaaagctcaatggagctaataacccacatcagcccaggttttggaggacactgtttgccttctaagttcctgatgttgaacactcctgctctcaaaggcctgcccactggttcacacccgcccccccccaccacacccagtctctgttaggatacctccgttaggactacttggtttagatacttaccccaaaaccttttattgcaagctgaatccaagggttgggagtctgaggctaaaatggagttctacaggagcataacgttgaagagatgagaaacccctgcttccccatttgtgagaaggagactttgagcgagccagtctttggaatgccttttagccagtcactcacaggctcccagacttggatcccgtgttcagcgatgccttccaggctgctgagatccgaaatggcttctgagtcattggttcatgcctggcggcacatgtccggtgctattttcagttgagatcctggttaggggaaaagggattatctttagatattgggagcattagaagaatgttggcaaagggttttggaagatgggcaagaaataggagtgtttcccatggccctggctcagcatgtgcttcagagtaaccagcttcctcggatgcttttgagcattgaagaggcttgattctctctctctctctctctctctctctctctctctctctctctctctctctctctctctctctctgtgtcacacacacacacacacacacacacacacacacacacacacacacacacacacacgcgcgcgcgcgcgagtctagccatgtggcagaggtcggcatcaaacctcttctccttccacctccagggtgctaggatcacttgcgtttttccagcatacccagcctcctaagatgttttcttaaactcacctccagtggacccagctataaatagagatgctggttcttcttctcagcgatggaaggcgtgcataaaatgttttggaaccatgcgggaattatcctcgaagaaaagccatgacttattcgtggtgctttagtcagggctacgggttgctacagtgcaggagctggtcattctttccgaggccattgttcaaactgcaaactggaggaatgtggggtatttttttaatagaatgacagacaggtaagattacttgtctctattagaaaaatggatggttaggccagtcctgcccatgtatttctgcatgcagaaaatatcaccctatttagattcaaaatggcagggagggaggagctttcgtttatctgagaaggagcgtgtatattttttccagtaagatagtgggcttccaaggtagacacacacggattccttttgtacctgtgcagtcttagagaagtcacactcctgtagggcttctgtctttgatctaaaacagtggttcttaaccttcctgatgctgcgaccctttaatacagtttctcatgtcgtggtgacctccagccataaaattactatcattgctacttcataacggtaattatgctactgttatgaatcataatataaatatctgtttgggatggtcattttgggggtcatgacccacaggttgagaactgctgacttacagggctctaacacagtggcatggtggcatgctcctgcaaccccagaacttggtcgggggctgagttatagagtcagaagttcaagatcattccacacagagagttcgaagctagccagggctacatgagactttgttttaatatatatattttatatgcatgtgtgcgtgtgtgtgtgtgtatgtgtagcaagatcttcatcctctagcaaagttctcagcataccagggatacttaatgactgtgaatcccacccccccctttcctctctatccacctctaccctattcaaccagcacctccaagttcacatgccccagtgcattcctactgccacagaggaaacacttccaagctggggctagtgacaacgctaaaggacagagaaacagacttcaaaaaataaacaaataaaccattccttctaaactcacaacctgtaaaattgtccttccttgtgaggtttctattccagcttgtaggttgcccatctgggaacagcgtcagcgccaaaaatgttaggtaaaaactgtttgccagagaatttggctgctgaacgctgggttgtgatgagagcattgttatggcaactctaaaatcagtctactcaagcctttatgtataaaggaagacaccgagcagaggtgtccaaattcatcccagagcagtcagagctctcttccttctgttaactgatcgcatctctgcagagttctcttgttaatggtgtgccctgtgttctaactcagaaaactggcgacacctgtacacctatcactatgagttctttgtcactttctcctgtatccttagcttggtaactttgaagcccagatagaattcaccctaaagccaacctccgggaggtctggaatcactgcaaacacttttactaagttttacagagtatctgctgcagactaggccgagaagctgagaataaaagagagccaaacctggaaggggccttgtgtttccatatgcaaattgagacctgaacattaaacagtagggatcatctaatcctttgacaaaggcacaaattgcaaatcagacttctaagccataatggctttgcctaacaaagttcttaatgcaaagaatcccccaggcaaagcctgctctgtcttctcagactttggcaccaggctcttcttatgaagtcagttattctcacgccataaacttcactgtgcttaaaagaaaataattttcttcccatggctaacatacaaggtcccttgtaccatagaaactcaaggtatttcacgggttaacatcctccccctcctcgaaagtgttgtattttacttgaatcataaatccccaaagtttaaactattttgttaaataacactaaaatccttttgctcaacctgaatagcatgtttaaacatgcacccgaataacaggttgaatgtatataaaataataagcaatcaagaaaactgtacgaggcacatggcatgtggggtgcagggattgtggccgagtcaaagaaaaatctactttcccaagaaaagttaaaaataaaaccaacctacaagccaaccaaagaactgatggaggctgagatgctgatttcctttactgagacagagtaccatgcaccccagatggactcagaactcaggagatactcacaggatgatcttaacactagggaggcagaggcaggaggatcaggagttctaggttaggtctacctccatacacagggaatgtatgtggcctacaagagaccttgtctcaaaataaaatactccaaactagtggtagcaagatgggccagcaggtagaagctcttgaagccaagctgatgacttgagtttcagccctagagtccattacaggaggaaagaactggctctcagatgttgtccctctgacccttgcgcatgtcactttatctaggcatagtataaagtcagaaaatgcctagaaaccctagggagggcatcagacagatgacgagctcgtcccttccctctgtctcattcacccattcagaaacccaaaggtgctccccttattactgttgtataccctcagcattcctttcccatacattttcccatgaaaggaaggtagccaacaggccatgcaaggaagggggtaaaatagctcctttctcctaagcgttgcttcatagcaaacctgctcttggtcttctgacctcctgacagtacccccataccctctgcttcctccaacacattcctaaaatatgtcagactccacagtcaatgccatgatcacccagcagatcacccagtccccctgaatggagattccgagtttgggggctaaatgctcattaaccattgatttcgttttgctgaggaggatgatgatgagggtccagaggcgatcaagaaaaactccctatggattccagcagctcatgtctgccaggggaagccacaccagaaaaccttgcagcagatgagtgttgagggaggagcacaaaggagtgttttcaagaactcagctttgagcctagtggggtggcacatatttgtaatcccaccacttgagaagctgacccaagagggttgaggtggtgagtttgaggccagcctgagctacagagtgagaccctttcccataaaaatggaggaagaaggaaaaagagaaaggaagcgtggagggagggagggagggagggaggaagggagggagacagagagagagagagaggcagagagagagagagagacagagagacagagagacagagagacagagagacagaggcaggcacaggaagctgaaacctccccagtttgatgaggaagaagagcgcacgcacgggttgggagacagaaagtctctggctttcgattctgagcagcatgactggaagaacctggctgttagcaaatccttctgaactggatgcgtctgttttgcctgccgccctacctgtccagccgactgaagacaaaagtattagaaatgcttcgagcgtggccgggcgtggtggctcctgcctataatctcagcccttaggagttggtggtaggaaggctgaagttaagactaacttgtgctgtatgagaccccagctaaaagaaacgcccccaaaacaaaaggaaaaaccaacaagaaaaagtactcagtgtatagcagaagaatgagaaatgaaaaaaaaaaaaaaacaaaaaacaaaaaaacaaatggtaactttatcaaaagagaatctgggcgtcttcatctatgtaacagggtcgggagggggcaagcccacccctgcgttttgttgtaaggcataaagagttgtgcagaactaagggaacccagatcagaatgagatgtgcctacccctgtggagagcccctttcgattgtgctggattgctttcttctgtcgtggcttatactgccttactttacttctcaggctttcagggaatcacccaagcttccttccacatctctgttgcagcaactacttaccgtacaggctgcagagtgagtatgcagatgttgcacctgagtgcgttgggttcttgccatggcgatttggccgcagagcaacccattgatcctgtcagtgcctatggtataagaactgcctaaggatttgctcagttgggaaagtgcctgcctagcagtactaaaccctgggtttggtccccagcactgtgtgaactgggtactgtatcacacactgcaatcccagcattcaagacgcggaggcaggaagattaagagctcaagccccagctgggaagtttgagaccctgtctcatacatactaaatacaaataaaaagggataggaacttctggcctcagacacagtgaactggaaatatctatttgttgtagttggtttaactagataattgtccaaccatcagcaggagtcctctgtctgtctgtctatacatcatcagccattgacatatattttccttaactgcttgttttctgccctgcttaaatgacaacatataacataaacaggagaacaaacctaaaacacagccaatggccctaactaaccttctggagccgttgttttctaatcattgagttgtatccacaaagcacgtggttctatcaggtgaccaggaggagactgccggtgtgggttgtctctgtttggctcctcttaggtttctatctatttcccttcttttcctttaagaacaattgggagacttttgggcggacctgtttgcaacatgttgactcatttaggtgtgagagaaccgaagcaattcaagtgagactctatcgagagtatggtcaaaacaattaaaaaagaaggcctccaagtatataatgttacagcaatatgaatgacacctccgcggcatctccttcctccaccaacttaattggctaccggaggcttcacaccagcctgggaaattgtgtttcagcacatgttttgaagcccccttcccctctgttttgactgtggtctggccatagacacaatgcataatttaaagcaactgaagcactaatcatttttttcaggacatggtgagaaatttccttaagactttcttttgtgtcttgtgttccttttgtgtttaagacaaagccttccaaaagcttgttcacttccagctcttttgagtttcatttaatgcaaactttaagaagactaagttcacacagtgttcagatgtccatgttcctttcccactggatttcgcaggcagcacattccacagccttctttatgaagacagcagatcaggatggttttataggaaacatctttgaatgactgtacatgcgaacaatggaagacagtttcataaaggacctttaggaggcagacatggcttcagtttagcactataaaaacttgatggtatacaatagcctgtagaaggtgctatggaaatacaaagagctaaaataaatataaaaagcacaatacataataaaataataaaatgataaaaacaacaactatatgaaagtgtttttgtaggactgggtgctacctttgtctatatgagaaagagaggggtgggggtggggagagaaaggggtgtgtatggagatgatctggtctgtagagtgctaaatacagcatcagaatccagaactttaatggagcaggtaactgccactcgttgctaaatccagagagactccctgtattgtcagaggacaacaggtatgcgtacttatgttaatatttttcctatggaacggcttctacacattgcagtgcctggttttccttataaagactcatgtagcagagcatagtgactcatacccaatcttagcactctggaggtcgaggctagggtatgagttcaaggccagcctctgctacatagctctccctgtctcactttctttgtgagtgtgtgtgtatttatgtatctatgcatatatgttcattcactcatatagtatataaaaattggaagagatatctacagagtgagtttgagaccagactgagctacatattaagagtgcttcccccctaagacccccaaaatctgagaatgcagctcaaatagtggagtgcttgtccagaatgtatgaaaacctgtcttcagcatcatacaaactagggcacatgcctggaaacctagcacttgagaggaagaggcaggaagattagaagttcaaggctatacagtgatttccaggccagatgggaacacatgagacactgtctcaacacaagaacaggaacgaacaaaaagaaaacagaatttaaacaaacaaacaaacaaacaaccagaattgcaagtctcttccggtagaaagtacattttgacagaataaaaatcagcctacctgtctgttgacaggcaggaaacactacagttaatccccttgtgtaagcatgccagttaaaatctaggacatataaaattaaatgtcataaggaaaatataataagcaggcatgtcaattattaggtgctctcttgtacgtgagtggctccgtacctccacaatgacagtgtgcctggcagcccagagctactaggtgtgagaggaaatggtttaggctgtgttgaataatgttttgtcctgttagagtactcttcttcctcattcgtttgcgatattgagctgacttttgcagattagaagaagctaatgtgtactgatgtttccttatgacctcagacatttttgaatagatttgagccgtcctgatagtttatgcgtgattatggtaacaatcattcagaaagatgtttcttcccctctgtcccctcccccccctttttgtttgtttgagacagagccttacaggctgtccttgaagtgtacaggtgagtgcaggtaaggatgaccttgactttctattcctccggcctcagccttccaagtactgggattaacattagtaccaccagaccttgttttatgtcgtgttggggatcaaactcagggcctcatgcatgccaggcaagcactctgccaactgcactacaccccaggtggagtaaaccatttataagacaggtaggttataaaagcaaccaccattatttattacaaagaaaaagtcattaagcatactgcagttttattttacataggttaaattctttaaaaaaaaaagcccaggtgtattttacttttattcttagaaaagcaattttcctgtacttattatttgtgagtgtttgcaaattgatggggaggggtagtatttggttctcaaatccatttggactgaaatttgaagccaagcaaactactattcactttttcgtgtttctttccaatctttttatttcctattgttttttctgctcctcaacacacatacccaagccacatatgacagtgagcatatatacatacagcactggggaggccggggcaagagagtccctgggttaaaaggacagttgagttgcaaggagctccaggcttgcctggagctacaataagcaaacctacttaaacaaacaaacaacaaaaagcaaggacaaaaccaaacaggaaacaaaacacagccaggtttgctagagcatgcccataacccaggagtttgggagggagaggcaaggtgaccagttcaaggccattctcagcaacagagttaggattgagccagcctgggtgacaggagacaagcccaaactcaagtatacaattggagtctcgctgtttattgtgttatatcctgccttctccacttaacataccatgaacatttttccatgtcattagctttgctttgaatatattcttgaccacataaaattccatcttcctgatgcacctgtttccttttaagcaaagacacatgctgtggtttcaatcacactggcctcttaaaagtcaaagaaactactttgccgatctcccatgagctccttgtgaatctacgtttctaaattccatttataaagcataatacggtgtaaatacaactccaggcactaggtacaatggatggttaataagcactctaaagaataagccagtcagcttctgctcctttcatcttctgagtcacccacaccaccattaacatgtctacaagtatcacacagacttttccattttgtgacagctaaaaatagttttgcttcaacctggagaggtggctacctctccagggttttgctcagttgcaccccaccactgggctacacagtcctgtccttcagggtttgagtaatttttaaattgtttccatgccttcagagacattcaggaagctttgagatactctgtagatagtatattttggatctctttagggataatatatgcagcataaatgaagcccttaatcctcaggagggcactgtggaactacattctgttcttagggttgtttgcctggggaaggttcttttgttacttagattctgtggggactacaaggccaggcctgcacagaaaatgattcataatttcatttaaagacaaaatgtaacatgtacatatacacacacgtttgtgtgtgtatgtgtctatgtgtataaatataaatgtatgaaactagagtgttctggcctactgtttagtgctccctgctaaaattgagcagatcaaagaataactgagccacctacctggaaatgtgcgtttgggtaaggaggtatacttctgcattcgtactaaacaaacatgaaccagatgttttttaaggtcccatccgtacagctctcaactccaacactacttcatgtaaaactgagtagtctaaaaaagcaagttgcctacatcctcttgctaaggtaaggttggcttcacagtgtggttctcaccagtggccccccccccccccccgttaaaaagttcttttccagtttcgaaaaaaaaaaacaaagagattgtcgttcagataaaatattataggtttatttaaaacttatttctcaccttgagtatgcaaaatacaaactccacaaaatgttcatttttttttactttgtagtttacaaatatacaaaatagaagtttgcttaaatttatattacatatttattaaggcaaggaactatatagaaaaacacatttgttctgcttaaaggcatacttgggaataaaccattgtacaaattattgcacatctgaaaccacagtgcataacagactgtctgcataaaaatgttacagaaataaaccaggcttatttacctggcttaggtcatcaatgtagatcggaagacaaaactagattttccttgtcaaaagtatgcagcagttggagaactttggctcccccgtttggtacctttagaaccacgactcaccaagcaccatcatttaggctgttagaacatgttctgtacctgaatcgcttcctcttcctccgacacaataatggctttttttttttttaagaaggcaaagagcatacaaggtgatctttacgtgtgtattgcatcatcgaaacacaattcaagggaatcctggtcttccctccccccaagctcactgatttagtgtataccctgatatccacaaacttccagtcaccccttggcattttgtaagtccgggcatgttcaagttggatttggtattggaatgatagaagatccatccagtatcagaccccatctgttctgtgatttttttttcttgttttttttgtttgtttttttgtttgtttgtttttagtatttctgttttgtctcttgaactcttcctttctcctgattatccattcacaagctgacttgctgggaacttgaccatgattgtagcgcttgccagctgggctcctcccctcgtgggaagacagtgtgaaaggttagaaaaaaaaatactgaactctctctcctggcagtgtgggtcacatccactacgtgggatttaaaagtgcctcttcatgtgtaaggcaaggtggtccgacctggaaaaggccctgtcacacttctggcactgaaagggccggtgccctgtgtgtttgcggtagtgcctggtcagttcatcggagcgggcgaatttccacccacagccgtcccagtcacagtggtaaggtttctcgcctgtaaagggaaagagaacgggctgctgaagccattgctagaaggaagaattagccaccccccttttttttcttaaaaaaaagggagaggccagagagcaaattctactgcatgccccaccctctctcctttcaagaaagtaaaaatataataataataataaaaaaaaccttcaggaatgtctttatgacactttagggccatactgaatttcagatgaagaggaatgacatgtgttatgagtttaaactcatggagaaacagtagttagtaacttaaaaaaaaaaaaagcagataccctctcaaagcgtccacccccacagtacggagttttcactctcgagcctaaccagcactggaaatggactggattagaagttggctctgctaaagggatctgcaatcctataggtggaacaacattatgaactaaccagtaccctggagctcttgtctctagttgcatatatatcaaaagatggcctagtcggccatcactggaaagagaggcccattggacaggcaaactttatatgccccagtacaggggaacgccagggccaaaaagggggagtgggcgggtaggggagtgggggtgggtgggtatgggggacttttggtatagcattggaaatgtaaatgagctaaatacttaataaaaaatggaaaaaaaaaaaaaagaagttggctctgttgaaacccaaaggatcccatgccattacgctgggtccagaatgccacccgtggctaatttctccagcagagccgttctggctgttttcataaatgcatctggaagactctacccactaaaagactacctgtgcgttctttgttatttcgagactcgggttcttgaccagatcggtcttgaatcaacaggattctttcaactttggtatttgtaactccaaagttgagtgtcaccctacccagcttgcagggacagttttacaccagaatccctgcaatgggaaccattaaattcttcaaacgtaaatacgatctaattattctaaagaccagaatagagtcaagggtaggtagatctaagaggaggaggagacaacaatgaaaataatctagaaaatttaaaacttttcttttaaagataccgccacagttttgcattgcaaagtataacttcttgattaccaggctaggaggggcaggcacacacaggaaactccctatcttttaaaggcccaatgagaaactgcacattcaggcagcagatagcatccatcaagcaaaaggcttctgggcaaaaccataggcgcctgtttgctgccctcctctgtgatccaggagatggagaagagatacaccccagcacccaagaaagccctaaggagcccacagccagcctacggagcagacaggcaccaaccctcctccacagtgctggttcccttacctgtgtgagttcgcaggtgtgccttgagatgagaactcttggtataggttttgccacagcctgcatagtcacaagtgtgggtggctgttcttttccggggccacgaccttcttcccctctttggcttgggctcctctggcaggcaggaacccggtggcatgagctctgggaggggggggggtaaagaaagtggggtcaacttcaatctggatagtctcaagatccccagaaacaaagctcccagcgccatctctaccagccagtcccttccccccactaaccttgataatggagagaggggacttgtgactgcatctggtctggcaggaaaggagggtagttgggccccggatggggatggaatcctgggggaagaggcaggccagggtgacagtccctgctgttcagcagttcctcgggactcagtgtaggggtagtcctggtggggagctgccgccccagggggaagtcgtgtgtgttgggccggtggccgttgctgagctggggtccagcgctcaaatgggcctctagggaccggctgaccgtgcaggacgggaccgcctcttgcttaatcttggggcacatgcgcggcgggccaccgctgtagggcgccactaccacggggtggctgccgtctgggcttcctttgctaacactgatgaccgaagggctgctgtactcgctgccaggggtggtcagagacgccttcagcacaaacttgcccatcagcccgccacctggcggctgaggctgctgtggcggaatgtatactgggtccaactccggccgcaggagctcagccacgaagccgcccgaggggctcacgtcattgatgtccgccaggttgaagggggccgtgggaggtggcgcagattctcggctgtagaggagccctccacctgtgttgctggcagccacgcccgggtcacccccggcccggatcggatagctgaagctgcaggtggagggcgcgctggcagggccgctgctcgccggggaagacgaggatgaagctgacgccgaggtggtcacggtggcggccaccgattcctggtgggttagcgagttggaaaggataaagtctaggtccaggaggtcgttgaactcctcggtctccctccgggctaggagggccgggttgttactgctgcaagctgcaccagctccgccactctccaggtctgtggccaccgtcgccgccaggtcgtaggggcggccgggaagtgggggaagtcgcttcatgtgagagagttcctcacgccaacgctgcaagaacagggagggagagagaaactgttaattgtagcaccctgttgccacccctaatattgacttgttgggtgaagcacaccaacaccctgctataggaactggacagaacaggaaggcagcctcggggactccaggggccacactgcaatctcagctaacaccaaggtaagaggtggcgcgttcgttctcctgcaagctagtgccgtcgctccaccagcccagtcctcttccccgccagatccgcgggacgctccagccgcccacggaattgggacactgggacacggtggctttctccccatgcaccatagccaccgggtcgcccacgcgctacgatcactccggcccaaagggtctcgagacttgtccacctaaaatatagtggactgagtgcgcccaccccacggtccggacgcccgaagactagtggggaaccgctgtgcgcccctggcggtaccgcagtgccgggaccacacgcacttaaggccgactcaagggccgaggagccacctcggaaggctgtagagttccaatggagggcaatccttgtcctaaccaaggactcttggtgacccccggattccgcccatacaccccaccccatctgcagaaatctacagggcactagcgcgacactcacgttagtcggggcacctgctggacgcagtgtcttctcccttcccgccgggccggacgcgaacgtggagaaggacgggagcagagcgtcgctgacagccatgtcagactcgccaggtggctgcctgcgggccgggcggggcgcacagggaccaggagtcaggggacaccctggccactgctccgaagcttccctccaatcctcacccctttctgttcccaagtccaacatctcacctacctcattaatgtgggggcccagaaggtcctccggagtccgaagaagagagaggggtacctgagccccaaagtcaacgaagattaaaaactttagaaacaaaacctcaaaccaaaacccccagattgcccgagatccttcttctttggattcaatataaaccggcgatgtctttaaaaaagttcctttgtatacaaaaattcttagaaaagttgtaaactcttataaaaatagacaatcagcaaggcagataagtaggtccgatggccaggctgcacgctcttggactcagcagtgtcccccaccgttgtcgcggccactgtggctgtcggcggcgcgggggctgtggtccgggcggtgggcgggcggcgccgccaggtgagaatggccgcggtggcgcggaactgcgagctgggcggtggcgcggggtgcggagtcctggggactgtgccgggtgcgcgcggccatgggcgcgggtcacgggcgggttgctgggtggggggctggaggggcggggaggggcactcggcggctccgggtgccgccgccgcccgccaccgcctctgctccccgcgcgcccggagccgcgctcgctctcttggccggggaactgccggcggccgccgcgcgcttcttacttataacttctcgctcgcttgctccccgcctcctccctgtggcggcgcgcggggctccgccgccaggccccgccccctgcctttcttctccccgccttcccgcagcccccactgcgcgttgccatggtagctaaataaacaaactccgcgcacgtgggggcgggggcgagggaggggcgcgggcggggcggggccaggccgtgacgccagccaggcagctggcgggctggagccgtgctgacgccggcggcggtggcggcgacggcggctccggcgctgggagtacggcgtggctcccgtggccgcgctactcggggtcctctgggcggccacggtcggttccctgggctcgaaagtcctgccacgggaaccctggcgggggacaggaggttgggggtgtgtgtgtgtgggggggaagaggcggcgcgcccctacccctgctcgcgtacgcgcttgtcctgtcgtctgcgcactcgagagcgcgattatccgcgtgactcatccagcccgccctctctcgcatacgcacgcagacgccgggccgtgtcggcgcagggcctggcctggcgcgggtgccagtggggcctcccgtagggtgggggtgagggccgggtgattgggggggggcgctaggaatctcagaagctaggagaaggggttccgcgcctgctatgaaagagagcggccgggattgggcacgtagtcatcttgataatggaaggaacaaggaaggcgttccagatttacattgggggtgggggagtgggaacgcggagagggaccgaggcgcggagatacctttcaccagggatctcaaagctctttacaagctacgcactcgcactcttcattttgaagatgagaagtgagtcataaagaggtgaagcggcgaggtaaaggtcataggacaactcgctcccatcaacttaggttctgagctagccaacccactcaaagggacttcactgggaggtgatcctgcgctgggaagaggagcgctgcaatgggaccctagtgctccaaagtggcacctcaggcccttgcctaccgggaggggaaaaggcagtctttgttttagtcttattactccttttcccattccccactaccctcagtaattttccagccgggaaaggttttcgccctcatctctaccaagtacttaaaacaaaacaaaaaccgtgagtgtggtgttcagtataactcgctaaactaggtttactttttttttttttttaaggctaggtgtttattttggattggggagcagagttgggctccgccgccctcatggttgaaccctggcggagacagctgagggcggggactgaagaaaggcactcgggaaagggggtcgatgctccagcataggcagcgtgtgcactcgctcctctcggggcgtcggtgccacgtcctctgtcgtttcacctgtttgagtcccggaatccttgggacctatattagttttcttcggaatatttgtcatcctgaattttccacttctggccgaccacagaagcgctcttggaatgcatctcttcccaatgaagtggggctgcccagtcagtctgtcaaaggcagggctcgagctgggagcctttgaggaaggacttttcatcctttctcttggttttggcagaggactaggcgcgctaaggggtggggaagagcccgacttcgcctggaaagtggcgctcccccttcacgtgacctcgaggggttcatccccattcccttggaactaggccagtttaactctgaaaatattactcgttcaaacaaaggaacaacaaaaagaacacctgttcccaccccttcgcccccattgtggtgtcaagaaagaaagaaaaaaattctggcttggaaagctaggattgagcattactttgtaaagtgagccactttaaggccaaggtctcaaaccctcgatgaacttagatgaggatgtaaacacataaagtcagtcagggccctaaactctttcagctcggtggtttttatttacctaggacagtagtccctcccccctcttgaccatctaaccagtaaccaccacaatgaaaaaagatttcacagatgaattggagagccactattattatgtcatataatcaaggcaagattctgaaacgcaactgaaaaagatgaagtttcccaacagccttctggaggataaaagccagcaggcaacacacgggttcttcttgcgattgcatcataagaggaaatctgtatattcatcccagatttctaaaagagctatgaagttccagctcacaactcatccctttcaaggcaggtgccgggtgtgacaacagggttatgaccctccctctcatcagaacaggtagggccagaagagttaaatccctgccccatataatttataaacatgaggctgtgtaaacctttgatgactaaattgcactctaaaataataataatagaagacaccctttaaagaagaattaaatactggtgactttatttcagcaaactcatattacaagttttgtggtatggaagttaattattgatgtccttggagttttaaaatacttttttttccagcacaaactgcagcagttggcagatgatgtaatggcagtagccagagctagggaggaagggtggggtggggtgggatgactgcccagctgtgggggagactgtatgagtatctgcagtgcaggactccacacatagctgggcacaggtcagggcacatggagtatctgggcacctgctccttttcctgggttttctgtatatggttgccaataggattcaagaaaaggtgttcttttaatttgttttaaattggtgtagagtcccccactgttgcccagtctggtctggaacttatagcacaatcaggtcttgaactcaccacagctcataggtgctgggactgtaggtgccaatcaccaggcccagtaaaaaaaaatgattttttaaaaattgagtacaggaagttgaattgaatacaggggccttacctgtgcaaggtgagcactctgtcactgagctaaagccctgggttaaaagctaggcagaggaaagggtgactttcggggctcaggttgtaaaatcccaactgtgaggacttgaactcccgaaatggaccatggtctcttttgggtatctgctgccatcttgtaaaggccaccctgactttagtgtcactgtttttgtttcctgtgtggttttgctgtgtttccaggctggccttgaacttctgggaccatgcgttcctcccacttgaagcttcttgaagcttttgatcaccaggaatgacatgcaggtcccaccatgcctatcaagcttggcgttgacgtcagacttacgctgaggttaaatacgtgcattgtcaaaagttgggcatgatggtacatgcctggaatccggtattcgtaggccgaagcagaagcacctaggatttgaggccagcccaggctacagagtgaaaccttgtcttaggagggagaaaagaaaaagtagaaggaagatggctttaacactagattttcaaatgttaactttgctggttcgtagcttggcaaatgaactcactttgcccgttttctcttccataaaatggggatgttaatagtagccacttcttagagtaatgaggatctaattagatcatctaaagaagtgaggcttgacactcaggacttaataggttttaatatcaccagttttctccaggcacaataaactggagatagatggggaccatcactttatcccctgtagcgtttccagccactcacttaggacctgcctgatacatgctgtgccctgagtatttctgaaggatgtacactttccctgtggaaaggagtcttaacaggaagctgttctttctgctctcagctctagactcattagctgcccctcttcaaggtgagtctgctcagactcttacaacctcacctctcttcccattgaaacctgggtttccttcaggttcttccttaccttgtcccaggcatgcatgtgttcacggaggttggcaaacttgattcctaaattgctccttttcctgtcctggctaccttgatttagcctttagtcaaggctgtcatcttcagactggcctccttttctttttgaggcaggggtgttatatatcccaggttggtctcctgggactttctaaggtagcagaggtagaaaaaggtgaccttgaacttcacacctgtcctgctcacacttggattacaggggtacaccaatagactgctttatgcttattttgatattcgaacccagggcttcatgtgcactagtcaagcactctacccactgagctacatcccaagctctgccagcagacagatctctttgcctagagaagcaagacctaactgcttacccctggctagaccaaacgcttcctattctagccctagataaactttccagagctctctttagagaccagtctaagatccttaaactctcaactctcaaacccatgaatctgtgatgtctttttctgtctgaaatatcctctctgctgggctgtaatcatgatcaaagccccaaattgttgttcttctttttttttaactgatctatttattttttcttatctaatctctctccctctccctctctctcgctctctctctcgctctctgtctctctgtctctctctctctgtctctctgtctctctctctcgctctctctctcgctctctgtctctctgtctctctgtctctgtctctctgtctctctctctctctcgctctctgtctctctctctgtctctctctcgctctctgtctctgtctctctctctgtctctctctctctcgctctctcactctgtctctctgtctctctctctctgtctctctgtctctctctctctctcgctctctctctcgctctctgtctctctgtctctctctgtctctgtctctctctctctctcgctctgtctctctctgtctctctctctcttgctctctgtctctgtctctctctctctctctctctctctctctctctctgtctctctctctcgctctctgtcactctctgtctctctctctctcggtcaggggatcactttctagtgttggttctttccttctactgtttagagctcagggattgaactcaggtaagggtacctgtcttggtggcaacttccttgtcctctgagccatcactggcctccagttcttttacttatatatttttctcaagtccagtgttggcaggatgagacttaatttttcatcctttttattcctctttttttttccattttttattaggtatttagctctttttattcctcttacccattcattttctttcctttgtaaagttctctgaacaagacaaaaaacaaacaaacaaaccaaaatcgcttgactcttctcagagcagctggacaaagtgggtgaagagcccatgcccagccattgtactaaagcaaacttgaaaacacaaacaaaaataaccaaaacccaaaccaaaaccaaatggagagcgactctcttctgcagccaaattcattgcctttcaaaacccagaactttgggtattgaagtttttagagcagaaaatgaatcacagacatttaagaatcaattctcagaaatttaattaaaatctttttcgtgaattcttaggtttgatcactttagttgcagtcttagtggtcgaggcgcatgtgcattgcgaattagtgtgcgccatctgtctgtctttgtctgtctgtctttctctgtctctctgtctctgtctctgtctctgtctctgtctctgtctctgtctctctctctctctctctctctctctcacacacacacacacacacacacacatacacacatacacacacaccccaaacccaaaccaaaaaaaccaaaaccaaaagatcaggcccaacacaccctttaagctatttattgagaaaaatctaaaattaatgagagtaccaagtatttttaaaacttttgatgttttgttgtgctgttttgttttgttcttgatacaggttcttctttctctggagcccaggctaccctcaaactcatggcagtcctcctgcctcagcctggatatcagtgctgagatcacaggctgagctactatgtcctatttaggagttttgttttgttttggtttggtttgtttttgtttttttttttttgttttttttttgagacagggtttctctgtgtagccctggctgtcctggaactcactttgtaggccatgctggcctcaaactcagaaatccgcctgcctctgcctcccaagtgctgggattaaaggtgtgcgccaccaccgcctgtttttttttttgttgttgttgttgttttgttttgtttttttttttttttccttattctggtcttttgagatagggtctcactatgaagccctggaactcagtaggtagaccaggctggccccaaacttatcacaatcctgcctctccagtgctgataccgtagttcccccatactgtgcttatctttttattcttagtgacaacatagaagagtaacttaagagtagtatattgcagtaacaattctcttaagaaattatgggctattgtaaaccatcattaatggcataattttttcttaagcataagagaagaatcttactggatactatagtcatctgaaacacttaaaagttaatgagctgaacaggtgtaatgatacaagcccctaatcccaacactcgggaggtggaggctggaagatcaggagttcaaagctagcctaagtgacaggagaccgtttaaaagaaaatccactaagggaaaaaatgagttggatctccctctttctcctccccaacccccatgtgtgtttgggggcctaagaggattaaaaagaaagtcgtaattttcttcttgccctggtccaccaagtttttctgcttctgggaatagggaaaactgacctccgaaggagaacctcctgtcccagatgctaccgtttgcaggtgagagctttggtaccaggattatctgctgggatcgctcatctttcaggggaaaacagattcctgctgtccatcttgtgggagctttgtttgtttgttgttgttttttttcttttgccttgggccaagtgtaggatttagaaatgagttgaaaacaagtgcttcacaccctgagaaacgcaaacaaaaaccaagcctttctgtgtttaattttcttctcagtttgtggggcagaggataggttatttttgccaatatgactttatgtccttttgagccagggatctttttttttttttcaaatttaacaatgcatttgattactgattgttcttttccttcacattgtgttcgttgatcaattgtagtgtcctgcctggtggggagagagctggaaagatgacaagagcgaatgttcagaaaggaaggaaaagccaagagaactttcaagcagagcttttgcacgtctcgtagtgtatttgatgcataggagtcaataactcaaatctagatgctttcatatacatatatggaaaggccacaatcatccctgaagtgaaagcccctggcattgttccggatcttgagaaattcccaacatcatggtagatattcaaggagggcagtccattcggactgagttcagtctgtggagtcagttgctgatgcagttttttttttttttcctggttgctaaatttaaccgacagagttctcggcgccaagcgttgtgggaaacattggcatattgaattcagtgttcagatgtttcattcaacaagctcaagacaaaacagcatctttggtttttccaagcgcagattatcattatcggagttcgattctttgagccgttttgctgtatctcatttaaggaggtggggggtagaggggctttgccagaattcattggactatggaagatggaagaatggtaggaagtggaagcgtgccaagactgctgggggaaagtcatgaatgatgccacccaagtaattagcctgaggtcccgatgacctttagcacatcgttcatatggtcgcagtgcatctgactgtgagaagggcttgaatatatgtgcttcatagactacggtgaacattaattgaaactgtaggcatgaaaggtgccaatcaatattacttttgtccctcaatcagtgagactctacatagttaattacttcttcattatacaatgctgggccatggtgaattgtcttggttcaaagattgggatgcactgtctcccagttattgtcctccagtaagcatcactgcatttgggttactcaggcatttatggcagtaagttctgacttctttccaactctgaaagcacagaaactgtactaaagttagaattgaactggagtccccccactgtcctagcctgcacccacagaatcagaggcctgttgaatcaaaggctattgctctttgcttgtggaactggaatgagaaaacaggcatcttgattgctgtccgagctcaggcattggacagcagtgatgacagaagcctgtgttgagtgcttctgtgagcccccttccctcctgtgtcagtacacaccgggcaaacaagccttcaccaagggctttctcagagtccaaatctgcccagagacttgttacttgttacatcagacccacaacaaccaaatttgctgaagaagtgaggaaactggaaatgaagtgaaatcagtcatttccagcccaccctgagacaaatccagcactggaaggctcacacacccctcatagtgcagataaggaactggggcagggagagtctcgatgatctaactagtcttccttccacagcgaagggagagatttcctgagagcactgaagacattctgatgaccctttctcccctcatagcctagttctgtcatatgaatcagcataagcaacatgtcaccaccgtgtcccattggctcgggatcttggctcctcaggagagggctgtgcagctgagcacagtcctttcctggctgagcccctgcttgggtatgcctgagctgtccagcatggccagtgtgtaaatgtcaagtaaacatcaaattcaagtgcaatctaaccattgtcctagaactgtttgctttagatataatagttagcaggaagaggaggtgaggcagggagagaatgtatgtcattccataaagcaaaacatgaacatggggggccctccctctgccaacgtgttgaaaagaccaacgtcaaataaataaaaaagcctgcacttcatgctgcaaaaccaagtgtgttctttagcttgtaaaaaaaaaaattagatgagggaacattttccagtcaatcacactgcagcaagtcatcctgttgaatttgtgactcacaggctctctgtgtcaatagacagatgagcgagcccagcgctatgacttcactgggggatgaagcagaagttgggggatgaggcagggccagctttacatgggctctgagctctgacaataaatagccaaggaaacactgaacactggataatcacatccactgttcttgtttatttcttgcttgtctcctaggaaataactaatttaaatttgacttcatccttttctgtcttaagttcaaaggctgatgtccttacctgggctacaactgatggagtatctctttttttcctatcctcacagcaatactaggaaatagagatatttgaattattgttattattaataattattattacatcttttgagacagggtcttaggtagcctagactagatacataaaaaattcaatctatagcctagggtgaccttaaactactacctcctgagcgctggaactgtataggtgtgcacctctcattatgaagtgtgctcatttatgtgtactaggaatagaactcagggctttgtacatgctgggcaagtattctaccaactgagctacaactcaaagccttcattttatctttttttgtagtgctaagatacgaccctagagccttatctctgctaggcttgtgagtgccctagtactgagtgacacttcccagccctttgaaagcatctatctaattttaactcacccatttctggcttcaatatctacttctgtgttatatctttttccttttgtattttaatacagaaaataaaacccagattggtcttaaactcttaattccactttgcgagtgctgggatcataggtgtgtgccaccaagcctagctttctgggtctctcattttgctgatctactgtgtgccagtcactggctgaggtattggcatgtcccaaataagtaaggcatacttcctgtctctgaggtgcttcaggaccagctaaaaagctcttggaatttcagatagctgtgccatgattgcattagattgcagggaagtcagtacagatgaaagaaaaaaaaatagtactaagagactagccacttatttgcagatgtctcaggaatgcctgtggggatagaaaaaccacagagagataatagactgtggaccagcgtacagggggcagaaaccactgacttgaagacaaagcttcagccggtcagctgttggatgtcctgggcagcagggagaagcttaatgtttgtttctgtctcaccacagagctggtgtgtgcagggcaggggctggctgctgagggggaaggccaaggttctagtctggacttggctgttgcacatgtaagcttgggttagccctccaatcagttggcatgatgaatcctccctctgtgccatgggagggaaactgagcaagtctaaggtccaatcaacatgggtatgaatggacagatgagtccttgaccattggtcttgctgaccccagccaaggtattcccaaggttagaaacccgtggacttcaagcatgtgccacgctctaggtgttttgagacaggcaggtctcaaactctcttctaaggatgaccttaatctttgatcctttttcctttaccccttgagtgctgtgattatagacattacatttagaaccatgcctggttatgggatgccagggatagagcccaggcctttgtgtatgtgcagcagacactatcagctgagctagacccccagcctgcctgaatcctttttgcaactgtgctgaagaccgagtcagaaagtatccttgagatagacatggtggcttgacctgtagtcccagcacataggaggcttgaggcaggaagaccagcggaagtttgaggctagcctgcagtagagtgagacctccatttagaagcaagacagtaaaacaagaccaaacaaaatctttgtgtgatccttttaaaaacccagttgtctgcctagacaaatacagcgctgagtggctttgccttcattttagtttaacactgctcaattctttgtcctttccgtggtctctgtgttctccatgttctgagacgtggttagcatatgtaacgggtttccttgccttctctgttctctctcactttttttctctgcttggggagtttcttgaaaggacatggccaactctttcctggggtatagttttaaaatttttattttggctatgtgttgcttgtcaaacctttaccaggtcctgaaagcaagggtgctccatttaccatcccgaattcccctgattgttggcaaaccttacatttccattatagttggcccgaaaaaacaaacaggagagttaacagcagtctttgtgccaagcatccaccccctcaatgaactatacagcagtctaagagctaagagactgactgcacatgtggaataaaacaaatctactccttcatttatgaagttggtttagggaacacgatccatgtgtgtgggccagagctagacactgagaaggaatatcagcataaatgaagatgcactcctagcccacagggagctggaattacctaatcaaataatcacaaacatgcaaacaaacgaataaaataactgctaggaccaaagatgcagcagcgttcagcagcattctat

SEQ ID NO: 77 - DNA, 30328 bp, Homo sapiens
tgatttggatggcagaatgaagagaagataagggagattattaattgctttcatgtctttgatttgtttcgctggtcatagtggaaacctattgcttttgaaattctaagagtcatttaagataagatgatagaaaaaagaaaagaaagaagaaaagtaaacagcagagaagggaagggagcgggagggaaggaagaaagaaaaaaaacccttcactgtctcgccgcagctttccaagtcccggctccccgctccacctgtccttctccccgactgcttgtgccccgactccccacatctgtattagcacccaaatacacagaccaggtcatttcaattctcacgctttcttacatcctgccccctttgccagaaaccacctcctctttctcaacctgccaaattctttcaaagttcaccccaaatgccacctcctccaaacagccttttcctgcctccaagggtccgtcagtccccctctgcgctcctatatgccctgtaccctctggtaccacattccactgtacctgctacaggggctgcactttcaaacgcctggctggtggcgactagagtctgcaggttccacctagagaaactgccctggacggcccagggccaccctcctttggactgatgcagagaagccaggattccagatttctttctttctttctttctttttttttttttttttgagacgaagcctcgctctgtcactcaggctagagtgcagtggtgcaatctcggctcactgcaacctccaccccctgggtttaagcgattctcctgcctcagcctccagagtagctgggattacaggtgcacaccaccacacctggctaatttttttatttttagtagagacagagtttcaccatgttggtcaggctggtctcgaactcctgaccttgtgattcgcccgcctcggcctcccaaagtgttggaattacaggcgtgagccactgcgcccagcccccaggattccagatttctatgggaagccccctgatttttaactgttggcaacttattgaagtgttcaataaactgtcttcaggccaacacagtgagagtgaaagaaagaaattctgtgagatatgtctggcttcatcagtattgggtaactgggtatttggtagatctgtgttcccactggagtgggagactgttgaaggcaagaacctgtctgggtagtctttgcattccagatttagcacaacccagcacacacatacttaaggaagaagggaagaaacacgggaaacagccagaaggatgaaagaaagggataaaagggcacaccaggcaatgcgtttaatcatttacgaaaaggacaagtgaaaacctttttccatcttgtttgcaacttacagattgtttttgttctcttgtttgtttgttttagagacagagtctcactctctcacctaggccgtagtgcagtggcactatctaggctcactgcagccttcgcctccggggttcaagcaattttcgtgcctcagcctctcgagtcactgggactacgggcgcacaccaccacgcccggctagtttttgtattttttgtaaagatgggttttcgccatgttgcccaggctggtcttgaactcctggcctcaagtgatccacccacctcggcttcccaaagtgctgggattacaggtatgaaccactgcaaccagcctttgttcaaaattgagtggggggggtgtttttgtttttgttttagagacaaggtctcactctgttgcccaggctggagggcagtggtgcaatgatagctcactgtagcttcaaactcctgggctcaagtgatcctttcacctcagccccaaagtcctgggatcgcaggcgcttgccaccgtgcctgtctaattgttttattttttgtagagaagaggtctcactgtgttgatcaggctggtctcaatgaagtcctggcctcatgtggtactgccgccttggcctcccaaagtgctgggattacaggcgggagccaccgtacctggcctgcaacttgggtgtatcttaattttgaccacacggtatagatgttctatggatactgtaaaaatgcctgctagggaaatggcagtttccatatccaggcactaaagatgaaccagtgaaacaaaggatacagtgatgtttaaacagaactaggatttcaaagaattcttcccctcttttgcaattactactcagctagtagataaccaggttcagagtaaataagtttgtgttttgaccaaattcacctattcactgtttactaatgatactaacaactccaaacatccaggaaaatgtggaggcctctattatctctgtcttcataataataatgtggtcctctattatctccacagtaaattcttcctgcaaacctgggaggtcagaatgatcacaaccctcatagtacagataagggatccaagattcagagagggaaagtaacttgcccaaggccacccagctggaaggaggtggggcaggattccatccagattttgtgctgttggaaatgcagtgttctctcctgtaaatcagtgttaaccccaatttcaggcatccacctacacaattgttcctaagaacaatcatgattgttggctttatcccagtaccaacagtgctattatttaattaatgtttaacttaagttctcattttaacactaaaaaataatttgtaaagtgaaatttatgtcacagtattacttatcaaccttagctgggttaactctgaaaatgagtagagtgaaagcaacactgtgttattttccggcttgatgctgtggtctcctgaaggctgaaacctggtgctttgtccccagggacactggtgatcattatcgtggtgttcaagttgtactaagacagtctcctggccgggcgcggtggctcatgcctgtaatcccaacactttgggaggccgaggtggatggatcacctgaggtcaggagttcgtgaccagcctggctagcacagtgaaaccccgtctctactaaaaatacaaattattagccaggcgtggtggcaggtgcctgtaatcccagctacttgggaagcagaggcaggagaatcacttgatcctgggaggtggaggttgcagtgagccaacatcacgccattgcactccagcctaggcaacaagagtgaaactccatctcaaaacaaaacaaaacaaaacaccaaacacagtctcctgagtaaagtggaaggattaacagacatcattgaaaatgaaatcacttcgttgtcatgtacttagatgttacttcataccctgtccagagactctccaaaatcatttctctgggtaaagctggtgccaccacttgggcacagctttcttgtgctgcccgaaaggccctgagggtttttagcaatgtaattttcataagcctctttgcaactgtccacaccaacagcgttagcattaattgtgtcattagcaatgatccatctggtttcctcccagtcttcccatctgctgagtcaaaaacttccctcctttcttgaatgggagacctgcaacagggaacagaagaaattgtgttccttgcattttatatgcatgatcccatgtaattctcctcaacccctgaaatagggattagtggcccccattttctgatgtggagaatgaagtcctactcagagaagtgggaggacttgtcccaagacaagctggacacaggataaaatttggtttccaacctacccagcctgactcctgtgatccttccatctgactggaaacctcagtcagcctggtggtagacaggaacaagaagccgaatttttcattcactcctttttatcatagaacaactatagaaccagagcagacttggaatgcaactaaaccccctccttttgctagtgagggggatgaggaacccagagagcaggaagatcttttcaaagtcacccagcaagagagtgacaggtagagatcagaactcttccttcctggtagtgggggtgggtgggagtgggcagggggtgtgtctaggtcttttcccttcactttcccaccttccctacaaagacttgcaaattcactggcaaaagtcataagctgtggaaaggtggcaaagagaaaaagtcccagttttatcaagctataatacataaggggtattcaatttatagatagtattatcgtgatgaggaaggcttaactatatttaaagtttgtggatctcataaaattgtgaagatattacaatgccttttgcaaaaaattccacccatagctctaatttctttttcctatttaaacagtggtgactattctctcttagggttggagggtaggtagaggataagggaatgacatcttaacaatacacaattaaaaaaagaaattatacatgtcttgatttttcatgtctgagaatcaaacctttcaataaatgaaaataatgataccatctaccaagaggcttgtgagaagtaaatgaattggtgcctgttgtgtgcctagaacagtgcatgacacatagtaagtgctcaaaaagcatcaaccgctattattagggggatgagcaacttaaaactatcagtttaatattttcctaaatacatatgggtctctttttttccattgtagaaacacaccttcatgtagaaagatcaagatattactaaagcaaattggcaaagataacagtgtgatgtcgagtttctctggttgattttattttattattattattattattattattattattttgagatggagtttcactcttgttgccaggctggagtgcaatggtgcgatctcggttaactgcaacctccacctcccaggttcaagtgattctcctgcctcagcctcccaagtagctgggattacaggaatctgccagcacgcccagataccaaaataatttttggtatttttagtagagatgggctttcaccatgttggccaggctggtcttgaactcctaacctcaggttatccacccgcctcggtttcccaaagtgctgggattacaggcatgagccactgctcctggcctgtctctggctgattttagccaggaataagagaaattcaatctgagggatgatgaagagaaatcagttagtggtctggagtcagattcacctggggtcacatgctgactgaaacacttagatgctacaaaaccttgggcaagcacaacctccccaactcttcccatttgtgaaatgagtaactatagggaaatgtgacaattaattgcaagtctaacgactttctgggtctggggtggaatgaacactcagttttcccagtggacaggttaaaattctgcccctgccttgcaagaatccaatccagcattagttacaattctgagagcagccctcataattcacagttcattctggagtcaccggggaaggcaacctttcagtgagtcacccctgcagtctccaccaccacctggatttactcatttattcaacaaatatttattgagtccctcaccatgccaaaggctcttctgggcactggacacagtgctgtgaatgcatgacaaatcctgggggcccccacatcgggtcttcatggatccaggccccaaaaggcatggtttccacatcagtggggcactgtaaggctcagagcatttcctgggcaaacctaagcaatgtgatgcattctcctacctaactccctctgtgacctccagcaagtggcctctcctttcagacctacatttcacatttcacctccgcggtgaaatggggtgatagacaggaaggggtggaggcagaaagggaggagggagaggggattcacactcctagtaacaagtgaggttttggatgtgaaagcattgcaatgagtaaagctaaatgcacagttttctgattaccaaggcaggggctcttcctgccaatgatgaccagcagctccctccgaaggctggcacaagcctggggcccagctccaacaccccaactcctcgcccaaaaatgactaacaacacttagaataattgcttctaattgtctttatcctccaaataaaacaaaccctgcttattccccaccaggcaactgggagaagggggtggagcaactggaagagattatctgccttaattaaaaaatacaattatgcctattaagtaacccctcaaagttccttttcccatcttccctacgtgtagtctgctgcattttgaagctgaaacaacttggaggccaccaagtaagacagacttgagatttctgttgaattatttgggaatccataatccagggtaccctttgccataatctagagtggcagggccgagagcaatttatgtgtgtgtccgtgctagtgactgagcccatcctggactcaacagcccatctgtcaagtcggaagaaaatggaaatagtagatacttcattgctgtgagcaattccagatgcctctcctctcacatttacagcaacctctgctgcaggcaaaatacataaattttagaatcagccaaatcctgatttgcatctttgccaggtattttctagctgtgaaaaaaccttatcaagccttaagcttcagttctttcttccttcaggaggaatagggcccgtacatcacagggttgcttgaggaataagtgggagagagctgacggttattgaacctcgattaaaacctcacctctgctcagccctgtatgggtggttattctggttttacagatgggtaaactgaaaggggtgggggacggcagagatttgtgaatggcagggcaagatcccctaggtgttctcctggatgaccgggctggttccctagggctgcagccaccagcttcctggaaccacctcttccagggagtcctttgggtctttctctgcagacaaatcagcctcggccctgctcgtggcaactttcctccaatcaggcaggggttgagaagagaccagagagctgtacccagggattgggagacaggagatactccctgctgtttgtctaaacctaaagtttcttcttcccttaatctccacctctcactagatagatctgccaatctgcttccttcccaaaaggtaggtagttattcccattttacagaagaaaaaaaaatgaggctccagaaagttgcatgcctcaaatcattcaatgagttccatgcctcgaatcatccaatattagatcattcgatttcaaatgtgcacgatgcccaggaagatctattggaaagggaggtaaaaagtaacatcgataatgacttaagaaatgagaataatatcccacatttactaaatgctaggcactctctcatgttacagctgctgaatctgcagtgcagaaaagtgaagtgatttatctagtctcacaggaaatacatggttcaaccttacttgaagccagttcagctctagatcttgaagccagtttagctctaggagatccgaagcagagctgtctcctgggtcagtgcctgcttccagcacactcagcgctactcggtattttgtaaggcttgtcacctagttctcaccagcaaccctgtggatgggcattagcatgcctattttctgaaaggggaaaccaagacccagcaaggtgacggcggaaaacggtgagaagtagggcctggatttgaatatagaactacagaaggccgacccacagctcctcccctcacacctgctgcctccagaactagatgtccccatgaactcgccatcccctctccaggctgtgggacctgcaaggagatgcagcttcttttacctctacctcccccgcccccatccttgtgatggtcttcttccagggacaccgtgttgaattaggttttaccacagctgaagtcaggccaacctctcccctctctgcgcctggacgacttcatctgtggaatggggagaaagctcaggctttagggggccttcagtaatctgcatcgtgcttttggcaaaagctccttctctccagccccggctcaaacccgggctcggtcctgactccggaccttagggggcgggaacaggagaacaggaaagaacaagcttgggcttgcagagcttcgcaagcaagacgtttgtacccccaaaacctccagctgtgaccctgaatatctatctacccgacttcctgggctgtgtaactcggaaagtgatctctctagacaccagaggaccgaaccttccccattctcactctgcaacaagccagtaagaaaaatgagctcagagacgagtagccttttgcccgaagtcacacagccaatgttttggggggtgggtgagcggtgttgtggaattcctggcggatgttggcgcccgcgggtctgcctgcttctgatacccgggctcggtagaataggccgctaacgagctcccattaggaggaattgtcactcctctgggagcgagcttgtcccattagggcgaattgtcattcctcctggagcgaggttgtcccggctccgcgcaggctgagtgctggggccgagagcaattaacgcggctccggcgcgggcagccgcctctgccccgggcagcgggggcggggcagggcgggggcggggcgcccggcgcggctggagccggtcacccggcgcagccccttcccccggagcccgcctttcatctccccgcgcctggcgcctgcccgaagcccaggcccgtctacagcccccttcgctgcccctcccccgcccccttctagccgctggggttacaaactagccttcggccctcggggttacaaacgctgcgttctgcgcgcagtgctccacagtttgcaaggagtgttttctccttgggactcgcagcgcgcgtacgcggttgcttcaagaaggggcctggcgggtgtaacgcgccccggggagcgcgggaaggtgcagggttgaggatctacgctcagaggcctcagccgcgcgggagggattcctgtgtctcccacttctacctgcgcgaccttgggcagagtattagcgcttcccagccttaggcattcatctgtgaaatgggaaaaataatctgctagcagcggtgtgttggaagaaaccaataagatcctggataggtccaggcactaaagcatccttcagagttgatgcttcctggtggctgagttcctattggaaccccgcttttttgctagcaaatattgcagctacgcatacatccctgggaactaacatttactgagtgccttctacgtgacaaagccagttctccgctagatcactgtccccaaacctggacacttctcagaccgagccaaattctcagccccggaaattttacaaagaacctaccgtaagctctgggatgcaccttatctttcgatccttggcagggagaaagcattcgatacattgtgattgcttttgatatacaataatgttttaacctggacctcctatgccttctagttactttaggtagcctattgaatttaatcaccaccagagtcatctcaggtaaggattattatctctcattttggagataaaaaaaaaaacgctggctggaggaagcaatttagagtgcccaaggtcactccgccaggaaaaggtgaataaaacgttctgaaaacgcagccaaagttggataaaatgcagacttggggctttccataaagggctagcgttgtgttgcggttccagccctttcccagcagaagtgagcccctttcccgatttgtctccacctcagcagagagctggggagggaactggcaaagaccccaggagcaggctggttcctctctcagcatctttcctattcatggtcagagcttggcactctgattttgaacaccggtaatttttttatctctgttttcctattcctggctttgtaatttatttgtctctgcctggacttcagtattccagagtagtaaaggggacctggcttttcctttcccagagaagttcattaaaataaaggagttccagtggtattgatttttgtttcgaatttctcaggaatgagcctgtgtgccttatagctgacagatattaacaaggagttttcaggaataattataaaacattggctgcgtttagcctaactgaaagttgaacccttttgtacactttggcagctgagggctaaacgaatttcagatttgcttccaaaatatatagcctgcaccttgccttgtacatctagaaggtacagaagttaatctggatttacctgtactgtatttgagatgcatatcaaatcaactatcaccaggtatgactcaaggggaaaacgcatacatctccaggtagttttcatagtttttttttttttaacttttttgagcctccagttggttaagaagaaatgtgcatattctttatagtgagagagaaactcagaagttttagaagactgtgtttaggacttacttactcttttactttttcaggaccatctttaatcaaactgaattaactggcctgtgcagactgtctttatcctctaagattcaggtaatacttttttccagttctctccggccagcacagtttcacttcagggaaaggtttggggtgaagcaaacagtgcctcagagaggtacattgggaagggtacataagggtctgtaggtctaggggtcaagtttctaatactcctgaactgggaggtagcctccaagccttggtcatttaaataattaaaaacaatgtctctcccttccaatgctctagggaatgtttagcaagcatctgctgtaggcgaggtcctgaactgggtgacttcctatttacctcgtcagtcgcaggataatcgttcagatataggaaaagacagccgcagcctgaaaaaagtcttttgaagctaaccttctaggtcaggcattttgaggaccagcggagagatccgaggcctctaatcctcgaagctcgctctccccttccccaggctgagacagtcatcactgaggctttggaaaggaattaccgagggtataatttggggtggggtggagacatctatgtttttataaaaaaccaggtgccatgaataaaaatgtgcttcccaaaatgatatgtaggcctggggtgtgcaaacttggaagccggtatttctgagacttgcaaacgagagggaggcactagatattggcgacttttcctcctcccccccacccccattaccctccgaggcaaacactggcattcaaacacgcacgacaaacacaggctcaaacaaactcatgaatgcacacttgcactgtcttgagaaaaaggtcggatccggatcgcgctcagaaaggaggttcaggagacaagtacagagatttcaactttctaaaagtgcgctggatttgctttctagtgagagagatggggacaactgatttaaattcttcactccgaaccatttgggagagaggcactcctgaccacttctcgggctccttccggcccctcttttccaggggaaagagttgtaataataacagtgggcgcttttgagcgctggctagtggcgagttactcttctaagtgcatacatttctttcacagggatactggcctgtgagtttcagcaccgactttctggaactgtaaagtaagccaattttgacgcatagtaggggcttcgtaaatgtttctgcaatgctgtttgcgaatcttgaacttattctggcggtagagggagagtgggatgggcgcagggtcccttttaaagaagggtcaaaagagagaagaaatgggactcggcgaacttccgctttaaataatcgctcttaattaggtctcgggcttttcagtttcggcgtgattataacccttcagggatcgcctaataacaactctgctgactgctcctgtaattaactcctaatttatttcaaacaggaaaaaaaaaaaaaaaaaaaaaaaggagggggggcagccccttcgggaagagccaatcaggggcgagcgtctctggcgtcagcgccaggcccggcgcggattggcggcgcgcgtctcccacttcccctcggaggaaaggctcagctcccagcgcgcccctcccgtctccgcagcaaaaaagtttgagtcgccgctgccgggttgccagcggagtcgcgcgtcgggagctacgtagggcagagaagtcatggcttctccgtccaaaggcaatgacttgttttcgcccgacgaggagggcccagcagtggtggccggaccaggcccggggcctgggggcgccgagggggccgcggaggagcgccgcgtcaaggtctccagcctgcccttcagcgtggaggcgctcatgtccgacaagaagccgcccaaggaggcgtccccgctgccggccgaaagcgcctcggccggggccaccctgcggccactgctgctgtcggggcacggcgctcgggaagcgcacagccccgggccgctggtgaagcccttcgagaccgcctcggtcaagtcggaaaattcagaagatggagcggcgtggatgcaggaacccggccgatattcgccgccgccaagtgagtgcgcgccggggcaggagtaggaggtagcgcggggtactggagggagcggggggcgggtgttccagggctgagggtaccgagacccttctgcgtgcgctacactcccgggaaagcaagcccagggcctctggactcctgggtgcccggggcgttcggcgcgcccagtgcgccgtccgcatccaagacaccctctgggtaataaccgcgctgtgtgtgtctgagactccctcgacatacagattgttttttcaagagcgaaccccagctgggtttacggggtcgctcggtggtccgtttctacagccctcggccctgcgctctggccacttggcttgtttttgtttcactgttccccggagtctctgcctggggagtgaaggagttggatccatgttcagtgagcacttggatgtaccaggaacgagacaggttcaaaactcaaccctgagagttgtgcccccattttaaagatgagctaactgggcttagccagacattgaggagaaaccattttctttcgtgagtcccgcgggtgtcgaagccggatcccacgaagggatggtggcaccagggatggtggcatcagagtctggtgcggggaggaaatgtctctctgtggtctccgcagccagcacctccccggcaaggttctgagcttcgccgggagcgggctggggccagaagcgcacgggctcttcttggctcacagtaataattaaccgcattccagcagggcttgagagtttgcagagtgatgttcactagctcaccagatcgagatcctcactagaacccccaagtgtagacactggacttgtgactaccctatttttcagacgtggacgctgaggcttttaaagaagacggcctttgcttgtcccaggttaccaacaaccactgattggccaggggcacctgttgcccacgccctgctcctctgtttgatatgccctgaccacttttgcgtcctctccccagagagactaggtagagatccgcacctgcaccccacttgagaattgaggctgcagagaattctccgcttcagcatccatttttggtccctgagtccttttacaatttggagacgtcatcctttacagcctcttttacttttatctcttggcttttatggtttctctaccccctaatttcccaccacgccatcccctacctgtaggaaaggtgagggtgggggctgtggagggactttctccaaagctgagagagatcctttcactatttacatcattcagccctcaagactagacgcactgtattttgttaacaaaacaaggccatatacccaggcgtcagtggctgtcccctctggcagtctctctccaccctgttagaaactctgaaagattcaaagggcgaggagattaagggactcaaagaatttaaactcaagtttggatagtgctttatagcacttttcaccgtattatcttatctcctctgtagggcagcagccggcctcttaacagatgaggacatttcagcaaagttcagagaggaatcggcagtttgggcctgaccaaaaaaaaaaaaaaaaaaaagctggggaccatttaatgatcacctaccaggtggcagacagacagggctctgggtactcttaaaattttagtactgtggaccacattgagggattagtgttacttacccactttatcgacagtgaggtagaggctcagaaaattaaaagacttaatttgtttaacaaatattgagtacatagcctacgcctatgcccagccaatgatacaggccttaaatggagtagtgtccagaggttaggaatcctgccatcctttaggcctgtgggtctggaaaggcaatgactactacccctctaaacatctctgccctgtgctcaagcttccctgctctgggtaaggcaacctcgggcccaggctgtgaccttcccatgaaaagaaccagaaattctgagaaccgagtttataacctgcacattctgcacatgtatcccggaacttaaagtaaaaaaaaacaaaaaaacaaaaaaaaaacaccatgaagaattgttggtgctttgggcctggaggtggcagcgggaaccctgtggtcagagtagtgggtcctgagaatgccaggcgacggagcctggggcgagagggagctacccgcccgggcctgattttgttatttggaggaagtaggataaacgctgttttgccttatataatcgcatccttcctctggctggtttaaaattaggtgggggtggagggatggggagtgttgcattgggaggaagcctcatagcttcatggttttgatacacatgtgcgatcccggtcacctggatttcataattcaaatgtaacccgaaggaccagctggaattaccctgcccaggcgcacagtgcttcaaaaccccacgtagagccaggagcaagagtatatacacgctaggaacttggtatctgagctgagacacctgagtcctcctgagggcccggcctagtttagaaagggcgagaattttgcaggtctcttgagagtctctgacagtgttgttaatttgtaaattaagaagctggctccccggctgtctagtaacttagggattagcaaatgcaaaagtatagacttttatggtagtttcttatccttccctttcccagatttctgttctttggttggttacaaagcctcttatctctttttgattcagtaaagtgatgggtaataatgcgacactggaacaaatccatctcttgttggaaatggaagctgggttgggacttgtgctgtgtcaccctcaagtatgaagtgtaaactctttcttgggccaccaaagtaactaaacaagaaatgcaacattctcccatgaatacattagagttaatactgtggccacatttggaaaattagcatagctcgtaaaagccaaatgcagaaaattaattgttaagtattctatcaccacagctctatcctcctccgcccacccacccttgaggaagacaagcccaaagttagttgatgctatggaatcacaaggatgtcccagtccgtgatttgctgtaattgaatccattttaaatgtggagtctggatgctgttggcatacctttattttgcttgtttttccccctgacaaacaaatcatttacacatttgcccgaagccatagaatgggtagaggggatgactaagatgtcatcacgtgctctcaatttggaggcagcatgatttcccctgacatttacatttatgggctagctaatttttcccttcgtcttagtaaagtttatattacagaagcgcccagccaagaaccttatcccacatccagatctgtaaaatgatgttcagattttataatctgtggactggatgcaatgacagcttgtgactgtttattgcgtgggactgcccccaaattcaaagatgctattaatttaccacagaccttatctgcacgattatccttcataaatatgctgacgcaatccactttttctggttcagagaggagaccaagggaaacagctaacccggttgctaaaacctttttcattttccttcccatatgtgattgtctccatgtccaagggaggctgggctaatcatgaacctggtctcccatttttaaagagaagataaattatgctcagaagagatagcggttcatttctcaccgaccacttgattcccttgtcttacattaaatgttctatttctgttatctctaatgctgtttgttttccatatagaaggttcagttacaccattacatttccaaaacttttcttaaaaaactcatttttaaaaaacgaagcaacttacccatttatatatggtccccctccccccaagaaacacacatagttttgacaaaggtacctttttcaaagatgaaacaaagtatgtctttccatacatagatatgtgtgtgtgtgtgtgtgtgtgtgtgtgtatatgtatgtatatatagatttttttaaagctaagtgctttcagttgagaggggaggcccgaaaggaaaaaacctagagagatgacgggggagatgggttttttttagtattattttaatgtaactttcttttgctaatccgctcctctctctgttctctaggacatatgagccctaccacctgcaccctgaggaaacacaagaccaatcggaagccgcgcacgccctttaccacatcccagctcctcgccctggagcgcaagttccgtcagaaacagtacctctccattgcagagcgtgcagagttctccagctctctgaacctcacagagacccaggtcaaaatctggttccagaaccgaagggccaaggcgaaaagactgcaggaggcagaactggaaaagctgaaaatggctgcaaaacctatgctgccctccagcttcagtctccctttccccatcagctcgcccctgcaggcagcgtccatatatggagcatcctacccgttccatagacctgtgcttcccatcccgcctgtgggactctatgccacgccagtgggatatggcatgtaccacctgtcctaaggaagaccagatcaatagactccatgatggatgcttgtttcaaagggtttcctctccctctccacgaaggcagtaccagccagtactcctgctctgctaaccctgcgtgcaccaccctaagcggctaggctgacagggccacacgacatagctgaaatttgttctgtaggcggaggcaccaagccctgttttcttggtgtaatcttccagatgcccccttttcctttcacaaagattggctctgatggtttttatgtataaatatatatatataataaaatataatacatttttatacagcagacgtaaaaattcaaattattttaaaaggcaaaatttatatacatatgtgctttttttctatatctcaccttcccaaaagacactgtgtaagtccatttgttgtattttcttaaagagggagacaaattatttgcaaaatgtgctaaagtcaatgatttttacgggattattgacttctgcttatggaaaacaaagaaacagacacaatgcacacagaaaatattagatatggagagattattcaaagtgaaggggacacatcatatttctgcattttacttgcattaaaagaaacctctttatatactacagttgttcctatctctcccccgccccccaccgccccaccacacacatatttttaaagtttttccttttttaagaatatttttgtaagaccaatacctgggatgagaagaatcctgagactgcctggaggtgaggtagaaaattagaaatacttcctaattcttctcaaggctgttggtaactttatttcagataattggagagtaaaatgttaaaacctgttgagaggaattgatggtttctgagaaatactaggtacattcatcctcacagattgcaaaggtgatttgggtgggggtttagtaattttctgcttaaaaaatgagtatcttgtaaccattacctatatgctaaatattcttgaacaattagtagatccagaaagaaaaaaaaatatgctttctctgtgtgtgtacctgttgtatgtcctaaacttattagaaaattttatatacttttttacatgttggggggcagaaggtaaagccatgttttgacttggtgaaaatgggattgtcaaacagcccattaagttccctggtatttcaccttcctgtccatctgtcccctccctccggtatacctttatccctttgaaagggtgcttgtacaatttgatatattttattgaagagttatctcttattctgaattaaattaagcatttgttttattgcagtaaagtttgtccaaactcacaattattttaagaggtgttctctgttcttagctgggcttagctcgaaagtgctacccacatgagggggaagctggtcttttttaatattttaatgtaagtcaaccaagagttgtggccagattcagccatgttggggtgattggtggtggtggggagtgaactgaaactactgaaatactttgaaatgtttcctctggcagcttgttacttatggaaaagaggtggaattgctgcgaggagtttttcagaaaaagtacagtgaaagataagctttaaataagtggtgaggcggagatcggccagcatctaaatcatttgtacatgatcaagggaaaatcttgaacttgaaatctcccagctaccaacacatcaaacttaaaactgaggaaaagggtccttatagctgtttgcaagtggacatggtaacgaggcgcattcgctgggctgggggatggaagccggctcccctttcaggagtgtgtgaaatcgcattccgtttaccattcctatctccttccaaggagatggactccgagcaaacactcttcggtttgaagtgggaaggtggttcgttcaagtccctttgctacccagcctccctctcccagtggaaacaatacagaactgctgtcaggcttgggttttgaggcgtcacgataaaatggtgacaggtggaggacgctgagaaggatcttaaactcagctttctgttgcccaaataaatctgaagtggttcctgatgattgatacctttccgaggtcagtgttcagatgggaggctccggtgactcggaacagaggcagaaaggatgcgaggacttcttgctgcgtaaacagcgcggcgggcagattggcacctggcacctaccaggactggcgcttcgtcccgcgtttccattgtgcccgcacgcactttgaaagtgggcgccggaaactccgtttttcttatggggccggggtcgggcaacgtggttcagaggtttcacaagctccagcacagaagtgatccaaaccgaggggtcggctcgaagtcggaggctgattttgtcttgctcagtcgctccgccggagctgagccgctggaacgacccaaacctacctgaaagcgcgtctctgcagtcccgctggacttctccggctcgaactcctaatctcagcccggaatccagccatattcatttaaggattgcgttttccaaaggccaaagcctttcccggtttcgtcatcagccgccaggttgggtccctaattagcctgtccaccgagcttccttcccggcgccgcttggaccccgcagccccgggcgatctcagcccgggtggggaatccggagacgccggctccgggttaagactctgctcgtccccaggaggacggggtcgcgatccagagtgcgatccggagaaaagggctgcatcttgcgtggctggcgggttagactggaatccgtctggggaactgcgcaccatccccatcgctccagacgccgaaacaaaacctgaggctcggagaggggaaaaagagttgttcaggctcgaacatacgcatcccagcctcataggtggatggggttaccgagctgagaaccaagccggaggtccgcgaagccgggccgcccccttgctctgggcctcccttcaagcctgcagtctggggatgggttccgagtcaccgcggtccgggcctcggtcaggcttggtcgggcacacagggcgtttcagaggccagattgacaacctgtggcggcaaaaggactctccctcaccagggacccgcgaaggcgcgcattgcaagatgttagcgtgcgggctttagatatccttgcgtccgatgccagaagcctggcacgcaaatttacccacccttccatactttcagtgctttgttcgaaacttttcaagagacacagctctgctttttggaaagagaggaagagagcagggaaatcgcatttatggagcccctgcagagtgcagaactaggcttcccccccccccgccccccgccggtgttctcatttagttgccacacactccttggagaggtatcatagatgtcatgtatagttgaggaaactgaggcacaaagaggtggctcactaaggtcacagagctgataagtaggggcagggaaatccaggcctcagtgtgagcggaggaggtgggtatgaaagatggtgagggcaaatcaggcaggaggtgtctcagaaatgatgccagggcctggggaacactctggatccccagaccctgagatcccagatctgcagtctctctccagctccccttcctatccctcattgctcctctaacacagtggacctggggctcagatccagccctcccctctcccccttccagccctgcctgggcgatcttgcggggaatggagggagcagggcggcaggaggtaggcagtgaaggcctggctgagagcggtggctggcgaaacgtctgcctgacccgactgaaaagaggatccctgcctttgagcagaaccttgtctgaccgaatgaaaactcccacggccattctttgctataaaagccgctcatttgccacgggttggagaggccattcccccacccccactccgtctccactgttgggtttgaaataagcataaacctcatttataaaagaacccacgtcacacacaccctccccgaaatcacagggcctggttggtgaagttgactgtgtctgttcctctctctccttccatttttgtaagcaaaaatgttttccaccccgcattggtgatgctgcaggcttctttaacaaaataaagtggtcacagcaacaaggaaaagccctcggtcaactcccggacccctttacccgctctcccacccccagccaccctctcacctcctccctcctacaaactaaataaaaagcagtaaaattactttccagaatagcccgcttcaaagcagaacagaggacccggctgcaggaatcctgagtcttgccctgataaggttcataataatcaaatccaaactccatccacctcccttgactctttccaacctcctccggacctctctgcatttgttgatgaaaacactttgatgtcctgagtcctccaaacaattattattataattttaaacaacctggtattttccattactaacggctgaggctttgaagttacacctcataatttcctaaattaaataaatcattttaagtttgcactgggaggcttttaatagcagagaaaggaatatcattatcttattgagacccaattgtggtggctccagtttggctgtagctgggggcaaagtaggctcactctaacagacatactttattaacctcccataactcttgaaagaacatttttatattttctttgatttcccccctccctatcttgttttaatgctgtcccaacctttaattagtgcctaatatgaaaagcattatttttttaatgctatgtaatttaccagcggcaacaggccaacttaacaattgtttattagacttggtttttcacacagggcaaagaatgccgctccaaacccaacttttcatgggtggttgcactaattaatacagtgtctgagactcctagggggttttttaatattgaagcctatgggggcggaagggggttttagaagtccagctcctgccgacgaagttctccctctgatttctttcatgctgttttgatcctgtctgtggagtcagcacagacagaaactgttccctggctccgaagactccaggatcccgaggcaacagccccgggaacccccagcacctccacttgtgaattatgtctagcggcctaggcttggggtacagagagcccaaggctcaccccagacttggatgtgggggttcccctcctcctgcctggagggggaaggagctggcttgatggcttgggctgggaaggagtcaggctcttgggggcaaatgccaggtctcccaggcaccaggcagcgcttggctctgggcacagaatttgctgaaattgagtcagggacagggatggggtgggggaaggctaggggaggacccaggctagcttccttcctgtcttttcttcctctgacttttcggctcaattttcctcattcttttgtctctcattttcctttctcatcttttgcgctccctccttttcacctctttctcttccttttttcttttttgctgtcccgcttttattacctttcctccacctttcattctttctcctgtctgtcgcactctgtacctttctaatttttacctctatcttcttattgtcggtaacttcttttcaagttatcatttttaattctcttttccctctcttcccccaccgccttctttgcctgtcactttgctcctccatggcatctctcaattttttttgttttctaattgattctcattcccaccgtctcctatttccccccttctcttctcttttccattctctcttcccctgttccagcgatttcgtggcggattctgggagcccagcccagtgcgccaggagcggtgcgcccagcgcagggggctcctagtcacctcgacccttccggcgcccttccctccttagctgcacctggcaagccagcaagggagtgacccttgcgcaggaagggggcgcgtcacccggtttccccatagaaccgtgggcgtcgcaggcgagaagggaagcgtccaggcgctcggccccttccgccccgcccgctgccggccgcccgtttgatgtcgcgggcccggcaggaatgcggccgggttatcaatcacccagctggatcccgaaggtctctgcctaatcacatttaattgctcgtggaggcccactctcgccccgggccggccgccgcgctcaattactccccaaatacctgccatcaataaatacgcactgacaccggcccggcccgctccaccggcacggaagatcgcagccgaccaggcgccctcctccctgccccttgtcccccatcattaaacttacacctcgacgcccaaagaagcaagccgagcagataataacagccccctgtaactgagcgcttcccaagtgccagacactgttgctcggcgatttacaccaatcaactcacgggtgctagtgagtgctcgtggatttcaccaccgtccgggagatggtattaccatctcctttggagccaagggaaccaggctcagatcattcattaatgcgtccgaggtggggtagataggcagtgccccaactgggatgggactttgcaaccccgtgattccacagcccatggacaaaagcacgaggcaatagtgcctcccagaggccagatattgacctggggtcccgggcactaaggtgtgctgaccagcacctaaagccaggtgcctctttaatcagtattcaggcagcattttattagttcctctcaccaactttgtgaagtaggcactcttagccccattttccggaagtgagctagggggagttcaccctccaactgaggcccaggcctctctccagcctgaacacttccaccaccccgggctgccctccactccccctcccccagcattctgcactccgttttcactctataccttccaatcaaccctgaaattcaagaactatggtttctcccattttcccagagcagcaaactgcctaaggaggtgacacagcaaggcaggaatcacacagtgggtgagctcagagcccagaaatccatgtcagccccagccccagctatttgcattacgccatcctgcttctgctgagagtctatgctttacaagagagcacatcatgtctacattttatgtggtttaccattcatggggaggcaataattacacttctaaacaaagatgaagggggtgagtgtcatctgaagtcagcctgtgacttcctttatttcataccctttcttaatcccctgtatttttgtataaaatatatgccagtgtccaaatactctcatattcaggatctcatgtggccctcaaagcaataggtggggaattacattcccatcttaaataaaataaaaagggtgctctgagaggtgaggtgacttgcctaaagtcacacagcaaggaaacagagccaagcttgacagatagctgtgcagcgtcttttcacctggatgaggttaagtctttgatagactggaagagtgtgtgtgtgtgtgtgtgtgtgtgtgtgtaaccaccaaagtgtacatttccctgaaaagggtttctgggttgcagggtctgatataaaaagcactattttagtggcaaagctctgcctatttttatttcagtgctgagaatgcttgatgatggaaaaactgactttgcaaagaaattgtgtataagacgctaaagtgcctctcgaaatcccatcacagaaaattagctgaaaggtagtggtgatggataaggcagttattgatgtgaaattgcccaatttggggaaagtctgaaggctgcaagtgttcatctcctcctccttcccaccgcctcagcggctcgccccgtctagtctttccggttggatttctctttgtttagcaatgggaacagagaggagccaaaaagacaacgtagaaaatcccaggggtgggtgtggggaatatgatctcgactgagaattccaggaaagcaactgggcagtgaagtcatcgagaatggatgtggggtgggggcggggcaacatgcttcagcctctgtgccctcaagaggtgctggcacagggtagtgcgatgtagccaccgcctttgggactgaccgtgcagatctagtagccactgcctttgggactgaccgtgcagatctagtagccaccgcctttgggactgagcgtgcagatctagtagccaccgcctttgggactgagcgtgcagatctaaattattaccaggttaggggcatccgtgtcttgcatagacaccactaagccacagcccactttcatgagaaggtaaaactgtttttcccccttacaaagagcaggaaaatgccaaggaaattaggcctcagaaggaaagatttccagagcctggggctgctgacatagtttttcagggcactgatgcccacatttttctccacatgcaatccctatctaagtctgggactagaacgaggacccacaggctattttttaagaataagattaataagatgaatgtgaaatgacactttggggtccaaaatgacaatattaacaacatacaaactcaaccttctttctcctttaatcagcagtaagttaataattattattgctgaatttcagcacataccagttatcctgagtattgaacctgtgttgccccaggactttcctgaaattctcaacacagaattattaaaattcactataactaagaagaaaaagaagagatgtactgtgcatctcattagataataattgaattaaatgagcactttctgtgtgccaacaagtcctttacataaggactccataatttcattttaatacacatagtagcacagtcacacatcatcctcattttataatcaaggaaactgagaccttgagagattatgtagcttgctcatggtcttgccactggtgaacgacaaagctgagatttgagctattgactctgaaggaactcgctctcaaaactgctgctgcagggcattcactgtttggggtttgtgtctcctataggagcagaagccaggatgaaagaaatggtctttgagtcccttgggtttctgaattgatttaaataagaagtagtaggccgggcacggtggctcatgcctataatcccagcactttgggaggccgaggcgggtggatcacctgaggtcaggagtgtgaaccagcctgacgaagatggtgaaaccccatctctactaaaaaaaaaaaaaatacgaaaattagccaggcacagtggtaggcgcctgtaatcccagctactcgggaggctgaggcaggagaattaattaaaccctggcagcagaggttgcagtgagccaagatcgcaccattgcattccagcctgggtaacagagtgagactccatctcaagagaaaaaaaaaaaaagaagaagttgtcatcagaggcaaaatgacatttcaggctaatatcgaatcagaggcagaataatattgaagggcaacactatagaatcttagggcagaagggaattttattatcatatcatgcaagaggttcagagtgaaagtgacttgcccaaagtcacttagcagttgtgtgaaagaacaatatttcaaaagaaaaaaaaaaagagagagagagagagccatatttctagttcagttcagctgagctagatagaactagctcaaatggctctggagatttgatttctgagcaacctgaaatccagttcttctgtaccttaaatgttaagtagctcactaagagaagcagcaggatcaggaacagcaggatgggaagtgggttttggttttcaaaaatatctatccatcccctacagccacgtccacattatacggataatatacactatatatatatatatttttttttttttttttctgagacggagtctcgacctgacacccaggctggagtgcaatggcgcaatctcggctcactgcaacctcctgctcctgggtcaagagattctcctgcctcagcctcccacctcccgaatggctgggattataggtgcacgccaccacgcctggctagttttttgtatctttagtagagacggggtttctccatgtttgccaggctggtctcgtactcctgacctcgtgatctgcccgcctcggcctcccaaagtgttgggattacaggcgtgagccaccgcgcctggccatatgtatattatttgattttatcaaatacataatattttctcaagctcagagtaaaagtatttttagaaaacattgctatttttattaatcttttaacatgccatcaagatcaaaatagtatgcttgctaggcaacaagacaaatctccaaccccgtcatactttcttcctaatagattgctctggctatactcctccttttattttggtgcttacaccaaagagcaccaaatgatatatctgagttactgagttcaagttcaagctagccactgatggctctctacacctcactttagcatctgtaaaccagggcagggattagcagccaggaaagagataggaagcccattaggtcaatgtatttttctgtttcattctgaactgtatccctagtgctcagagcactgcatggcccatagtaggtgctcagtgagcacagggcccattcaatgaatgaaggtgaatgttttaccaagtcatataacagttctgggaaaactagagggctctgggtttggctgactttttaaagctttggaaaatgtacaggtttgccatgagttaaaacctttaaaaagttggtttggttcacaaaacaataaaaatcatttgcctttggcaagatgggccaggtagtgttatgaaggcagttataaaaatattcttgatttggttcaagtctctgatgactagtcacagatgaacattaaagaaactttcacagcctctactggtgggttagccagactgtatagagccagttcaacttgtccttatatttcacgagtgaaaaatgtttaaaacacggcattaaatgaaacccttctgagttataaaattgtgtagagttaaaactcttctttagagtttgttttacagtatggtccagtagttaattaatgcactctcccagagggatgcaaggggagagagttctgactctgatttacagctagtttggaaagagaggggaatcctcagaaaaccttcttttattgtctttaaggcctcagtgttcttttctgtaacatgggactcctggttcttcttatagccctcagatgtatgttcaaaggcataattaaggcatagttaacatttctgccccctcgaggccagtaatggaggtttttgttgttgttgtcgctgctgttgttttgagtcggagtcttgcactgttgcccgggctggagtgcaatggcgcgatctcagctcactgcaacctccacctcccaggttgaagcgattctcctgcctcagcctcctgagtagctgggattacaggcacccaccaccacgcccagataattttttgtatttttagtagagacagggtttcactatgttggccaggctggtctcgaactcccgacctcgtgatcctgacctcgtgatctgcctgcctcggcctcccaaagtgctggcattacaggcatgaaccaccacacccagcccagtgatagggttttaaagcaaaagagcacttgtagggattagataggaaatttaaaagtagtaatttcagaataaaaagtgtcatccatactagcctgaactgtgttcaactcttagtatctctaggggttgagggaaacacaccttttttaaggacttaatatgtaggtcacaggacccagagctgggggtacagtaaacctttgtgaaatttatcttgatttttgaggtaattgaaaagaaatttgatcatttcacacattactaattcatacattgtaaaaatctcccccaaactctgacagtctctcggcacttatcagaacacagatttctaaacccagggccagaatgaggtctcacgttactaggacttcatcacttttcaaaaatatacagcaggccatttgctggtaggttatgaaatatgatcataaattaaaactaaatgactcacataaaataaaaggacaaagagcactttgtgatgccgagagctccggtttgattgtgttagttcatttatttgggtatttagagcatttcagaacgccaagtaactccatctactctcagttgatggtaggcacgtggtaccattactgcaaagctttgcctatagcccactgcagaaccaatgagtaagaccagacatttggacacctctttatagtttacaatgttctgtcacctacgttttttctgcgaggcaggtagcatgaagtagaggaggaagcaggctcacacatttagggatgggtcacaggtactcagaagaggcgggacttcacaggaaacagaaaatttaagctaaatgacacgtgacatttttattttttatttttattttttaatttcaattttaatttttttttgagacggagtcttgctctgttgcccaggctggagtgcagtggcgtgatctcggctcactgcaagctccgcctcctgggttcacgccattctcctgcctcagcctcccgagtagctgggattacaggtgcccaccacttcgaccagctaattttctgtatttttagtagagacggtttcaccgtgttagcgatgatggtctcgatctcctgacctcgtgatccgcccgcctcagcctcccaaagtgctaggattacaggtgtgagccaccgcgcctggctttttttttttttttttaatgagttaggggctaagaatgtcagtatatgcgagagattggtggaggagagataatgtggtaatatttatgcagcctttttttttttttttttttttttgagacggagtcttgctctgtcgcccaggctggagtgcagtgatgcgatcttggctcactgcaacctccacctcctgggttcaagccattctcctgcctcagcctcccgagtagctaggagtacaggctcccgccaccacacccggctaattttttgtatttttagtagagacggggtttcactgtgttagccaggatggtctcgatctcctgacctcgtgatccgcccactttggcctcccaatatgcagccttttgaagttagtcctggcaggtatgtggtgggaggtgtttgctgcaattgcaacttttctggtatcattggctttatatgtgcccagttaattcataaccagcgcccccccccggcccgccccaacccctccaggagagcaggcagatcagaaaaggcaggaataccctccaacacacttggggctgccagttgctcttttgcaatttttt

SEQ ID NO: 78 - DNA, 30328 bp, Homo sapiens
aaaaaattgcaaaagagcaactggcagccccaagtgtgttggagggtattcctgccttttctgatctgcctgctctcctggaggggttggggcgggccgggggggggcgctggttatgaattaactgggcacatataaagccaatgataccagaaaagttgcaattgcagcaaacacctcccaccacatacctgccaggactaacttcaaaaggctgcatattgggaggccaaagtgggcggatcacgaggtcaggagatcgagaccatcctggctaacacagtgaaaccccgtctctactaaaaatacaaaaaattagccgggtgtggtggcgggagcctgtactcctagctactcgggaggctgaggcaggagaatggcttgaacccaggaggtggaggttgcagtgagccaagatcgcatcactgcactccagcctgggcgacagagcaagactccgtctcaaaaaaaaaaaaaaaaaaaaaaaggctgcataaatattaccacattatctctcctccaccaatctctcgcatatactgacattcttagcccctaactcattaaaaaaaaaaaaaaaaagccaggcgcggtggctcacacctgtaatcctagcactttgggaggctgaggcgggcggatcacgaggtcaggagatcgagaccatcatcgctaacacggtgaaaccgtctctactaaaaatacagaaaattagctggtcgaagtggtgggcacctgtaatcccagctactcgggaggctgaggcaggagaatggcgtgaacccaggaggcggagcttgcagtgagccgagatcacgccactgcactccagcctgggcaacagagcaagactccgtctcaaaaaaaaattaaaattgaaattaaaaaataaaaataaaaaataaaaatgtcacgtgtcatttagcttaaattttctgtttcctgtgaagtcccgcctcttctgagtacctgtgacccatccctaaatgtgtgagcctgcttcctcctctacttcatgctacctgcctcgcagaaaaaacgtaggtgacagaacattgtaaactataaagaggtgtccaaatgtctggtcttactcattggttctgcagtgggctataggcaaagctttgcagtaatggtaccacgtgcctaccatcaactgagagtagatggagttacttggcgttctgaaatgctctaaatacccaaataaatgaactaacacaatcaaaccggagctctcggcatcacaaagtgctctttgtccttttattttatgtgagtcatttagttttaatttatgatcatatttcataacctaccagcaaatggcctgctgtatatttttgaaaagtgatgaagtcctagtaacgtgagacctcattctggccctgggtttagaaatctgtgttctgataagtgccgagagactgtcagagtttgggggagatttttacaatgtatgaattagtaatgtgtgaaatgatcaaatttcttttcaattacctcaaaaatcaagataaatttcacaaaggtttactgtacccccagctctgggtcctgtgacctacatattaagtccttaaaaaaggtgtgtttccctcaacccctagagatactaagagttgaacacagttcaggctagtatggatgacactttttattctgaaattactacttttaaatttcctatctaatccctacaagtgctcttttgctttaaaaccctatcactgggctgggtgtggtggttcatgcctgtaatgccagcactttgggaggccgaggcaggcagatcacgaggtcaggatcacgaggtcgggagttcgagaccagcctggccaacatagtgaaaccctgtctctactaaaaatacaaaaaattatctgggcgtggtggtgggtgcctgtaatcccagctactcaggaggctgaggcaggagaatcgcttcaacctgggaggtggaggttgcagtgagctgagatcgcgccattgcactccagcccgggcaacagtgcaagactccgactcaaaacaacagcagcgacaacaacaacaaaaacctccattactggcctcgagggggcagaaatgttaactatgccttaattatgcctttgaacatacatctgagggctataagaagaaccaggagtcccatgttacagaaaagaacactgaggccttaaagacaataaaagaaggttttctgaggattcccctctctttccaaactagctgtaaatcagagtcagaactctctccccttgcatccctctgggagagtgcattaattaactactggaccatactgtaaaacaaactctaaagaagagttttaactctacacaattttataactcagaagggtttcatttaatgccgtgttttaaacatttttcactcgtgaaatataaggacaagttgaactggctctatacagtctggctaacccaccagtagaggctgtgaaagtttctttaatgttcatctgtgactagtcatcagagacttgaaccaaatcaagaatatttttataactgccttcataacactacctggcccatcttgccaaaggcaaatgatttttattgttttgtgaaccaaaccaactttttaaaggttttaactcatggcaaacctgtacattttccaaagctttaaaaagtcagccaaacccagagccctctagttttcccagaactgttatatgacttggtaaaacattcaccttcattcattgaatgggccctgtgctcactgagcacctactatgggccatgcagtgctctgagcactagggatacagttcagaatgaaacagaaaaatacattgacctaatgggcttcctatctctttcctggctgctaatccctgccctggtttacagatgctaaagtgaggtgtagagagccatcagtggctagcttgaacttgaactcagtaactcagatatatcatttggtgctctttggtgtaagcaccaaaataaaaggaggagtatagccagagcaatctattaggaagaaagtatgacggggttggagatttgtcttgttgcctagcaagcatactattttgatcttgatggcatgttaaaagattaataaaaatagcaatgttttctaaaaatacttttactctgagcttgagaaaatattatgtatttgataaaatcaaataatatacatatggccaggcgcggtggctcacgcctgtaatcccaacactttgggaggccgaggcgggcagatcacgaggtcaggagtacgagaccagcctggcaaacatggagaaaccccgtctctactaaagatacaaaaaactagccaggcgtggtggcgtgcacctataatcccagccattcgggaggtgggaggctgaggcaggagaatctcttgacccaggagcaggaggttgcagtgagccgagattgcgccattgcactccagcctgggtgtcaggtcgagactccgtctcagaaaaaaaaaaaaaaaaatatatatatatatagtgtatattatccgtataatgtggacgtggctgtaggggatggatagatatttttgaaaaccaaaacccacttcccatcctgctgttcctgatcctgctgcttctcttagtgagctacttaacatttaaggtacagaagaactggatttcaggttgctcagaaatcaaatctccagagccatttgagctagttctatctagctcagctgaactgaactagaaatatggctctctctctctctctttttttttttcttttgaaatattgttctttcacacaactgctaagtgactttgggcaagtcactttcactctgaacctcttgcatgatatgataataaaattcccttctgccctaagattctatagtgttgcccttcaatattattctgcctctgattcgatattagcctgaaatgtcattttgcctctgatgacaacttcttctttttttttttttctcttgagatggagtctcactctgttacccaggctggaatgcaatggtgcgatcttggctcactgcaacctctgctgccagggtttaattaattctcctgcctcagcctcccgagtagctgggattacaggcgcctaccactgtgcctggctaattttcgtattttttttttttttagtagagatggggtttcaccatcttcgtcaggctggttcacactcctgacctcaggtgatccacccgcctcggcctcccaaagtgctgggattataggcatgagccaccgtgcccggcctactacttcttatttaaatcaattcagaaacccaagggactcaaagaccatttctttcatcctggcttctgctcctataggagacacaaaccccaaacagtgaatgccctgcagcagcagttttgagagcgagttccttcagagtcaatagctcaaatctcagctttgtcgttcaccagtggcaagaccatgagcaagctacataatctctcaaggtctcagtttccttgattataaaatgaggatgatgtgtgactgtgctactatgtgtattaaaatgaaattatggagtccttatgtaaaggacttgttggcacacagaaagtgctcatttaattcaattattatctaatgagatgcacagtacatctcttctttttcttcttagttatagtgaattttaataattctgtgttgagaatttcaggaaagtcctggggcaacacaggttcaatactcaggataactggtatgtgctgaaattcagcaataataattattaacttactgctgattaaaggagaaagaaggttgagtttgtatgttgttaatattgtcattttggaccccaaagtgtcatttcacattcatcttattaatcttattcttaaaaaatagcctgtgggtcctcgttctagtcccagacttagatagggattgcatgtggagaaaaatgtgggcatcagtgccctgaaaaactatgtcagcagccccaggctctggaaatctttccttctgaggcctaatttccttggcattttcctgctctttgtaagggggaaaaacagttttaccttctcatgaaagtgggctgtggcttagtggtgtctatgcaagacacggatgcccctaacctggtaataatttagatctgcacgctcagtcccaaaggcggtggctactagatctgcacgctcagtcccaaaggcggtggctactagatctgcacggtcagtcccaaaggcagtggctactagatctgcacggtcagtcccaaaggcggtggctacatcgcactaccctgtgccagcacctcttgagggcacagaggctgaagcatgttgccccgcccccaccccacatccattctcgatgacttcactgcccagttgctttcctggaattctcagtcgagatcatattccccacacccacccctgggattttctacgttgtctttttggctcctctctgttcccattgctaaacaaagagaaatccaaccggaaagactagacggggcgagccgctgaggcggtgggaaggaggaggagatgaacacttgcagccttcagactttccccaaattgggcaatttcacatcaataactgccttatccatcaccactacctttcagctaattttctgtgatgggatttcgagaggcactttagcgtcttatacacaatttctttgcaaagtcagtttttccatcatcaagcattctcagcactgaaataaaaataggcagagctttgccactaaaatagtgctttttatatcagaccctgcaacccagaaacccttttcagggaaatgtacactttggtggttacacacacacacacacacacacacacacactcttccagtctatcaaagacttaacctcatccaggtgaaaagacgctgcacagctatctgtcaagcttggctctgtttccttgctgtgtgactttaggcaagtcacctcacctctcagagcaccctttttattttatttaagatgggaatgtaattccccacctattgctttgagggccacatgagatcctgaatatgagagtatttggacactggcatatattttatacaaaaatacaggggattaagaaagggtatgaaataaaggaagtcacaggctgacttcagatgacactcacccccttcatctttgtttagaagtgtaattattgcctccccatgaatggtaaaccacataaaatgtagacatgatgtgctctcttgtaaagcatagactctcagcagaagcaggatggcgtaatgcaaatagctggggctggggctgacatggatttctgggctctgagctcacccactgtgtgattcctgccttgctgtgtcacctccttaggcagtttgctgctctgggaaaatgggagaaaccatagttcttgaatttcagggttgattggaaggtatagagtgaaaacggagtgcagaatgctgggggagggggagtggagggcagcccggggtggtggaagtgttcaggctggagagaggcctgggcctcagttggagggtgaactccccctagctcacttccggaaaatggggctaagagtgcctacttcacaaagttggtgagaggaactaataaaatgctgcctgaatactgattaaagaggcacctggctttaggtgctggtcagcacaccttagtgcccgggaccccaggtcaatatctggcctctgggaggcactattgcctcgtgcttttgtccatgggctgtggaatcacggggttgcaaagtcccatcccagttggggcactgcctatctaccccacctcggacgcattaatgaatgatctgagcctggttcccttggctccaaaggagatggtaataccatctcccggacggtggtgaaatccacgagcactcactagcacccgtgagttgattggtgtaaatcgccgagcaacagtgtctggcacttgggaagcgctcagttacagggggctgttattatctgctcggcttgcttctttgggcgtcgaggtgtaagtttaatgatgggggacaaggggcagggaggagggcgcctggtcggctgcgatcttccgtgccggtggagcgggccgggccggtgtcagtgcgtatttattgatggcaggtatttggggagtaattgagcgcggcggccggcccggggcgagagtgggcctccacgagcaattaaatgtgattaggcagagaccttcgggatccagctgggtgattgataacccggccgcattcctgccgggcccgcgacatcaaacgggcggccggcagcgggcggggcggaaggggccgagcgcctggacgcttcccttctcgcctgcgacgcccacggttctatggggaaaccgggtgacgcgcccccttcctgcgcaagggtcactcccttgctggcttgccaggtgcagctaaggagggaagggcgccggaagggtcgaggtgactaggagccccctgcgctgggcgcaccgctcctggcgcactgggctgggctcccagaatccgccacgaaatcgctggaacaggggaagagagaatggaaaagagaagagaaggggggaaataggagacggtgggaatgagaatcaattagaaaacaaaaaaaattgagagatgccatggaggagcaaagtgacaggcaaagaaggcggtgggggaagagagggaaaagagaattaaaaatgataacttgaaaagaagttaccgacaataagaagatagaggtaaaaattagaaaggtacagagtgcgacagacaggagaaagaatgaaaggtggaggaaaggtaataaaagcgggacagcaaaaaagaaaaaaggaagagaaagaggtgaaaaggagggagcgcaaaagatgagaaaggaaaatgagagacaaaagaatgaggaaaattgagccgaaaagtcagaggaagaaaagacaggaaggaagctagcctgggtcctcccctagccttcccccaccccatccctgtccctgactcaatttcagcaaattctgtgcccagagccaagcgctgcctggtgcctgggagacctggcatttgcccccaagagcctgactccttcccagcccaagccatcaagccagctccttccccctccaggcaggaggaggggaacccccacatccaagtctggggtgagccttgggctctctgtaccccaagcctaggccgctagacataattcacaagtggaggtgctgggggttcccggggctgttgcctcgggatcctggagtcttcggagccagggaacagtttctgtctgtgctgactccacagacaggatcaaaacagcatgaaagaaatcagagggagaacttcgtcggcaggagctggacttctaaaacccccttccgcccccataggcttcaatattaaaaaaccccctaggagtctcagacactgtattaattagtgcaaccacccatgaaaagttgggtttggagcggcattctttgccctgtgtgaaaaaccaagtctaataaacaattgttaagttggcctgttgccgctggtaaattacatagcattaaaaaaataatgcttttcatattaggcactaattaaaggttgggacagcattaaaacaagatagggaggggggaaatcaaagaaaatataaaaatgttctttcaagagttatgggaggttaataaagtatgtctgttagagtgagcctactttgcccccagctacagccaaactggagccaccacaattgggtctcaataagataatgatattcctttctctgctattaaaagcctcccagtgcaaacttaaaatgatttatttaatttaggaaattatgaggtgtaacttcaaagcctcagccgttagtaatggaaaataccaggttgtttaaaattataataataattgtttggaggactcaggacatcaaagtgttttcatcaacaaatgcagagaggtccggaggaggttggaaagagtcaagggaggtggatggagtttggatttgattattatgaaccttatcagggcaagactcaggattcctgcagccgggtcctctgttctgctttgaagcgggctattctggaaagtaattttactgctttttatttagtttgtaggagggaggaggtgagagggtggctgggggtgggagagcgggtaaaggggtccgggagttgaccgagggcttttccttgttgctgtgaccactttattttgttaaagaagcctgcagcatcaccaatgcggggtggaaaacatttttgcttacaaaaatggaaggagagagaggaacagacacagtcaacttcaccaaccaggccctgtgatttcggggagggtgtgtgtgacgtgggttcttttataaatgaggtttatgcttatttcaaacccaacagtggagacggagtgggggtgggggaatggcctctccaacccgtggcaaatgagcggcttttatagcaaagaatggccgtgggagttttcattcggtcagacaaggttctgctcaaaggcagggatcctcttttcagtcgggtcaggcagacgtttcgccagccaccgctctcagccaggccttcactgcctacctcctgccgccctgctccctccattccccgcaagatcgcccaggcagggctggaagggggagaggggagggctggatctgagccccaggtccactgtgttagaggagcaatgagggataggaaggggagctggagagagactgcagatctgggatctcagggtctggggatccagagtgttccccaggccctggcatcatttctgagacacctcctgcctgatttgccctcaccatctttcatacccacctcctccgctcacactgaggcctggatttccctgcccctacttatcagctctgtgaccttagtgagccacctctttgtgcctcagtttcctcaactatacatgacatctatgatacctctccaaggagtgtgtggcaactaaatgagaacaccggcggggggcgggggggggggaagcctagttctgcactctgcaggggctccataaatgcgatttccctgctctcttcctctctttccaaaaagcagagctgtgtctcttgaaaagtttcgaacaaagcactgaaagtatggaagggtgggtaaatttgcgtgccaggcttctggcatcggacgcaaggatatctaaagcccgcacgctaacatcttgcaatgcgcgccttcgcgggtccctggtgagggagagtccttttgccgccacaggttgtcaatctggcctctgaaacgccctgtgtgcccgaccaagcctgaccgaggcccggaccgcggtgactcggaacccatccccagactgcaggcttgaagggaggcccagagcaagggggcggcccggcttcgcggacctccggcttggttctcagctcggtaaccccatccacctatgaggctgggatgcgtatgttcgagcctgaacaactctttttcccctctccgagcctcaggttttgtttcggcgtctggagcgatggggatggtgcgcagttccccagacggattccagtctaacccgccagccacgcaagatgcagcccttttctccggatcgcactctggatcgcgaccccgtcctcctggggacgagcagagtcttaacccggagccggcgtctccggattccccacccgggctgagatcgcccggggctgcggggtccaagcggcgccgggaaggaagctcggtggacaggctaattagggacccaacctggcggctgatgacgaaaccgggaaaggctttggcctttggaaaacgcaatccttaaatgaatatggctggattccgggctgagattaggagttcgagccggagaagtccagcgggactgcagagacgcgctttcaggtaggtttgggtcgttccagcggctcagctccggcggagcgactgagcaagacaaaatcagcctccgacttcgagccgacccctcggtttggatcacttctgtgctggagcttgtgaaacctctgaaccacgttgcccgaccccggccccataagaaaaacggagtttccggcgcccactttcaaagtgcgtgcgggcacaatggaaacgcgggacgaagcgccagtcctggtaggtgccaggtgccaatctgcccgccgcgctgtttacgcagcaagaagtcctcgcatcctttctgcctctgttccgagtcaccggagcctcccatctgaacactgacctcggaaaggtatcaatcatcaggaaccacttcagatttatttgggcaacagaaagctgagtttaagatccttctcagcgtcctccacctgtcaccattttatcgtgacgcctcaaaacccaagcctgacagcagttctgtattgtttccactgggagagggaggctgggtagcaaagggacttgaacgaaccaccttcccacttcaaaccgaagagtgtttgctcggagtccatctccttggaaggagataggaatggtaaacggaatgcgatttcacacactcctgaaaggggagccggcttccatcccccagcccagcgaatgcgcctcgttaccatgtccacttgcaaacagctataaggacccttttcctcagttttaagtttgatgtgttggtagctgggagatttcaagttcaagattttcccttgatcatgtacaaatgatttagatgctggccgatctccgcctcaccacttatttaaagcttatctttcactgtactttttctgaaaaactcctcgcagcaattccacctcttttccataagtaacaagctgccagaggaaacatttcaaagtatttcagtagtttcagttcactccccaccaccaccaatcaccccaacatggctgaatctggccacaactcttggttgacttacattaaaatattaaaaaagaccagcttccccctcatgtgggtagcactttcgagctaagcccagctaagaacagagaacacctcttaaaataattgtgagtttggacaaactttactgcaataaaacaaatgcttaatttaattcagaataagagataactcttcaataaaatatatcaaattgtacaagcaccctttcaaagggataaaggtataccggagggaggggacagatggacaggaaggtgaaataccagggaacttaatgggctgtttgacaatcccattttcaccaagtcaaaacatggctttaccttctgccccccaacatgtaaaaaagtatataaaattttctaataagtttaggacatacaacaggtacacacacagagaaagcatatttttttttctttctggatctactaattgttcaagaatatttagcatataggtaatggttacaagatactcattttttaagcagaaaattactaaacccccacccaaatcacctttgcaatctgtgaggatgaatgtacctagtatttctcagaaaccatcaattcctctcaacaggttttaacattttactctccaattatctgaaataaagttaccaacagccttgagaagaattaggaagtatttctaattttctacctcacctccaggcagtctcaggattcttctcatcccaggtattggtcttacaaaaatattcttaaaaaaggaaaaactttaaaaatatgtgtgtggtggggcggtggggggcgggggagagataggaacaactgtagtatataaagaggtttcttttaatgcaagtaaaatgcagaaatatgatgtgtccccttcactttgaataatctctccatatctaatattttctgtgtgcattgtgtctgtttctttgttttccataagcagaagtcaataatcccgtaaaaatcattgactttagcacattttgcaaataatttgtctccctctttaagaaaatacaacaaatggacttacacagtgtcttttgggaaggtgagatatagaaaaaaagcacatatgtatataaattttgccttttaaaataatttgaatttttacgtctgctgtataaaaatgtattatattttattatatatatatatttatacataaaaaccatcagagccaatctttgtgaaaggaaaagggggcatctggaagattacaccaagaaaacagggcttggtgcctccgcctacagaacaaatttcagctatgtcgtgtggccctgtcagcctagccgcttagggtggtgcacgcagggttagcagagcaggagtactggctggtactgccttcgtggagagggagaggaaaccctttgaaacaagcatccatcatggagtctattgatctggtcttccttaggacaggtggtacatgccatatcccactggcgtggcatagagtcccacaggcgggatgggaagcacaggtctatggaacgggtaggatgctccatatatggacgctgcctgcaggggcgagctgatggggaaagggagactgaagctggagggcagcataggttttgcagccattttcagcttttccagttctgcctcctgcagtcttttcgccttggcccttcggttctggaaccagattttgacctgggtctctgtgaggttcagagagctggagaactctgcacgctctgcaatggagaggtactgtttctgacggaacttgcgctccagggcgaggagctgggatgtggtaaagggcgtgcgcggcttccgattggtcttgtgtttcctcagggtgcaggtggtagggctcatatgtcctagagaacagagagaggagcggattagcaaaagaaagttacattaaaataatactaaaaaaaacccatctcccccgtcatctctctaggttttttcctttcgggcctcccctctcaactgaaagcacttagctttaaaaaaatctatatatacatacatatacacacacacacacacacacacacacacatatctatgtatggaaagacatactttgtttcatctttgaaaaaggtacctttgtcaaaactatgtgtgtttcttggggggagggggaccatatataaatgggtaagttgcttcgttttttaaaaatgagttttttaagaaaagttttggaaatgtaatggtgtaactgaaccttctatatggaaaacaaacagcattagagataacagaaatagaacatttaatgtaagacaagggaatcaagtggtcggtgagaaatgaaccgctatctcttctgagcataatttatcttctctttaaaaatgggagaccaggttcatgattagcccagcctcccttggacatggagacaatcacatatgggaaggaaaatgaaaaaggttttagcaaccgggttagctgtttcccttggtctcctctctgaaccagaaaaagtggattgcgtcagcatatttatgaaggataatcgtgcagataaggtctgtggtaaattaatagcatctttgaatttgggggcagtcccacgcaataaacagtcacaagctgtcattgcatccagtccacagattataaaatctgaacatcattttacagatctggatgtgggataaggttcttggctgggcgcttctgtaatataaactttactaagacgaagggaaaaattagctagcccataaatgtaaatgtcaggggaaatcatgctgcctccaaattgagagcacgtgatgacatcttagtcatcccctctacccattctatggcttcgggcaaatgtgtaaatgatttgtttgtcagggggaaaaacaagcaaaataaaggtatgccaacagcatccagactccacatttaaaatggattcaattacagcaaatcacggactgggacatccttgtgattccatagcatcaactaactttgggcttgtcttcctcaagggtgggtgggcggaggaggatagagctgtggtgatagaatacttaacaattaattttctgcatttggcttttacgagctatgctaattttccaaatgtggccacagtattaactctaatgtattcatgggagaatgttgcatttcttgtttagttactttggtggcccaagaaagagtttacacttcatacttgagggtgacacagcacaagtcccaacccagcttccatttccaacaagagatggatttgttccagtgtcgcattattacccatcactttactgaatcaaaaagagataagaggctttgtaaccaaccaaagaacagaaatctgggaaagggaaggataagaaactaccataaaagtctatacttttgcatttgctaatccctaagttactagacagccggggagccagcttcttaatttacaaattaacaacactgtcagagactctcaagagacctgcaaaattctcgccctttctaaactaggccgggccctcaggaggactcaggtgtctcagctcagataccaagttcctagcgtgtatatactcttgctcctggctctacgtggggttttgaagcactgtgcgcctgggcagggtaattccagctggtccttcgggttacatttgaattatgaaatccaggtgaccgggatcgcacatgtgtatcaaaaccatgaagctatgaggcttcctcccaatgcaacactccccatccctccacccccacctaattttaaaccagccagaggaaggatgcgattatataaggcaaaacagcgtttatcctacttcctccaaataacaaaatcaggcccgggcgggtagctccctctcgccccaggctccgtcgcctggcattctcaggacccactactctgaccacagggttcccgctgccacctccaggcccaaagcaccaacaattcttcatggtgttttttttttgtttttttgtttttttttactttaagttccgggatacatgtgcagaatgtgcaggttataaactcggttctcagaatttctggttcttttcatgggaaggtcacagcctgggcccgaggttgccttacccagagcagggaagcttgagcacagggcagagatgtttagaggggtagtagtcattgcctttccagacccacaggcctaaaggatggcaggattcctaacctctggacactactccatttaaggcctgtatcattggctgggcataggcgtaggctatgtactcaatatttgttaaacaaattaagtcttttaattttctgagcctctacctcactgtcgataaagtgggtaagtaacactaatccctcaatgtggtccacagtactaaaattttaagagtacccagagccctgtctgtctgccacctggtaggtgatcattaaatggtccccagcttttttttttttttttttttggtcaggcccaaactgccgattcctctctgaactttgctgaaatgtcctcatctgttaagaggccggctgctgccctacagaggagataagataatacggtgaaaagtgctataaagcactatccaaacttgagtttaaattctttgagtcccttaatctcctcgccctttgaatctttcagagtttctaacagggtggagagagactgccagaggggacagccactgacgcctgggtatatggccttgttttgttaacaaaatacagtgcgtctagtcttgagggctgaatgatgtaaatagtgaaaggatctctctcagctttggagaaagtccctccacagcccccaccctcacctttcctacaggtaggggatggcgtggtgggaaattagggggtagagaaaccataaaagccaagagataaaagtaaaagaggctgtaaaggatgacgtctccaaattgtaaaaggactcagggaccaaaaatggatgctgaagcggagaattctctgcagcctcaattctcaagtggggtgcaggtgcggatctctacctagtctctctggggagaggacgcaaaagtggtcagggcatatcaaacagaggagcagggcgtgggcaacaggtgcccctggccaatcagtggttgttggtaacctgggacaagcaaaggccgtcttctttaaaagcctcagcgtccacgtctgaaaaatagggtagtcacaagtccagtgtctacacttgggggttctagtgaggatctcgatctggtgagctagtgaacatcactctgcaaactctcaagccctgctggaatgcggttaattattactgtgagccaagaagagcccgtgcgcttctggccccagcccgctcccggcgaagctcagaaccttgccggggaggtgctggctgcggagaccacagagagacatttcctccccgcaccagactctgatgccaccatccctggtgccaccatcccttcgtgggatccggcttcgacacccgcgggactcacgaaagaaaatggtttctcctcaatgtctggctaagcccagttagctcatctttaaaatgggggcacaactctcagggttgagttttgaacctgtctcgttcctggtacatccaagtgctcactgaacatggatccaactccttcactccccaggcagagactccggggaacagtgaaacaaaaacaagccaagtggccagagcgcagggccgagggctgtagaaacggaccaccgagcgaccccgtaaacccagctggggttcgctcttgaaaaaacaatctgtatgtcgagggagtctcagacacacacagcgcggttattacccagagggtgtcttggatgcggacggcgcactgggcgcgccgaacgccccgggcacccaggagtccagaggccctgggcttgctttcccgggagtgtagcgcacgcagaagggtctcggtaccctcagccctggaacacccgccccccgctccctccagtaccccgcgctacctcctactcctgccccggcgcgcactcacttggcggcggcgaatatcggccgggttcctgcatccacgccgctccatcttctgaattttccgacttgaccgaggcggtctcgaagggcttcaccagcggcccggggctgtgcgcttcccgagcgccgtgccccgacagcagcagtggccgcagggtggccccggccgaggcgctttcggccggcagcggggacgcctccttgggcggcttcttgtcggacatgagcgcctccacgctgaagggcaggctggagaccttgacgcggcgctcctccgcggccccctcggcgcccccaggccccgggcctggtccggccaccactgctgggccctcctcgtcgggcgaaaacaagtcattgcctttggacggagaagccatgacttctctgccctacgtagctcccgacgcgcgactccgctggcaacccggcagcggcgactcaaacttttttgctgcggagacgggaggggcgcgctgggagctgagcctttcctccgaggggaagtgggagacgcgcgccgccaatccgcgccgggcctggcgctgacgccagagacgctcgcccctgattggctcttcccgaaggggctgccccccctcctttttttttttttttttttttttcctgtttgaaataaattaggagttaattacaggagcagtcagcagagttgttattaggcgatccctgaagggttataatcacgccgaaactgaaaagcccgagacctaattaagagcgattatttaaagcggaagttcgccgagtcccatttcttctctcttttgacccttctttaaaagggaccctgcgcccatcccactctccctctaccgccagaataagttcaagattcgcaaacagcattgcagaaacatttacgaagcccctactatgcgtcaaaattggcttactttacagttccagaaagtcggtgctgaaactcacaggccagtatccctgtgaaagaaatgtatgcacttagaagagtaactcgccactagccagcgctcaaaagcgcccactgttattattacaactctttcccctggaaaagaggggccggaaggagcccgagaagtggtcaggagtgcctctctcccaaatggttcggagtgaagaatttaaatcagttgtccccatctctctcactagaaagcaaatccagcgcacttttagaaagttgaaatctctgtacttgtctcctgaacctcctttctgagcgcgatccggatccgacctttttctcaagacagtgcaagtgtgcattcatgagtttgtttgagcctgtgtttgtcgtgcgtgtttgaatgccagtgtttgcctcggagggtaatgggggtgggggggaggaggaaaagtcgccaatatctagtgcctccctctcgtttgcaagtctcagaaataccggcttccaagtttgcacaccccaggcctacatatcattttgggaagcacatttttattcatggcacctggttttttataaaaacatagatgtctccaccccaccccaaattataccctcggtaattcctttccaaagcctcagtgatgactgtctcagcctggggaaggggagagcgagcttcgaggattagaggcctcggatctctccgctggtcctcaaaatgcctgacctagaaggttagcttcaaaagacttttttcaggctgcggctgtcttttcctatatctgaacgattatcctgcgactgacgaggtaaataggaagtcacccagttcaggacctcgcctacagcagatgcttgctaaacattccctagagcattggaagggagagacattgtttttaattatttaaatgaccaaggcttggaggctacctcccagttcaggagtattagaaacttgacccctagacctacagacccttatgtacccttcccaatgtacctctctgaggcactgtttgcttcaccccaaacctttccctgaagtgaaactgtgctggccggagagaactggaaaaaagtattacctgaatcttagaggataaagacagtctgcacaggccagttaattcagtttgattaaagatggtcctgaaaaagtaaaagagtaagtaagtcctaaacacagtcttctaaaacttctgagtttctctctcactataaagaatatgcacatttcttcttaaccaactggaggctcaaaaaagttaaaaaaaaaaaaactatgaaaactacctggagatgtatgcgttttccccttgagtcatacctggtgatagttgatttgatatgcatctcaaatacagtacaggtaaatccagattaacttctgtaccttctagatgtacaaggcaaggtgcaggctatatattttggaagcaaatctgaaattcgtttagccctcagctgccaaagtgtacaaaagggttcaactttcagttaggctaaacgcagccaatgttttataattattcctgaaaactccttgttaatatctgtcagctataaggcacacaggctcattcctgagaaattcgaaacaaaaatcaataccactggaactcctttattttaatgaacttctctgggaaaggaaaagccaggtcccctttactactctggaatactgaagtccaggcagagacaaataaattacaaagccaggaataggaaaacagagataaaaaaattaccggtgttcaaaatcagagtgccaagctctgaccatgaataggaaagatgctgagagaggaaccagcctgctcctggggtctttgccagttccctccccagctctctgctgaggtggagacaaatcgggaaaggggctcacttctgctgggaaagggctggaaccgcaacacaacgctagccctttatggaaagccccaagtctgcattttatccaactttggctgcgttttcagaacgttttattcaccttttcctggcggagtgaccttgggcactctaaattgcttcctccagccagcgtttttttttttatctccaaaatgagagataataatccttacctgagatgactctggtggtgattaaattcaataggctacctaaagtaactagaaggcataggaggtccaggttaaaacattattgtatatcaaaagcaatcacaatgtatcgaatgctttctccctgccaaggatcgaaagataaggtgcatcccagagcttacggtaggttctttgtaaaatttccggggctgagaatttggctcggtctgagaagtgtccaggtttggggacagtgatctagcggagaactggctttgtcacgtagaaggcactcagtaaatgttagttcccagggatgtatgcgtagctgcaatatttgctagcaaaaaagcggggttccaataggaactcagccaccaggaagcatcaactctgaaggatgctttagtgcctggacctatccaggatcttattggtttcttccaacacaccgctgctagcagattatttttcccatttcacagatgaatgcctaaggctgggaagcgctaatactctgcccaaggtcgcgcaggtagaagtgggagacacaggaatccctcccgcgcggctgaggcctctgagcgtagatcctcaaccctgcaccttcccgcgctccccggggcgcgttacacccgccaggccccttcttgaagcaaccgcgtacgcgcgctgcgagtcccaaggagaaaacactccttgcaaactgtggagcactgcgcgcagaacgcagcgtttgtaaccccgagggccgaaggctagtttgtaaccccagcggctagaagggggcgggggaggggcagcgaagggggctgtagacgggcctgggcttcgggcaggcgccaggcgcggggagatgaaaggcgggctccgggggaaggggctgcgccgggtgaccggctccagccgcgccgggcgccccgcccccgccctgccccgcccccgctgcccggggcagaggcggctgcccgcgccggagccgcgttaattgctctcggccccagcactcagcctgcgcggagccgggacaacctcgctccaggaggaatgacaattcgccctaatgggacaagctcgctcccagaggagtgacaattcctcctaatgggagctcgttagcggcctattctaccgagcccgggtatcagaagcaggcagacccgcgggcgccaacatccgccaggaattccacaacaccgctcacccaccccccaaaacattggctgtgtgacttcgggcaaaaggctactcgtctctgagctcatttttcttactggcttgttgcagagtgagaatggggaaggttcggtcctctggtgtctagagagatcactttccgagttacacagcccaggaagtcgggtagatagatattcagggtcacagctggaggttttgggggtacaaacgtcttgcttgcgaagctctgcaagcccaagcttgttctttcctgttctcctgttcccgccccctaaggtccggagtcaggaccgagcccgggtttgagccggggctggagagaaggagcttttgccaaaagcacgatgcagattactgaaggccccctaaagcctgagctttctccccattccacagatgaagtcgtccaggcgcagagaggggagaggttggcctgacttcagctgtggtaaaacctaattcaacacggtgtccctggaagaagaccatcacaaggatgggggcgggggaggtagaggtaaaagaagctgcatctccttgcaggtcccacagcctggagaggggatggcgagttcatggggacatctagttctggaggcagcaggtgtgaggggaggagctgtgggtcggccttctgtagttctatattcaaatccaggccctacttctcaccgttttccgccgtcaccttgctgggtcttggtttcccctttcagaaaataggcatgctaatgcccatccacagggttgctggtgagaactaggtgacaagccttacaaaataccgagtagcgctgagtgtgctggaagcaggcactgacccaggagacagctctgcttcggatctcctagagctaaactggcttcaagatctagagctgaactggcttcaagtaaggttgaaccatgtatttcctgtgagactagataaatcacttcacttttctgcactgcagattcagcagctgtaacatgagagagtgcctagcatttagtaaatgtgggatattattctcatttcttaagtcattatcgatgttactttttacctccctttccaatagatcttcctgggcatcgtgcacatttgaaatcgaatgatctaatattggatgattcgaggcatggaactcattgaatgatttgaggcatgcaactttctggagcctcatttttttttcttctgtaaaatgggaataactacctaccttttgggaaggaagcagattggcagatctatctagtgagaggtggagattaagggaagaagaaactttaggtttagacaaacagcagggagtatctcctgtctcccaatccctgggtacagctctctggtctcttctcaacccctgcctgattggaggaaagttgccacgagcagggccgaggctgatttgtctgcagagaaagacccaaaggactccctggaagaggtggttccaggaagctggtggctgcagccctagggaaccagcccggtcatccaggagaacacctaggggatcttgccctgccattcacaaatctctgccgtcccccacccctttcagtttacccatctgtaaaaccagaataaccacccatacagggctgagcagaggtgaggttttaatcgaggttcaataaccgtcagctctctcccacttattcctcaagcaaccctgtgatgtacgggccctattcctcctgaaggaagaaagaactgaagcttaaggcttgataaggttttttcacagctagaaaatacctggcaaagatgcaaatcaggatttggctgattctaaaatttatgtattttgcctgcagcagaggttgctgtaaatgtgagaggagaggcatctggaattgctcacagcaatgaagtatctactatttccattttcttccgacttgacagatgggctgttgagtccaggatgggctcagtcactagcacggacacacacataaattgctctcggccctgccactctagattatggcaaagggtaccctggattatggattcccaaataattcaacagaaatctcaagtctgtcttacttggtggcctccaagttgtttcagcttcaaaatgcagcagactacacgtagggaagatgggaaaaggaactttgaggggttacttaataggcataattgtattttttaattaaggcagataatctcttccagttgctccacccccttctcccagttgcctggtggggaataagcagggtttgttttatttggaggataaagacaattagaagcaattattctaagtgttgttagtcatttttgggcgaggagttggggtgttggagctgggccccaggcttgtgccagccttcggagggagctgctggtcatcattggcaggaagagcccctgccttggtaatcagaaaactgtgcatttagctttactcattgcaatgctttcacatccaaaacctcacttgttactaggagtgtgaatcccctctccctcctccctttctgcctccaccccttcctgtctatcaccccatttcaccgcggaggtgaaatgtgaaatgtaggtctgaaaggagaggccacttgctggaggtcacagagggagttaggtaggagaatgcatcacattgcttaggtttgcccaggaaatgctctgagccttacagtgccccactgatgtggaaaccatgccttttggggcctggatccatgaagacccgatgtgggggcccccaggatttgtcatgcattcacagcactgtgtccagtgcccagaagagcctttggcatggtgagggactcaataaatatttgttgaataaatgagtaaatccaggtggtggtggagactgcaggggtgactcactgaaaggttgccttccccggtgactccagaatgaactgtgaattatgagggctgctctcagaattgtaactaatgctggattggattcttgcaaggcaggggcagaattttaacctgtccactgggaaaactgagtgttcattccaccccagacccagaaagtcgttagacttgcaattaattgtcacatttccctatagttactcatttcacaaatgggaagagttggggaggttgtgcttgcccaaggttttgtagcatctaagtgtttcagtcagcatgtgaccccaggtgaatctgactccagaccactaactgatttctcttcatcatccctcagattgaatttctcttattcctggctaaaatcagccagagacaggccaggagcagtggctcatgcctgtaatcccagcactttgggaaaccgaggcgggtggataacctgaggttaggagttcaagaccagcctggccaacatggtgaaagcccatctctactaaaaataccaaaaattattttggtatctgggcgtgctggcagattcctgtaatcccagctacttgggaggctgaggcaggagaatcacttgaacctgggaggtggaggttgcagttaaccgagatcgcaccattgcactccagcctggcaacaagagtgaaactccatctcaaaataataataataataataataataataataaaataaaatcaaccagagaaactcgacatcacactgttatctttgccaatttgctttagtaatatcttgatctttctacatgaaggtgtgtttctacaatggaaaaaaagagacccatatgtatttaggaaaatattaaactgatagttttaagttgctcatccccctaataatagcggttgatgctttttgagcacttactatgtgtcatgcactgttctaggcacacaacaggcaccaattcatttacttctcacaagcctcttggtagatggtatcattattttcatttattgaaaggtttgattctcagacatgaaaaatcaagacatgtataatttctttttttaattgtgtattgttaagatgtcattcccttatcctctacctaccctccaaccctaagagagaatagtcaccactgtttaaataggaaaaagaaattagagctatgggtggaattttttgcaaaaggcattgtaatatcttcacaattttatgagatccacaaactttaaatatagttaagccttcctcatcacgataatactatctataaattgaataccccttatgtattatagcttgataaaactgggactttttctctttgccacctttccacagcttatgacttttgccagtgaatttgcaagtctttgtagggaaggtgggaaagtgaagggaaaagacctagacacaccccctgcccactcccacccacccccactaccaggaaggaagagttctgatctctacctgtcactctcttgctgggtgactttgaaaagatcttcctgctctctgggttcctcatccccctcactagcaaaaggagggggtttagttgcattccaagtctgctctggttctatagttgttctatgataaaaaggagtgaatgaaaaattcggcttcttgttcctgtctaccaccaggctgactgaggtttccagtcagatggaaggatcacaggagtcaggctgggtaggttggaaaccaaattttatcctgtgtccagcttgtcttgggacaagtcctcccacttctctgagtaggacttcattctccacatcagaaaatgggggccactaatccctatttcaggggttgaggagaattacatgggatcatgcatataaaatgcaaggaacacaatttcttctgttccctgttgcaggtctcccattcaagaaaggagggaagtttttgactcagcagatgggaagactgggaggaaaccagatggatcattgctaatgacacaattaatgctaacgctgttggtgtggacagttgcaaagaggcttatgaaaattacattgctaaaaaccctcagggcctttcgggcagcacaagaaagctgtgcccaagtggtggcaccagctttacccagagaaatgattttggagagtctctggacagggtatgaagtaacatctaagtacatgacaacgaagtgatttcattttcaatgatgtctgttaatccttccactttactcaggagactgtgtttggtgttttgttttgttttgttttgagatggagtttcactcttgttgcctaggctggagtgcaatggcgtgatgttggctcactgcaacctccacctcccaggatcaagtgattctcctgcctctgcttcccaagtagctgggattacaggcacctgccaccacgcctggctaataatttgtatttttagtagagacggggtttcactgtgctagccaggctggtcacgaactcctgacctcaggtgatccatccacctcggcctcccaaagtgttgggattacaggcatgagccaccgcgcccggccaggagactgtcttagtacaacttgaacaccacgataatgatcaccagtgtccctggggacaaagcaccaggtttcagccttcaggagaccacagcatcaagccggaaaataacacagtgttgctttcactctactcattttcagagttaacccagctaaggttgataagtaatactgtgacataaatttcactttacaaattattttttagtgttaaaatgagaacttaagttaaacattaattaaataatagcactgttggtactgggataaagccaacaatcatgattgttcttaggaacaattgtgtaggtggatgcctgaaattggggttaacactgatttacaggagagaacactgcatttccaacagcacaaaatctggatggaatcctgccccacctccttccagctgggtggccttgggcaagttactttccctctctgaatcttggatcccttatctgtactatgagggttgtgatcattctgacctcccaggtttgcaggaagaatttactgtggagataatagaggaccacattattattatgaagacagagataatagaggcctccacattttcctggatgtttggagttgttagtatcattagtaaacagtgaataggtgaatttggtcaaaacacaaacttatttactctgaacctggttatctactagctgagtagtaattgcaaaagaggggaagaattctttgaaatcctagttctgtttaaacatcactgtatcctttgtttcactggttcatctttagtgcctggatatggaaactgccatttccctagcaggcatttttacagtatccatagaacatctataccgtgtggtcaaaattaagatacacccaagttgcaggccaggtacggtggctcccgcctgtaatcccagcactttgggaggccaaggcggcagtaccacatgaggccaggacttcattgagaccagcctgatcaacacagtgagacctcttctctacaaaaaataaaacaattagacaggcacggtggcaagcgcctgcgatcccaggactttggggctgaggtgaaaggatcacttgagcccaggagtttgaagctacagtgagctatcattgcaccactgccctccagcctgggcaacagagtgagaccttgtctctaaaacaaaaacaaaaacaccccccccactcaattttgaacaaaggctggttgcagtggttcatacctgtaatcccagcactttgggaagccgaggtgggtggatcacttgaggccaggagttcaagaccagcctgggcaacatggcgaaaacccatctttacaaaaaatacaaaaactagccgggcgtggtggtgtgcgcccgtagtcccagtgactcgagaggctgaggcacgaaaattgcttgaaccccggaggcgaaggctgcagtgagcctagatagtgccactgcactacggcctaggtgagagagtgagactctgtctctaaaacaaacaaacaagagaacaaaaacaatctgtaagttgcaaacaagatggaaaaaggttttcacttgtccttttcgtaaatgattaaacgcattgcctggtgtgcccttttatccctttctttcatccttctggctgtttcccgtgtttcttcccttcttccttaagtatgtgtgtgctgggttgtgctaaatctggaatgcaaagactacccagacaggttcttgccttcaacagtctcccactccagtgggaacacagatctaccaaatacccagttacccaatactgatgaagccagacatatctcacagaatttctttctttcactctcactgtgttggcctgaagacagtttattgaacacttcaataagttgccaacagttaaaaatcagggggcttcccatagaaatctggaatcctgggggctgggcgcagtggctcacgcctgtaattccaacactttgggaggccgaggcgggcgaatcacaaggtcaggagttcgagaccagcctgaccaacatggtgaaactctgtctctactaaaaataaaaaaattagccaggtgtggtggtgtgcacctgtaatcccagctactctggaggctgaggcaggagaatcgcttaaacccagggggtggaggttgcagtgagccgagattgcaccactgcactctagcctgagtgacagagcgaggcttcgtctcaaaaaaaaaaaaaaaaagaaagaaagaaagaaagaaatctggaatcctggcttctctgcatcagtccaaaggagggtggccctgggccgtccagggcagtttctctaggtggaacctgcagactctagtcgccaccagccaggcgtttgaaagtgcagcccctgtagcaggtacagtggaatgtggtaccagagggtacagggcatataggagcgcagagggggactgacggacccttggaggcaggaaaaggctgtttggaggaggtggcatttggggtgaactttgaaagaatttggcaggttgagaaagaggaggtggtttctggcaaagggggcaggatgtaagaaagcgtgagaattgaaatgacctggtctgtgtatttgggtgctaatacagatgtggggagtcggggcacaagcagtcggggagaaggacaggtggagcggggagccgggacttggaaagctgcggcgagacagtgaagggttttttttctttcttccttccctcccgctcccttcccttctctgctgtttacttttcttctttcttttcttttttctatcatcttatcttaaatgactcttagaatttcaaaagcaataggtttccactatgaccagcgaaacaaatcaaagacatgaaagcaattaataatctcccttatcttctcttcattctgccatccaaatca

SEQ ID NO: 79 - DNA, 29900 bp, Mus musculus
agaagcctcctcacgcctctggattgtttccaataagttctgcaatacctcctacgagagggatgtaatatgggactctactgataacctcttgcccaaaatcacccttgtcggaaatgaaaatgaagctatacagatgaagctggagcttagctcaatggcagagcacttgccagtgtgtggagggaggaactccagactggcagagcctggggagacctggaggctgtgctggggatgtgcaatggaatggggttgtaaaacatggctgagcaggggcaattccagtcaaaaatatacataacgagtgcccagcaacctcagcttcagaaaggagatatagatagatagatagatagatagatagatagatagatagatagatgtgaaaggcaaacaacatagatcaagagttgacagatgcacacaaaggcatcatgagttctcatttttccctgtttgcatctgcaattttatgtttgttgggtagaggagtgtgaggacacacaggagagcattcacacaggttatgttcatttgaaggcacacgggagagcattcacacaggttatgggtggaggagcatgagggtatatgggagagcattcacactggttatgggtggaggagcatgagggtatacgggaggatcattcacactggttatgggtggaggaacatgagggtatatgggaggatcattcacactggttatgggtggaggagagtgagggtatatgggagagcattcacactggttatgggtggaggagcatgagggtatacgggaggatcattcacactggttatgggtggaggagcgtgagggtatatgggaggaacattcacactggctatgggtggaggagcatgagggtatatgagaggagcattcacactggttatgggtggaggagagtgagggtatatgggaggaacattcacactggctatgggtggaggagcatgagggtatatgagaggagcattcacactggttatgggtggaggagcgtgagggtatacgggagagtgttcacactggttacactagatggcagagtgagaggaggaggagccttgactgcttacactgtcttaaccttcctggttatcagacataaatccctattaattttgaaattctaaaagaagaatctaacagaacatgatacaaagaaaaagcaagggatggaagggacgtgaaggaaacagaaaggaaaggacaaggaggagaataggagtgtcttttactgtctcaatgtatctcttcaaagacccagtggggttgctcttcccccacccccgttgatacacttaattcctccacattctctccttctaaaagatttcttcaacttaattacacagttatttatgtacataggtctttgcctgaatgtctgtgtaccacgtgcactcagtgcctagggaggctagaacagggtgttgggccccgtggaactgaagttccaggcgatagtgagcctcagagtgcagtaaacccaggtcaacggccagagcaagagtgttcttcatcaccgagccattgctccagcccaccctccacacgctcctgatacccagatgcacagacccggtcatttcattgcttacctattttcaaatccttctctctttgtcgtgagacctaccttctcaaccaagcagccgttcaaggctcagcctgtggaagtcaatcacctcttccaagctgaattcaaagttgaataggcttcttcaggtttccacactccctgaagcttctaggattgtatactttgtatcctggggtactcctcccctctcctgggaagacaaatctcacctgcaagttctcgcactgtagactagggccacccacctcagagggttaaggagaagccagaattgtggatttctatggaaagcattgcaaattattaacatttggcaactcactgagatggttaaaggagctgttttcgtgccagctctgactaggagaaaagaatttctcagatggagttggtgcttttgacacatcttttatggaaagttgacacgtctggatttccactggaggggaggttcatagatgacgttgtgctgtgtgtggcacacgcacgcttgtgtgtgtgtgtgtgtgtgtgtgtgtgtatgtgtgtgtgtgttactgaaaactgaacctggagcctcatgcatgctaaacacaagctctaccactaagctgcgtgcacacacacacacacacacacacacacacacacctgaggaaaggcaggaggaagaagggtggtaatgttgaggccagcctgggatgagcaagacagtgtctcaaaccaaacaacaactaggggctgggtaagggatgggagcaaacgaaatcagaaagaaagagaacagagcccaaaaggagaaaatctggaaacgtcttcctgcgttgcttggaactatcacacgtcttagatttgcctgcctcccggagggtccacgcctgttccgtctgctggagaagtggtgatcagcacagctgctcattggggatggggagcagccccacgccttttaacctgaattccactttcaaagaccccttctcctcttttgcaatggctcctttgagatgaataagcttcgagataactagatctaaggaaagcaaaggagaactttgaccagactcctccacctctgtttacctatgatgctaacagttccacagacccaattaaacacacgccctccctccacgatctgttgtaaggatccttaaggacaacagcagcaacaacaaaacaacaacaatgaaacaaaaacaacatcagcatcctctattatctctattgaaaactcttcctgtaaacctgggaggtaggagcaatcaccacgggttagagataaaggatccaggctctgaagacaggacagaacttgcccagggccatccatccaggtagaggcagggcaagattccaaccagacctgccctcctccaatgctgtaaatcagtattaccacatttcaggcatctgcacagccgttcccttgtctcaagacaatcatatttgttgaccctgttatcctaggaccgacagggctattatttaattaatgtctaccttccaataaattagaatcttaaacccagaaacaaactcagggagtgaaaggcaggccgtcggatttctctggaaatgagagagggcacaatgatggtatttccagccacattctgcatccttcttgtgaaaaccaagcactcagtcaccatgaaggtgatgtattcgtcttctgaattcagaggaagggaccggatccggtgcttttgagatgtcctcgttgtcactgctgaggtgtgtgactttcggggaagacctgtgtgacaacttgggcaaagctttcttgtgctgcccaaaggtccttgggactgtgggcaagcatgacctccgtaagcctcctaccactgtctgcatcaaccgtgctcgttccaattgcatcacgattgatggaccgtgcctccttccaggtcactcatttgctgactcacgaaacttttctgtctcacacgcgagcctagcaacaggcaaggagagaggattaattgtgctccttatattttatgcccgcaatcccatttaatcctcctaacccctgaaacaggaatgattaccctccgtttctgattgggagaatgaggcgtggctcagagagatgggtggacttgccttgagacatacagctgttacaggagaaaactgaggcttcatcctgccctctaatctcaccctcttggaagccttaatcagctagctttcagacacaccatgcaagtaggtgggttttctcttcccttcctctccctctttcttctctccctctctcctctcccttagaagctcagacacaacactcctggcttattatcttggcttgaccagtgacagggataagggacccagagagaagaatggcctgccccaagtcacctaaccagtgagcagcacatgggagttcaagtcctactgtttgcctgggcctaggtcatcttcctaaattctcttgcctaaaaccatgagctgtggctaaggggtaaaggaaaagggcacgacttacattaagttccaatacacaggagatatggaatctatgagttatactgtcactgtcaggaaggcttaaccatagttcaagtttggaaagttcattaagttctgaatcctttgaatatcctttgtatagaattctacctagtctggtctcctatttaaactgtgacgactcttcttctttctaggggaggaaggtcagggaaagatggagagagggcagacacctgtacaaacacaactcaaaagagaaattacatgtatctagagtttcctgtgaacacaatgaagataatattagcaagtccctaatagggcttttgtaggttttgtgaattagtctgggccttgtgcttccaacagtacccgtcaagacagtaaatgttaagaaggtaccagccgatgttattaggggatgcagaccctgagtacggctgtcgttattttctagctatattggggtattttaactggcagaacatgggctggagagatggtttagcaggtgaaggagcttacttaccatcaagcctgacaactttaattcaagcccaggaacatatatggtggaaagagctatctaaccgatgtatgcaggtatgccctgacctgcaccacagcacaggtacaggaacacacacattatagatagaaaggtagatagatagatagatagatagatagatagatagatagatagataatggatagatggatggatggatggatggatggatggatggatggatagattgatgatggatgaataatggatggatggatggatagataggtagatagatagatagatagatagatagatagatagatagatagatagatagatagatagataatggatagatggatggatggatggatggatagatagataggacagatggatggatggatggatggatggatggatggatggatggatggatggatggatggatggatggaaaaagaactatagaaacacagtttcctctagaaaatctggaacccaacaagaacatgagcacaaagcaccagggtccctggatgttttaagccagggacagaagacacgctatatggaaactgagaaacagaagccagctcccatctggaaccagtcttctctcaggtcaaaagccagctgggtcacttactgtttaaacttgggcaggtgacaagcgctccagctacaaaatgaataactccttacccgggagctgtgatgatgatgaagagcctagagacatttcggatccaaggaggatgactattccctgctccatctgccagtcaccatttgcagttagttgttgaaatacaaacagggagactggccctcaggactccggtgtcattccaaggtgagaacgaagaccccatccctgtagcagatttcaatctccgcctggatttactggttcattcaacgtttattcattacactatgtgtgctagggactgttccatgcactggacatagtgctggctcccctctcatgacgcgtctacccctcccactgatcagctctccttgtgttcaggctcagggaagttctccaaggaggaaagacatggggcaactccaggtcccacctctttccatgaccttagggaattcagtggcactgaatttgggcagctgaaattacctctcaaggcacagctagagttagggactggggaaggtagatggatggatggatggatggatggatggatgaatggatggatggatggatggatggatagatggaaaaagaactatagaaacacattctgggctggaatgagatacccatgtcctggtgtgatcttggagagcaagggatgattttcctgatggggaagtgctttgggaagtacaggatctcagagtatgtgaagttcaaggtagtagtttctacagatggaacccagagcctccttggctgctgagctccacccccatcccaccaccaacgtgcttggctttcctattagggacactaggggagtctttctacccaaagagatcttaaggctagcaggtctgggcctagctccatgctccaaccccttccccttcaaataactaaaagattcaaaataattccttctcactgcctttattctcagactagaacaagggatataggtcagagcaattgggatagcttgtttgtttttgttttattttaaatagggtctcgttggaacaattagactgatctagaactccaggagatcctcctgcctcagccttctgagtgttagttagggttatagatatgggccaccatacccagctttttatcttacttaattaagaagtataattatgggctggagaaaaggctcagtggttaagagccctgactgttcttatagaggtcctgagttcaattcccagcaaccacatggtggcttacaaccatctgtaataggatctgatgttctcttctggtgtgtctaaagacagctacagtgtgctcatataaagaaaataatctttttaaaaaaaaaaagaggtataattatggtcattagaaaactccctaaaacttctttttcttttccattgttctgatgtaaaagaatgtggatgtcactgaataaaatatgtctgagattcctacgagggtagtagtaatccatagactagggctctcttttcctgaggcccctatttaagctcctctcagactcacccgcctatctattaagctggggtggagaaatggaaatcataaattcttcagcactctgagctattccagtagcatcatcctttgcccgagcagcaatgctgcctggcgagatacctgaagtctaaagtcagccaacccctggttgacatctctaccactagcttcaagaaaaactctaatgaagctttagttttctccttcactgggagggacaaggatcccctactccacagggttgtttgagaaacaagaaaggaactgacatttatggacccatatgaaaagcttgactccgggactgaggtggagcccagtaaggaaagtgaaataaaaaacaaccaaggccatatagtagttaccctggctctgtacacgggtagcatgaagaggatgagagcaaagacttgtgtaagatgctctaagagcctcctaaatagttcaggtgtcttcccatggctgcaaccatgcaatgtcctagaaccattttccaggggactgatttgtttctttggtttttgcttttgttctgttttgtttgttttctttgctaaatctgagctacagtattgctcctgcccaatggagacagaaactgaggagttgtcaggaagctgtgctcagggcctgggagacactatctgctgtttctaacctatttcgctttcctttagccctcatgtctcactagacatactgggtgaatctctgaaggggtaggtacctattaccaggggcccaacagtcctccacttctgcactcaagatctctaacccccatcaacacatccagatgtgtgccttgccaagaactgtggagaggagaggtaagcagatacttacagagctaagacaatgacttgggagatagccaacgtttgctgactgctacctaccgtactacaggtgaccaccccatcctgctacaaaggtgaggtgacttatgctccgctctgaaagaggaaaccgagaaggcagcggtgtcagaggcaagaaggggctctgcctgagaacaggtctacaaaggctcagaaccggagctcattacccccttggccactgtcacatttgagccaggagctaagtgaggactccaagaactggccattctctctctccaggctccaggcctagcagaggtgcggcttgcctgtgagtctcactcaacagtcctctgttcctgggcctcttccaggggttcagagtgggattgagttctcaagcccctctctcttctgcccctcaacttccactgtcaggaagccaacaaaacttgcctctctggagaccttcaaccagctaggtagggctgtagccaaagcccttcccctccagcctcttgtttagcatcataagtatatgaacgaacaggcctaaggaaatcctaccctgaccccgagtatctacctaaattccctgctgaggagctctcaggggggtttcctccagctccctccggatttgtctgcccagttggaggtttgatctgccttatccctccttcccacagcgcacaggtaaaaaaagaaaatgagctcagagaggtgccatcttttgcccgaagtcacacagcgaatgtccacggattggagggcagtggtggaattcctggcggcccttggcgcccatttgtctgcccgcttctgatacccgggttcggagaataggcctctaacaagcggcccattagaaggaattgtcactcctccgggagtgaggttgtcccattagggcgaattgtcattcctcctggagcgaggttgtcctggctccgcgaaggctgagtgccgggccgagagcaattaacgcggctccggcgcgggcagccgcctctgccccgggcagcgggggcggggcgcccggcgcggctggagccggtcacccggcgcagccccttcccccggagcccgcctttcatctccccgcgcctggcgcctacccgcagccctggcccgtctacagccttctctgcccctccccctgcccctcctagcctctgggatccggcgatccgtcctccgggttgcaaacgcccaggtctgtgctcaacgcttcacggtttactgggactgccttcaccttggagctcctggtgcgcgtgcgcggccgctccacgaagggtctccgctcctgtgacatgcagtggggaaggggaagctcagggaaggtgcaggcttaggcccaaggggaattcgagggtggctcacctcctatttgcatgactatttagggcagcttcctagcccgagacttttccctggttaggcagagatacagtctccgcctgcagtgatgtgcttgaaaagcaaatgaggtcctgctcaagttcgggagcttgggcaaggtgtaaaggtgactcttcgctgttgcggagttccgcttggaaccccactttggccgcttgcaagtgttcacggcgcataaacattattctaccaccccggagtttaagtttacagagtgcgtcctaagtgccaaagccagccctcctctctgggaagacacccaaacctgcacctttttcaggctgggaaaaatctctgttcagggatttttacaaaggtcctgctttggggttggtgaaggcgggtgatgagtccctagacaaagaaagcgttgggtaaattaatgttgcttttgatatacaagaatatttttaaactaattccccacaccttctacgttatgaaacccactgaagctaattcccataagagtcgagcagaggaatgattgcccctcagtttagagccgcggggaagacctgaaaaaatattttgagggtgtgcaaaattcttgcagcagataggctttccacgaagggctaacttccgtgttcaggctttttcagccctggtctccaccccagcagagttggagaggcgcctggcaaagggatgggggctgtctccttggcaatgcctcctgttcgtggccagagcttggtactctggaggtcaaaactaaatattccttttctccccaccgtttccctttcagtgtcttagcatttccccccaaatagtgcaggagagactgaacttttcctctgaaggagacagtttaaaaaaaaaatagagacattccaatggaattgttttgtttttttaacttcctaagactctacctgtgcccctaaagtaacacattttaaggataagttttccgattatttataaagcattggttgggttcaggacaattgaaacgtgaacttcattgtattcttcggcagctgaggactaaacgaattttagatttgcttccaaaatacataaccccacatcttgcctcacttattgagaggacatacaactcaatctgaatttacctgtattgtatttgagatccctatcatcagatgtgactccagggaaaatacatgtctccaaatcaccttcgttgtcttcttttggctttcccgggcttccagttagcaacaacaaagtacttgtatcttgtggtaggagaaagtttcacaggtttttagaagcctcatttagaacttcttatcattaaaagaaaacctttcaaaactgaactgaattatctggtgaagacttttttttttttaatcttctaagatttctacatctatgggttccctcagaccagcgagatttcactctgggtaaatgtttgaggcaaaggtccctgtttcagagaggtaagctggaaggatctggaggtctaggcagtcaagtttctaagtcttctaaactggggtacctgctaagctctggtcattgaaagcaacttggagcaatggtcctcccctttggtgctggagggagtatttagggagcatttgctgtttgggaccagcgcttagcaggctcttctttcccccaccagtccggatgggtttttggatctatgaaaaagcttctgcagcctgaaatgggttgtttgcagcgatctttctgctcctgctggcttgcgggcaagggaggtgcagaattatttcaggcctctgtctcaaaactctcttcttccatgcattgatacagttggtcactgatgctttggggctgcagttagatagagagtgtgctttagggtgggatcctgataggtatgctgcttaaaatttcaaagtcaggtgagatgagctttccccaaagatattcaggctttgggtttgcaaagtcgaaccctgttatttgcagagagaataaagacactaaatgtcacaaatacccttctcccctgcccatcacctcccaaggcagatgctatcctgacacctgaactccaatgacaaacacaaactcaaaaaaaaaaaaaaaaaaaaaaaacctcatgagcacacttttgcacgggcctagagaggagactcaaggggtgagaaaatatccccattgacagtttctaaaacttgtcctgtttggacagagtatgaaatggagatcatttgtgtaaattagctgccaggaaccaatgggcgctgggtctgctggtgcacacctacactctcaacaccagggacgaagccagtggggtagcaagttcaggaccatcttgggtaagatagggagcgacttctaagctagccagagctggagagcaagagtctgttttaaaggaaaaaaaaagggagaaagggtagagattagttgaatatcccttgaccacctctcagcctttctcatctttgtcccttttcttaaggaatgagttacagctaatgtcttggaacactctccaaagataagacaactaaggaccatgcctaaactatttctattagtaaagatgctgctattgttttccattatagttacaaagatacactagtttgagctcatagtgggagctttataaatgttccatgccctccgcagatttccaacattctcaggcgggagcgtgtgggatcggcaccagaaacactttaaagaggggttaaaagacaagaaatgagactcggcaagcttcctctttaaacaatcggctttaattacgccttagacttttcagtttgggcgattataacccttgagggatcgcctaataacaactctgctgactgctcctgtaattaactcctaatttatttcaaacggggcgggggaagggccccaagcctctccagggagagccaatcggtggcgagcgtccgtggcgtcaggagcagggccgtcgccagttggttgagccgagtctcccacttcccctcggaggacaggctgggctcccagcgcgcccctgccggctccccccccaaaagttggagtcttcgcttgagagttgccagcggagtcgcgcgccgacagctacgcggcgcagaaagtcatggcttctccgactaaaggcggtgacttgttttcgtcggatgaggagggccccgcggtactggccggcccgggtcccgggcctggaggagccgagggcagcgcagaggaacgcagggtcaaggtctccagcctgcccttcagcgtggaggcgctcatgtccgacaagaagccgcccaaggaatcgcccgcggtgccacccgactgcgcctcggctggcgctgtcctgcggccgctgctgctgccgggacacggcgtccgggacgctcacagtcccgggcctctcgtcaagcccttcgagaccgcctcggtcaagtcggaaaattccgaagacggagcaccgtggatacaggagcccggcagatactccccgccgcccagtgagtgcgcgtctgggacgggatccgggctggaccagcgcgaggggtcccagaggggctggggaacgggtgttaacaggatgatgctcttgacccccctggtaccccagttcagcgggcggtccgcatcccagaatccctagcttcgaggaatctgcagtacctgagcgctggctggcatttgaaaaccaaaccaagttgttgatttctgcagtccttagccccctgctccgaaaacttcatatttgtgtacctgcccgggaaataggggagagtcgctgttttgttttgttgagtcagggtctcctgtggcccgtgctggtatgcagctcaggatggtcttgaactcgtcatcttactccaccacctaagtactagaataactggtgtgcaccaccacaccgggctgggatccactttaaatgagtattgaaatgtggttttgctggccttcaaaatatacaggcagccccatgaagttcaccccactataaagactagacaactggaagttaaccagacatggagcagacatacttggtagtcttcgaactccagtgtccatcctatgaagggaaggtggcaggcagagactgattcggaaaggaagcttcttgtattctagtccgttgttggttaggttctgcgtgttgcagggagctagtttgggccagaccctcgtgggctctcctgggttcacagtaataattaacagcattccttcagaacttgagaatgtacagtgaggtggccacaagttcgccagatttggctgcttgctagaacctcaaagtacaggcagaggcatgccacctgtggctaccccttcagacttggtggctagtgcttagaggattgctcttgcttggtccaggttaccattcatacttgcaatgggcatgggggtctggtgtccatgctctctgccccctcttttgagggtgatggccatattgctattttcactgcaccccacttcctccagggaggctgtgccgacttcctttccagacttagcatccctttggggtccattcctgaaactttgtttttagttttatctcttggcctttgaggtttatctcttctgttgccttttttcctgcccccccccccatcaaactttgggaaagttgagaaagagggagagggattgtggagggactttcccagctcagctgggggagaacttgtcttcctttctacctttcagcccggccctctggactagagatgcaaagtattttgtgaacaaaacaagaccatatacccaggcgtcagtggctgtcccctctggctgtctctctccaccctgctggaaattctgaaaggctgaaagggtgcagagattaaggacttaaagaatttaaactccagtttgcacagtgcttttcaatacattatcttatctgatctcctttgtgcggcagccgagagcctcttgttaacagaagaggccgtttcacagcagagttcagagggatcagcagtttgggcccatggaaaaaaaagctcttgggcacattgatttgctcattaccccccaagtggggctctgggcactccaacatgtagctctctaagccacccgagggataagtagtagttatccattttattgtcagcgaaatggaggttcagaaacatgaagagtcttaacttgtttaacaaatttggagtgcctgtattcctaggcctggggcaatgccccacaacacatccaggatttcagccttaaatggtatggtggccaaaggtcagaaatcctggcatacttaggcctggcggtctggtggggcagttccccaccccaccccaccccacccccactgtgtccccgcccccactggctctgtaacatctctgcagtgggcagtttttccttgccctagataaatcctttttataagagaagctaggggctttcggaggaggtttcatttggaaacacaaggtttttgatacttgggggtggaagtgtcagcaggatgagctcggagaatgccaagaatcagctggggggggggggctggagttggagggagggacccacctacccctggccctggttttgtggtttgaagaaagcgggataaaaagtttgtttcaccttgtttaatcacacactttctttggctggtataaaatgggttagggggaagaaggtgggagcgatgggggaaagattctcctggcaaggctttgccatctgagcacagtccccatggcccgaactttataagtcaccatggcccacaaagagtaacccaagctaccctggttcaaaactcctgtagaaccagcagcaagtgtatgcagtaagagtttggtgtctgaaagggagcctgggtgggctcgggaagggcgagaattccttgggtctccagctctgatgttggccagtgagctgagaggaaaatctcccctgcccttggctcagttggggattagcacgtgcgaaggaaggccaggcctttaggaagtctacccatctctctcccagactgctgtttttttctgatcacagtaccttctactctgtaaaattaacaatgtgacataggggctgggttgggacttgtgctgtgtcactctcaaagatgaaatataaattcttctttgggccaccaaagtaactaaacaagaaatgttacattcccctgcatacaccagcactagcactctggctacattagggaaattagactggctcgtaaaagccaaatgcagaaaaataattgtttagtattctattcttgtcgccttatgctcctcccctagcctcaaggaaaacaagaccagaattagtccctgctgtggaatcaccttgaggccccatccttgtgctaacaacccatcttaaaacagagtccggacgctgcctcctgtctctattttgcttgttattccccacttctaaattccaacaacaaaataattacttatccacttgccctaaaccatggaatggatagaagagagtatgatgccatcaccatcattgcaggcagagagatttcccttgacatgtccgtttatgagcgagctaattctctctccgtcttcgtgacgtttatattgccaaagcacacagccaagaaacttatcccacagccagatctgtaaagtgatgttggggtttttatcatctgtagggtggatgcagtgacagctgtgtggttgtttatggcttggatcggcccttccatccattgatgctatttgtttatcacaggccttatctggatgattgtgcttcataaacaggcttgaggcaacccaacttttctggttcagagagcagttggaggctaactcagtatctggcatcctatttatgttcctcctgatgtgcgggtcttactgttttaaagacaggagattgagttctgaggaagttttatttcttagatagttcttaactcttgtgacttatagtcatggtttctatttccattttgtacagtgcaatatgttttccatataaaaagtttcatgacctcattactcacgctgatataaaatacagcaactacctaccatttaaatgtggtcctttttcataactgactacttctcacacacacacacacacacacacacacacacacacacacacacacacactcacagatttgacaaaggtacctcctttttaaaaatgaaacaaagtctatgtgttcttaagagggaagagattacaaaattcactaattgatttccctctctgtcctctaggacatatgagccccaccacctgcaccctgaggaaacacaagaccaaccggaagccacgcacacccttcaccacatcccagcttctagccttggagcgcaagttccgccagaaacagtacctgtccatagcagagcgggccgagttctccagctctctgaaccttacagagacccaggtcaaaatctggttccagaaccgaagggctaaggcgaaaagactgcaagaggcggaactggaaaagctgaaaatggctgccaagcctatgctgccctcaggcttcagtctgcccttccctatcaactcacccctgcaagcagcatccatatacggcgcatcctaccccttccatagacctgtgctccccatcccgcctgttggactctatgccacgccggttggatatggcatgtaccatctatcctaaggaagaccagatggaccagactccaggatggatgtttgcataaaagcatccccctccctctccgagaaggtggtgccaactctgctcctgaatgcgagccttgcattgtcaccctaagcgacagggccacttgatacagagtgaatttgttatttaggtgagaggcactaagacctgttttgttttcataattttccaaatgccccctttcctctcacaaatattggctctgctagtttttatgtataaatatataataaaatataagactttttatatgccagatgtaaaaattcaagttattttaaaaggcaaaatttatatatacatttatccattttctttttttttctagatagcatcttcctaagatattgtgttaagtccatttgctacattttcttaaagggaaagagattaattgcagaatttgcaaggatggtggacttgcttatggaaaacatagcagaagtagacacattccatacaggatgtcacttcagacagattcttgcaagtgaagggggaggtgtaacgtgtttatttgcatttctgtgcacaagaaaaagaaatctcttgatgcacatttgatcctattttttttctctttttctccattccatattattaaatctttgttgttgttttaagatcgatgaaaagaggatgagaataactctgagagttactcagggtaaagtagaaaataggaaactccatgtcaggtccctggagtgagagggggttagaaggtgaaatattgtttgtaagaattgatttctatgaaatgctatctacatcagtcctcacacggtacagaggtgattggaagaggacatggtaaatctcttcttaaaaatgagtgtcttataactgtggcctatattttaaatattcttcaacagtccatagaatgaggaaggaaaacatgccttctctctctctctctctctctctctctctctctctctctctctctctagctctctctgtgtgtgtgtgtgtgtgtgtgtgtgtgtgtgtgtgtgtgtgtgtgtgtactttgtgtgctaaacttcttagggaaatttatatactctaacgtgttgggcagatggagaagccatgtgcttgagttgctggagatggcgttgtcagtcagcacctgggtgtctcaccttcctgtccatctcttcccccagtatatttttatcccgttgaatgggtatcttgtataattttatatattttattgaagagttatttcttatctcttactctgaattaaattaaaatattttattgcagtaaagtctgtcccaactcacaattatttttaaaagcactctaatcttagctggattcaggggggaaccccatccagataaggaaggggggattggcgcttttaattgctccattaatgtaaatcaaatcaagttgtggccagatttgggtggtagaggctcaaaccccgggggacccttggaaatgtcaactggcagcctgtacggtttaggaagaagctgttgaaatcgccattaaactattaagctgtagtaaaaatgagctttcaagacgtagagaagtggtgctctctagaatccgaccgtggtcctgggaaaatcttgaacttggaaattcgcaaccaccaaaacaacttaagagctgagaaaggggggagggcagaaagaaggctcgcgagggccggaaaggatgcaggggtttgtcgggcagggctgtccgtgttgtgtctcttgttgacgagcaactccaaaagagcccgttttactcttagaagagggcaaaccagcccacctaccccaagagagcctaggtgccctccctgcatcaggcttgggttttgacgcatagccataaaacaaaatagtaaaggtcggggaggctgagaaggattttaaactcaagttttctgctgtggtggaaatgcctttctattttccttttgtcactttggggacacggagatgaggggagaaagaacttggtggggtgaggactgtgcagtggagaattgggcacttctcggggagttgccagcgcttggcactcactttggagatgggcgccccaaaacttccgtttctgtgagcccggagctagctctaggtggtcgcgctcctttcttagatccaaaccaatccggcacactttgggagctggatcacagggtcctcctgagccgcgggcgggtcccagagccagcaaaaaaaaaaaaaaaaaagtttctgcttcgggtctttcggtccctcaagtccaaattccaggccggaatctgccacactcatttaagagatgcgtttcccaaaggccaaagaccttcctggtttcatcatcagccgccaaggagggtaggggggtccctaattaccccgtccaccgagcttccttcccggcgccatggaccggtcacctcgggcggtgatagctggggtggggacctggagacgctggcctttgggttaaggcacagcttgcctatctaggtagtagctagactaagtccggagtaggattccaagagcccagtttggctactccggtaaactggaatcgggcttgccggacatcacgcacgtgatcccagatccaatactcagaaaggaaagccgggaaaggatttgatctggctcaaaagatctgcgctaccgagtgactgggctttccaggctgaggtcggcgggacaaaactgtgcgctgtggtctgggctgcttaagaccttcctgcctaggatgggtctctcctctctcaggcctggtcctgcaaacagggtgtttcagagatcagactggcaacctgtgaaggctaggagaccttcgcttgcccaggacccacatggcagattggaaaactcacgcaccatgctcctgcggagtcttacgatctctgtatcgactgccagtagcctggcatacaaatacacctgcccgtccatactttaatgctttctacagggcaaacaaacaaacaaacatctttgcaggtaggaaacttcgctttaaaaaaaaattaggggtgaaggagcaggagtttgcatttgtggagccgaggagcctgtgtttagggaggacggaggcatttttcttgaactattattattccttaccgcatcccttgagagaggttatgcttgtcacaggggaaactgacgcccagagagatagctcactagaagtcacagaacttgttgactgtggcgatgcgttgggaatgcagttgaagggtgagcccagaaggtggtgaacaacgaaaggggaggcagagcaggggagctcagaaagtaggtaggggtctggagggccggctttagaattatgcaccagctctggtccctcattgcttaggggcttccccaggacatctccattccattggccctgggggcccagcccgcccctcccccctctcggtcgtgccttggtgatgcgggggcaggggctgtaggaggtaggccgccgaggcctggctgagagcgggagccggcgaaacgtctgcctgacccgactgaaaagaggatgcctgcctttgagcgcaaccttgtctgaccgaatgaaaactcccacggccattctttgctatgaaagcccctcatttgccacgggttggagaggccattgccccaccccccattccttttccactgccgggctggaaataagcataaacctcatttataaaggaacccacgtcacacacacacacaccctccccaaaatcacagggcctggttggtgaagtcgattgtgcccgcttcccctttcatgtaagaacaacaaaaaaaatctgagattgctgatgctacaggccgctttaatgaaatagtcacagcaaggaggaaaagccttctatccacccgcccccccccaaaccaggcccctatagctgcccctcaccccacactctctccccttcaccctcccagaacaaaatgagccacagtaaaatgactttctgaaatagccccgcttcaaagcggagcaaaggactcgctttcagactccccaatgaacgctggcccgataaggtcctaatagccaaatccaaactccgtacacctctgactttccaacctcttccaaccctcgcagcgtttgttgatgaaaacactttgatgtcctgagtcctccaaacaattattattataattttaaacaacctggtattttccattactaacggctcaagctttgaagttacacctcataatttcctaaattaaataaatcattttaagtttgcactgggaggcttttaatagcagagaaaggaatatcattatcttattgagacccaattgtggtggctccagctaggctgtagctaggggcaaagcagactcagtctaacagacatactttattaacctcccataactcttgaaagaacagttttatattttctttgatttccccctccctctcttattttaaagctgtcccaacctttaattagtgcttaatatgaaaagcattatttttttaatgctatgtaatttaccagcggcaacaggccaacttaacaattgtttattagacttggtttttcacacagggcaaagaatgccgctccaaacccaacttttcatggctggttgcactaattaatacagtgtctgaagctcctagagttttgtttttttttttttttaatattgaagcatatgagggtggagggggtgtgtttcaaagttcagctcctgccgacgacagtctctgatttcttgaatcatgctgttttgtcctgtctgtgaagttaacacagacagaaactgttcccgggcaccccagacgctgagatcccagcaacagcaagagaaccctggacacctctgcttgtgatttatgacttttggggccaggcttgggggctcggggtggggggtggtccgttccgggcttagggtggggttacccctcatccagtctgtgagggtgcagagctggcctgatgccttggtctgggcaagcaaatgccgggagtcccagaccctagagagtgcttggcattgggcatagaatttgctaggctgaggcagggactatggcaaaggggtggaatgaaggacaggctgagacccaggcctgtggctctgccaccaatgtgacccttggcgtctttctccttcctcattcttttgtcttacttccctttcacatcttttgttcctcccccaattctttaccctctctttctgtcgttccttttttataatcttccgctccttaatttttcttgcccagcccactctatgtctcgttaattttctttcctgcctccgatttgattttgatgcgctcatcccggtaacttctccctcccactcttttcttccctcctccttctctcaatctcccacacccccgttttctaaattagtcccaaccccaccctctcttcccctcttctggcttccactttttcttctgtccgggcagctcagagctggcgggtgccccgcactccggagcggttcagcgcagggtggctcggcactgcgctctctctcggtctgcacctggctagctagcctcggaccgaccggggcgcgggaaggggccacgactccgggcagaaggacagagtccgagcgcgaggcccctcccgtccctccctcagccagccgcccgtttgaagtcgcgagccgggcaggaatgcagtcgggttatcaatcacccagctggatcccgaaggtctcagcctaatcacatttaattgctcgtggaggcccattctcgcccccggctcgccgccgcgctcaattactccccaaatacctgccatcaataaatgtgcactgacaccgggcctggcccgctccactagcccaagagatcccagccgaccaggtaccctcgaccccgcctcaacgccatcgttaaaatttacacttcaaatcctgatggaataggccacgcagaggacacctccccaacccccctagatcgaacgctccccaagtggcggacattgatgctcagagacttacatccatcttctcctttaagggaatcaggtttgggtcgagcgttagtgtgcctgaggtggtcaagacagtccaactagggtgaaaccttgccacccctccaagccaccgctgctggagggaaagcacgagacaacagtgcctcccagaggccggcgatttgcctcttcctccctcgcggtggccaggtaacttggccagcattcaggtgcctatctcctgctggctgcttcgcgaagtaagcatgcgcgattgggttcatttttcccagggaggccgaggcacgaactgagctgggaagatctagccccgtgactgaagccctaggtcccctgcctaatgttagaggacctgtagctgctgtccattcccgtccagccccctcactgttaaactcacagaaatcatggtctcctctctccctctccttgccccctcactatagaaaattcctcctaagaattgcacagacctctctgtctgcctctctttgcactgcccaaatcacacagcaggtgagctcagaacccagaaatccacacagctcaagaagtgcccagccttttgcttgccatcaccctcctgctgagaatcttccttttaaaaagtctgcacactgtctttctttgtggtttccctttcaggaggagttggtaattacatagtatctatacaagacaaaggagttctctcctaagcaagcctccctactttctttattccacccctcccactgttgtttgaagttggttagtagccaggtagcgaccttgaactcctgatcctcctgcctcaggaggttgggattacagacgtacactacagtttcccagctgccatatacttacacacacacacacacacatttatagacacatatattacagaataagttttagtatctaaaatgccctatgttcaatgtgaaatattatctttatcatatagaaactaactctggccttccaaaggcagagccaaggtgggcagctgtaaaaagtacgttttagctggcttgcgttatatctggtcccttcatttgctcaatcattctttctttctttcccaagtatacaggttcctcaaaggggtttctgtactgctgggcatgccattttttaaggggggggatttgggcaaagttttgcccatctttatttcaatgctgaaatcactcctgactttgtaaggaaattctgtatgaactgcgtggtgcctcctaaggtcccctctcagaaagtgacctagaaggtggtgctgatagatggatggggctgttattgaggttaaattggccatttagggaaagtccaaaggctgctgtgcatagcctggctggtctttgtggttgggtttctctttgtttagctagcagtgagagcagagaggagacaactaggaaatcccatggggtggctgaggggaatatgatcctgaacttgagaattccaggaaagcaactatatacagttgatggatgtgggctggggacagagaagtgtgcatgtactcactgcgtgcactcgagaacgaacacacacacacacacatacacacaccatgatacctccccgtaacatcttccggtgagctggggcagtgccaggtggctactacatttgagagttggttttcagatctaatgtgttcttgggttagggatgctaatgccttttctggctactggtaagtcacagcccactttgatgaaaaggaaaatttgtccttttatttttaggtgtccctagccatagtagcaagtgaatagtaatgaacttggggccccagaaggacagattctgctagagaggaggcaagatatttgtaaggcttagggcaaataaaaagtggagtcatgctaagacatctttctcaggacatcaaggcccacattttctccatatgctatccctgcctatatctgggtcaagaaagtgatacccttaattttttagaaggaaataaatgtggtaagtctttggagtacaaaataactgtctatgactctgcctatctatctgttggtatatctaactacctaccagtcatctatgcatgtgctggagatgactccagggtcatcttgcacatgctaaactcttgttctcccattgtgctacagacccagccacagtgatgctgacagcatgttactttgctctcttaagtcagcagcaaacccaaaattcctttgtcctggctaacagcctacaacagcgatcctgaacctctgatgccaaatgagcatcctgaaattctctagtcaaaaataactgcgttcacttcaacttttaggaaatgcgttgttcagcctctgccacactcattgggttaaattacttaattggcttagatcagtaatttcactttcacccacatagcaactatcacccctatgtattatatatggaaactgacacaccccccaccccccccaccccccacccacccacccacccaccccccccccccccccccccgctccaggattgcctgactatgatctcacaactgagtggcagactgagaacaactccagaggaacaagcttttggtttttgtttgttggtttttgtctgtttgttttttgttctttgaggcagggtttctctgtgtagccctggctgtcctggaactcactttgtagaccaggctagcctcgaactcagaaatctgcctgcctttgcctccgctgggattaaaggcgtgcgccaccaccgcccagctgaggaacaagcttttaaggcagctactgccaggcctggggtggggttcaatggcagagcactactcagccattcgtgttgcacagtctgtgtgaaatacagaattaagtgagaccctcctaagttagttattaggtgtctgtagagagcttcctctgagttgttttaagactatgactccgtgtcaggatacaagagttccaactctggccaatctgatctagcttgggaagaagagaatctagggaaataattctcttctgtcccttctcttggattcctccttcctctcctttgtttggttttgtttggttggtgtttgttgttgttgatgctgttgttattactgttgttttgttgaccttattctcagactacaacccaggctggccttgactctctgggttcaagccttcttcatcagtttccatcccattgagcttgacaatgtcccttgcctgtgcttaaaggctgggttttctcccctgtcgtgtgggagggcccagaagaaggaagatgcctgcctttcttaccggtttccatcatcctttccctctcactctctgccatcgcaaggccagttctgggactcagaagtaaatttctccccttacggaaattagctgggaagtccaaggcacaatttcagaatcaaaggggtcattgctattatactgaactatgttcagctcaaacactctctaggcagtggcaggactgtgacttttcaggacatgaagacacaggttgcagggtaaagatcttgaggacagtgaacctcgcgaagtgtaacttctgcctctaggtcatggcaagaaaaagaaaaccacgctcagatctccacatcacatacatatcagtaattcatagaccctgaaagtcgcttctaaaggctgctagtccccccaccacttatcagagtccagatttcaaacccctggggcagaatgaggtctcccattactaagccttcatcactcccccaactatataacaggccatttgccagggggttatgaaacatgatcataaattaaaactaagtaactcccgtaaaataagtggacaaagagcactctgtaaggctgaggctccgttttgactgtgctcgctcatttatttgggtacttacaccggtttcagaactcaggtaactccatgtattgtaaatctatggcatggggactgctcctgcaaagctttatccaagagtcatctcaggcctgattgtaagaagtgccactcaggtgtcccttcatactttgcaaagtcatttgtgttatttctgccagctgggtagcttgcctgcaagactgggaccgcagagaggggagggggcctgagctgctcacaagagtggagatgtcaaggtgcaaacagaaaactcagcatgctttggaacaagattgacatttcggtgtttgggaagcggagacaacagaattgctgtgagtttggtgagttccaggccagccaaggctatataacaagtctcaaaataataatcaataataataataatatcaggtttactttaaagaggaatttggagctagcacaccatggctggtagagaggtagtgtacgggttgatagaatattcattcactcatttgcagttagttcagtagacagtggtaagtagctactagttgtgccactgtgacctcacacacaccatactttgatgtgagatgcacatactctccagaatacacaggatgactagacacgaaatctcagttctaccactaccacattcaaacgtaggggagtgctagagaaatgtggtggttatcactagctttcctttttgatcccagtctctttccttatgagccttcccctctctttctctctccctccctccttccctccccctcttccttttttttttttaaagatttattttatttattatatgtgagtacactgtagctgtcttcagacactccagaagagggcatcagatttcattacagatggttacgagccaccatgtggttgctgggatttgaacttgggacctttggaagagcagtcggtgctcttaaccgctgagccatctcaccagccccccccccttcttttctttcagttgtcagaaaactcatcatttctacctcctttaaaatgtacagctcagtgacgtgaggtatattcaccaggttgtacagccttcattgctattggctctagagctaacttatttctttgttgggtgccagggcctcatgcatgcctatccaaccatgcggatgctctacttctgagccatatctccagctcccaggttttttatctttcaaactccctgtcaacaacggggcctacttccctgtaggccccgaagaccattgctcggctgtctctgtgagtttgattattctaggtacttcccacaagcagagtcctgcgacatttaaccttcagtgtctggcttattttaattaacacaatgtactcaaagttcatttgtgtgatatgccgtgtctgactttccttccttcttatggtttcttgatctttcattgcataggtagagacattaaagtctattccatgttcaaagttatgtcctagggtcatcagcatgagatttaaaactcactatccaaggaggactttctccaggttaagcatcatggatatcatttaccaggtactagcttacattgtgttctaaatacaccccccaagtgctgttatcattccacatggtatgagtgaactggtgttcaagcacgcgcatgtacatgcgtggctgtgtgtgtctgtaatgatacgttattcatgtaatgttacagcttagcactatagtttggtaggaaaaaaaaaaacactccaagtttctcagtattttccaatccctggcatgttcctctttgagatgcggggacaataaatcagtagccccacaaatccgagttttaatgttttaagcatacttctagcaccccgcatgctggaaaatctgaatggctaactttcttcattgaatactatagtgcactaagtttaacggtgctcacgaagtactagagccaacaggaatattcagtaaagccgctaactctggtctatgtctcctggtgaggtggcagcctctcgtggaatcacaagtggacaccgcccacttggggactgattctctgttgacaatgggccctgagaggcccatatgcaatgtccacacaacagcgcttagctctgggggttgctgtgagactacaggaagacaagaggcagcagatgtttcacagtgcttgacttggagagaaagccctcactgtatagtgtgttttgtgcctgttaggactcatctttgggatagatgtacgactctctcaaatgggcaggaccagggcctgatggagcatgattgcaagacgggacttcgctgaagaccaacaactaaaatttgttagtttccctggtgcctagatgggagacaagctgaaaaaatgtcagggtacaggaccacaactgggcaacaccaccagccacctcattttgcaaaagctagctggggaaagtagaagttctagcagtttctctagtataggtgaacagatctgtcacccttcctcagtctaccacagaactgggtacatgttgcacggacagaacaaactataatgatatgtttttaaaaatagaaatttgttccttacatttctggggatgtaggttcgaggcactagtgtgttttgggagaggggctgctctctgcctccaagagtctccttgttgtcatatccatagctggagtgcgtgtcctcggatggcagaagggaggggaaggcgaaagggctgcactccttctttcaggcccctttattaaggtgctaatcccatccttggtggagaaggtgctaatctcatccgtgacagcagagccctgaggcctaatcactgtcaaaaggctccaccttctaatcctgttgtaatggggattaagtttcaacaggaatctctccagaggagaagacacagacattcaaaccatagccagccccaaataagcacggcatgagttaagattctacagtctctccctctctccccctccgtccccatcttatgacatgctgtctgatgagagtctgaaagggtggaagtgagccgtgtgccagtggggatcatagaaacagaaacgccagcgtcaggaatctcagagcgcaaagccttcccggctctgaaagacagcgagagccccccggtcccgaagacttccagtctgtgctgtggtgtggcttgaagaggctgtctcatcaaagacccttccaacaagcatttaaaatcatccatccaaaagataactaaatcgtggccattcattcctctgaacccatcaacgcttcgatgaaaacatgtatttaactggggaaacactgggcgctcactctcgctggcctcttgttcccttttcttctctcttccattgagggctcaaaatgttatgattcatttcagcctgcccaaagcagcagtgaattacagaccccagagttccgaccgcaaggggtcctgggtaagattgccaccaccacccccgcccccatcccagcgttctct

SEQ ID NO: 80 - DNA, 29900 bp, Mus musculus
agagaacgctgggatgggggcgggggtggtggtggcaatcttacccaggaccccttgcggtcggaactctggggtctgtaattcactgctgctttgggcaggctgaaatgaatcataacattttgagccctcaatggaagagagaagaaaagggaacaagaggccagcgagagtgagcgcccagtgtttccccagttaaatacatgttttcatcgaagcgttgatgggttcagaggaatgaatggccacgatttagttatcttttggatggatgattttaaatgcttgttggaagggtctttgatgagacagcctcttcaagccacaccacagcacagactggaagtcttcgggaccggggggctctcgctgtctttcagagccgggaaggctttgcgctctgagattcctgacgctggcgtttctgtttctatgatccccactggcacacggctcacttccaccctttcagactctcatcagacagcatgtcataagatggggacggagggggagagagggagagactgtagaatcttaactcatgccgtgcttatttggggctggctatggtttgaatgtctgtgtcttctcctctggagagattcctgttgaaacttaatccccattacaacaggattagaaggtggagccttttgacagtgattaggcctcagggctctgctgtcacggatgagattagcaccttctccaccaaggatgggattagcaccttaataaaggggcctgaaagaaggagtgcagccctttcgccttcccctcccttctgccatccgaggacacgcactccagctatggatatgacaacaaggagactcttggaggcagagagcagcccctctcccaaaacacactagtgcctcgaacctacatccccagaaatgtaaggaacaaatttctatttttaaaaacatatcattatagtttgttctgtccgtgcaacatgtacccagttctgtggtagactgaggaagggtgacagatctgttcacctatactagagaaactgctagaacttctactttccccagctagcttttgcaaaatgaggtggctggtggtgttgcccagttgtggtcctgtaccctgacattttttcagcttgtctcccatctaggcaccagggaaactaacaaattttagttgttggtcttcagcgaagtcccgtcttgcaatcatgctccatcaggccctggtcctgcccatttgagagagtcgtacatctatcccaaagatgagtcctaacaggcacaaaacacactatacagtgagggctttctctccaagtcaagcactgtgaaacatctgctgcctcttgtcttcctgtagtctcacagcaacccccagagctaagcgctgttgtgtggacattgcatatgggcctctcagggcccattgtcaacagagaatcagtccccaagtgggcggtgtccacttgtgattccacgagaggctgccacctcaccaggagacatagaccagagttagcggctttactgaatattcctgttggctctagtacttcgtgagcaccgttaaacttagtgcactatagtattcaatgaagaaagttagccattcagattttccagcatgcggggtgctagaagtatgcttaaaacattaaaactcggatttgtggggctactgatttattgtccccgcatctcaaagaggaacatgccagggattggaaaatactgagaaacttggagtgtttttttttttcctaccaaactatagtgctaagctgtaacattacatgaataacgtatcattacagacacacacagccacgcatgtacatgcgcgtgcttgaacaccagttcactcataccatgtggaatgataacagcacttggggggtgtatttagaacacaatgtaagctagtacctggtaaatgatatccatgatgcttaacctggagaaagtcctccttggatagtgagttttaaatctcatgctgatgaccctaggacataactttgaacatggaatagactttaatgtctctacctatgcaatgaaagatcaagaaaccataagaaggaaggaaagtcagacacggcatatcacacaaatgaactttgagtacattgtgttaattaaaataagccagacactgaaggttaaatgtcgcaggactctgcttgtgggaagtacctagaataatcaaactcacagagacagccgagcaatggtcttcggggcctacagggaagtaggccccgttgttgacagggagtttgaaagataaaaaacctgggagctggagatatggctcagaagtagagcatccgcatggttggataggcatgcatgaggccctggcacccaacaaagaaataagttagctctagagccaatagcaatgaaggctgtacaacctggtgaatatacctcacgtcactgagctgtacattttaaaggaggtagaaatgatgagttttctgacaactgaaagaaaagaaggggggggggctggtgagatggctcagcggttaagagcaccgactgctcttccaaaggtcccaagttcaaatcccagcaaccacatggtggctcgtaaccatctgtaatgaaatctgatgccctcttctggagtgtctgaagacagctacagtgtactcacatataataaataaaataaatctttaaaaaaaaaaaaggaagagggggagggaaggagggagggagagagaaagagaggggaaggctcataaggaaagagactgggatcaaaaaggaaagctagtgataaccaccacatttctctagcactcccctacgtttgaatgtggtagtggtagaactgagatttcgtgtctagtcatcctgtgtattctggagagtatgtgcatctcacatcaaagtatggtgtgtgtgaggtcacagtggcacaactagtagctacttaccactgtctactgaactaactgcaaatgagtgaatgaatattctatcaacccgtacactacctctctaccagccatggtgtgctagctccaaattcctctttaaagtaaacctgatattattattattattgattattattttgagacttgttatatagccttggctggcctggaactcaccaaactcacagcaattctgttgtctccgcttcccaaacaccgaaatgtcaatcttgttccaaagcatgctgagttttctgtttgcaccttgacatctccactcttgtgagcagctcaggccccctcccctctctgcggtcccagtcttgcaggcaagctacccagctggcagaaataacacaaatgactttgcaaagtatgaagggacacctgagtggcacttcttacaatcaggcctgagatgactcttggataaagctttgcaggagcagtccccatgccatagatttacaatacatggagttacctgagttctgaaaccggtgtaagtacccaaataaatgagcgagcacagtcaaaacggagcctcagccttacagagtgctctttgtccacttattttacgggagttacttagttttaatttatgatcatgtttcataaccccctggcaaatggcctgttatatagttgggggagtgatgaaggcttagtaatgggagacctcattctgccccaggggtttgaaatctggactctgataagtggtggggggactagcagcctttagaagcgactttcagggtctatgaattactgatatgtatgtgatgtggagatctgagcgtggttttctttttcttgccatgacctagaggcagaagttacacttcgcgaggttcactgtcctcaagatctttaccctgcaacctgtgtcttcatgtcctgaaaagtcacagtcctgccactgcctagagagtgtttgagctgaacatagttcagtataatagcaatgacccctttgattctgaaattgtgccttggacttcccagctaatttccgtaaggggagaaatttacttctgagtcccagaactggccttgcgatggcagagagtgagagggaaaggatgatggaaaccggtaagaaaggcaggcatcttccttcttctgggccctcccacacgacaggggagaaaacccagcctttaagcacaggcaagggacattgtcaagctcaatgggatggaaactgatgaagaaggcttgaacccagagagtcaaggccagcctgggttgtagtctgagaataaggtcaacaaaacaacagtaataacaacagcatcaacaacaacaaacaccaaccaaacaaaaccaaacaaaggagaggaaggaggaatccaagagaagggacagaagagaattatttccctagattctcttcttcccaagctagatcagattggccagagttggaactcttgtatcctgacacggagtcatagtcttaaaacaactcagaggaagctctctacagacacctaataactaacttaggagggtctcacttaattctgtatttcacacagactgtgcaacacgaatggctgagtagtgctctgccattgaaccccaccccaggcctggcagtagctgccttaaaagcttgttcctcagctgggcggtggtggcgcacgcctttaatcccagcggaggcaaaggcaggcagatttctgagttcgaggctagcctggtctacaaagtgagttccaggacagccagggctacacagagaaaccctgcctcaaagaacaaaaaacaaacagacaaaaaccaacaaacaaaaaccaaaagcttgttcctctggagttgttctcagtctgccactcagttgtgagatcatagtcaggcaatcctggagcggggggggggggggggggggtgggtgggtgggtgggtggggggtggggggggtggggggtgtgtcagtttccatatataatacataggggtgatagttgctatgtgggtgaaagtgaaattactgatctaagccaattaagtaatttaacccaatgagtgtggcagaggctgaacaacgcatttcctaaaagttgaagtgaacgcagttatttttgactagagaatttcaggatgctcatttggcatcagaggttcaggatcgctgttgtaggctgttagccaggacaaaggaattttgggtttgctgctgacttaagagagcaaagtaacatgctgtcagcatcactgtggctgggtctgtagcacaatgggagaacaagagtttagcatgtgcaagatgaccctggagtcatctccagcacatgcatagatgactggtaggtagttagatataccaacagatagataggcagagtcatagacagttattttgtactccaaagacttaccacatttatttccttctaaaaaattaagggtatcactttcttgacccagatataggcagggatagcatatggagaaaatgtgggccttgatgtcctgagaaagatgtcttagcatgactccactttttatttgccctaagccttacaaatatcttgcctcctctctagcagaatctgtccttctggggccccaagttcattactattcacttgctactatggctagggacacctaaaaataaaaggacaaattttccttttcatcaaagtgggctgtgacttaccagtagccagaaaaggcattagcatccctaacccaagaacacattagatctgaaaaccaactctcaaatgtagtagccacctggcactgccccagctcaccggaagatgttacggggaggtatcatggtgtgtgtatgtgtgtgtgtgtgtgttcgttctcgagtgcacgcagtgagtacatgcacacttctctgtccccagcccacatccatcaactgtatatagttgctttcctggaattctcaagttcaggatcatattcccctcagccaccccatgggatttcctagttgtctcctctctgctctcactgctagctaaacaaagagaaacccaaccacaaagaccagccaggctatgcacagcagcctttggactttccctaaatggccaatttaacctcaataacagccccatccatctatcagcaccaccttctaggtcactttctgagaggggaccttaggaggcaccacgcagttcatacagaatttccttacaaagtcaggagtgatttcagcattgaaataaagatgggcaaaactttgcccaaatccccccccttaaaaaatggcatgcccagcagtacagaaacccctttgaggaacctgtatacttgggaaagaaagaaagaatgattgagcaaatgaagggaccagatataacgcaagccagctaaaacgtactttttacagctgcccaccttggctctgcctttggaaggccagagttagtttctatatgataaagataatatttcacattgaacatagggcattttagatactaaaacttattctgtaatatatgtgtctataaatgtgtgtgtgtgtgtgtgtaagtatatggcagctgggaaactgtagtgtacgtctgtaatcccaacctcctgaggcaggaggatcaggagttcaaggtcgctacctggctactaaccaacttcaaacaacagtgggaggggtggaataaagaaagtagggaggcttgcttaggagagaactcctttgtcttgtatagatactatgtaattaccaactcctcctgaaagggaaaccacaaagaaagacagtgtgcagactttttaaaaggaagattctcagcaggagggtgatggcaagcaaaaggctgggcacttcttgagctgtgtggatttctgggttctgagctcacctgctgtgtgatttgggcagtgcaaagagaggcagacagagaggtctgtgcaattcttaggaggaattttctatagtgagggggcaaggagagggagagaggagaccatgatttctgtgagtttaacagtgagggggctggacgggaatggacagcagctacaggtcctctaacattaggcaggggacctagggcttcagtcacggggctagatcttcccagctcagttcgtgcctcggcctccctgggaaaaatgaacccaatcgcgcatgcttacttcgcgaagcagccagcaggagataggcacctgaatgctggccaagttacctggccaccgcgagggaggaagaggcaaatcgccggcctctgggaggcactgttgtctcgtgctttccctccagcagcggtggcttggaggggtggcaaggtttcaccctagttggactgtcttgaccacctcaggcacactaacgctcgacccaaacctgattcccttaaaggagaagatggatgtaagtctctgagcatcaatgtccgccacttggggagcgttcgatctaggggggttggggaggtgtcctctgcgtggcctattccatcaggatttgaagtgtaaattttaacgatggcgttgaggcggggtcgagggtacctggtcggctgggatctcttgggctagtggagcgggccaggcccggtgtcagtgcacatttattgatggcaggtatttggggagtaattgagcgcggcggcgagccgggggcgagaatgggcctccacgagcaattaaatgtgattaggctgagaccttcgggatccagctgggtgattgataacccgactgcattcctgcccggctcgcgacttcaaacgggcggctggctgagggagggacgggaggggcctcgcgctcggactctgtccttctgcccggagtcgtggccccttcccgcgccccggtcggtccgaggctagctagccaggtgcagaccgagagagagcgcagtgccgagccaccctgcgctgaaccgctccggagtgcggggcacccgccagctctgagctgcccggacagaagaaaaagtggaagccagaagaggggaagagagggtggggttgggactaatttagaaaacgggggtgtgggagattgagagaaggaggagggaagaaaagagtgggagggagaagttaccgggatgagcgcatcaaaatcaaatcggaggcaggaaagaaaattaacgagacatagagtgggctgggcaagaaaaattaaggagcggaagattataaaaaaggaacgacagaaagagagggtaaagaattgggggaggaacaaaagatgtgaaagggaagtaagacaaaagaatgaggaaggagaaagacgccaagggtcacattggtggcagagccacaggcctgggtctcagcctgtccttcattccacccctttgccatagtccctgcctcagcctagcaaattctatgcccaatgccaagcactctctagggtctgggactcccggcatttgcttgcccagaccaaggcatcaggccagctctgcaccctcacagactggatgaggggtaaccccaccctaagcccggaacggaccaccccccaccccgagcccccaagcctggccccaaaagtcataaatcacaagcagaggtgtccagggttctcttgctgttgctgggatctcagcgtctggggtgcccgggaacagtttctgtctgtgttaacttcacagacaggacaaaacagcatgattcaagaaatcagagactgtcgtcggcaggagctgaactttgaaacacaccccctccaccctcatatgcttcaatattaaaaaaaaaaaaaaacaaaactctaggagcttcagacactgtattaattagtgcaaccagccatgaaaagttgggtttggagcggcattctttgccctgtgtgaaaaaccaagtctaataaacaattgttaagttggcctgttgccgctggtaaattacatagcattaaaaaaataatgcttttcatattaagcactaattaaaggttgggacagctttaaaataagagagggagggggaaatcaaagaaaatataaaactgttctttcaagagttatgggaggttaataaagtatgtctgttagactgagtctgctttgcccctagctacagcctagctggagccaccacaattgggtctcaataagataatgatattcctttctctgctattaaaagcctcccagtgcaaacttaaaatgatttatttaatttaggaaattatgaggtgtaacttcaaagcttgagccgttagtaatggaaaataccaggttgtttaaaattataataataattgtttggaggactcaggacatcaaagtgttttcatcaacaaacgctgcgagggttggaagaggttggaaagtcagaggtgtacggagtttggatttggctattaggaccttatcgggccagcgttcattggggagtctgaaagcgagtcctttgctccgctttgaagcggggctatttcagaaagtcattttactgtggctcattttgttctgggagggtgaaggggagagagtgtggggtgaggggcagctataggggcctggtttgggggggggcgggtggatagaaggcttttcctccttgctgtgactatttcattaaagcggcctgtagcatcagcaatctcagattttttttgttgttcttacatgaaaggggaagcgggcacaatcgacttcaccaaccaggccctgtgattttggggagggtgtgtgtgtgtgtgacgtgggttcctttataaatgaggtttatgcttatttccagcccggcagtggaaaaggaatggggggtggggcaatggcctctccaacccgtggcaaatgaggggctttcatagcaaagaatggccgtgggagttttcattcggtcagacaaggttgcgctcaaaggcaggcatcctcttttcagtcgggtcaggcagacgtttcgccggctcccgctctcagccaggcctcggcggcctacctcctacagcccctgcccccgcatcaccaaggcacgaccgagaggggggaggggcgggctgggcccccagggccaatggaatggagatgtcctggggaagcccctaagcaatgagggaccagagctggtgcataattctaaagccggccctccagacccctacctactttctgagctcccctgctctgcctcccctttcgttgttcaccaccttctgggctcacccttcaactgcattcccaacgcatcgccacagtcaacaagttctgtgacttctagtgagctatctctctgggcgtcagtttcccctgtgacaagcataacctctctcaagggatgcggtaaggaataataatagttcaagaaaaatgcctccgtcctccctaaacacaggctcctcggctccacaaatgcaaactcctgctccttcacccctaatttttttttaaagcgaagtttcctacctgcaaagatgtttgtttgtttgtttgccctgtagaaagcattaaagtatggacgggcaggtgtatttgtatgccaggctactggcagtcgatacagagatcgtaagactccgcaggagcatggtgcgtgagttttccaatctgccatgtgggtcctgggcaagcgaaggtctcctagccttcacaggttgccagtctgatctctgaaacaccctgtttgcaggaccaggcctgagagaggagagacccatcctaggcaggaaggtcttaagcagcccagaccacagcgcacagttttgtcccgccgacctcagcctggaaagcccagtcactcggtagcgcagatcttttgagccagatcaaatcctttcccggctttcctttctgagtattggatctgggatcacgtgcgtgatgtccggcaagcccgattccagtttaccggagtagccaaactgggctcttggaatcctactccggacttagtctagctactacctagataggcaagctgtgccttaacccaaaggccagcgtctccaggtccccaccccagctatcaccgcccgaggtgaccggtccatggcgccgggaaggaagctcggtggacggggtaattagggacccccctaccctccttggcggctgatgatgaaaccaggaaggtctttggcctttgggaaacgcatctcttaaatgagtgtggcagattccggcctggaatttggacttgagggaccgaaagacccgaagcagaaacttttttttttttttttttgctggctctgggacccgcccgcggctcaggaggaccctgtgatccagctcccaaagtgtgccggattggtttggatctaagaaaggagcgcgaccacctagagctagctccgggctcacagaaacggaagttttggggcgcccatctccaaagtgagtgccaagcgctggcaactccccgagaagtgcccaattctccactgcacagtcctcaccccaccaagttctttctcccctcatctccgtgtccccaaagtgacaaaaggaaaatagaaaggcatttccaccacagcagaaaacttgagtttaaaatccttctcagcctccccgacctttactattttgttttatggctatgcgtcaaaacccaagcctgatgcagggagggcacctaggctctcttggggtaggtgggctggtttgccctcttctaagagtaaaacgggctcttttggagttgctcgtcaacaagagacacaacacggacagccctgcccgacaaacccctgcatcctttccggccctcgcgagccttctttctgccctcccccctttctcagctcttaagttgttttggtggttgcgaatttccaagttcaagattttcccaggaccacggtcggattctagagagcaccacttctctacgtcttgaaagctcatttttactacagcttaatagtttaatggcgatttcaacagcttcttcctaaaccgtacaggctgccagttgacatttccaagggtcccccggggtttgagcctctaccacccaaatctggccacaacttgatttgatttacattaatggagcaattaaaagcgccaatccccccttccttatctggatggggttcccccctgaatccagctaagattagagtgcttttaaaaataattgtgagttgggacagactttactgcaataaaatattttaatttaattcagagtaagagataagaaataactcttcaataaaatatataaaattatacaagatacccattcaacgggataaaaatatactgggggaagagatggacaggaaggtgagacacccaggtgctgactgacaacgccatctccagcaactcaagcacatggcttctccatctgcccaacacgttagagtatataaatttccctaagaagtttagcacacaaagtacacacacacacacacacacacacacacacacacacacacacacacacagagagagctagagagagagagagagagagagagagagagagagagagagagagagaaggcatgttttccttcctcattctatggactgttgaagaatatttaaaatataggccacagttataagacactcatttttaagaagagatttaccatgtcctcttccaatcacctctgtaccgtgtgaggactgatgtagatagcatttcatagaaatcaattcttacaaacaatatttcaccttctaaccccctctcactccagggacctgacatggagtttcctattttctactttaccctgagtaactctcagagttattctcatcctcttttcatcgatcttaaaacaacaacaaagatttaataatatggaatggagaaaaagagaaaaaaaataggatcaaatgtgcatcaagagatttctttttcttgtgcacagaaatgcaaataaacacgttacacctcccccttcacttgcaagaatctgtctgaagtgacatcctgtatggaatgtgtctacttctgctatgttttccataagcaagtccaccatccttgcaaattctgcaattaatctctttccctttaagaaaatgtagcaaatggacttaacacaatatcttaggaagatgctatctagaaaaaaaaagaaaatggataaatgtatatataaattttgccttttaaaataacttgaatttttacatctggcatataaaaagtcttatattttattatatatttatacataaaaactagcagagccaatatttgtgagaggaaagggggcatttggaaaattatgaaaacaaaacaggtcttagtgcctctcacctaaataacaaattcactctgtatcaagtggccctgtcgcttagggtgacaatgcaaggctcgcattcaggagcagagttggcaccaccttctcggagagggagggggatgcttttatgcaaacatccatcctggagtctggtccatctggtcttccttaggatagatggtacatgccatatccaaccggcgtggcatagagtccaacaggcgggatggggagcacaggtctatggaaggggtaggatgcgccgtatatggatgctgcttgcaggggtgagttgatagggaagggcagactgaagcctgagggcagcataggcttggcagccattttcagcttttccagttccgcctcttgcagtcttttcgccttagcccttcggttctggaaccagattttgacctgggtctctgtaaggttcagagagctggagaactcggcccgctctgctatggacaggtactgtttctggcggaacttgcgctccaaggctagaagctgggatgtggtgaagggtgtgcgtggcttccggttggtcttgtgtttcctcagggtgcaggtggtggggctcatatgtcctagaggacagagagggaaatcaattagtgaattttgtaatctcttccctcttaagaacacatagactttgtttcatttttaaaaaggaggtacctttgtcaaatctgtgagtgtgtgtgtgtgtgtgtgtgtgtgtgtgtgtgtgtgtgtgtgtgtgtgagaagtagtcagttatgaaaaaggaccacatttaaatggtaggtagttgctgtattttatatcagcgtgagtaatgaggtcatgaaactttttatatggaaaacatattgcactgtacaaaatggaaatagaaaccatgactataagtcacaagagttaagaactatctaagaaataaaacttcctcagaactcaatctcctgtctttaaaacagtaagacccgcacatcaggaggaacataaataggatgccagatactgagttagcctccaactgctctctgaaccagaaaagttgggttgcctcaagcctgtttatgaagcacaatcatccagataaggcctgtgataaacaaatagcatcaatggatggaagggccgatccaagccataaacaaccacacagctgtcactgcatccaccctacagatgataaaaaccccaacatcactttacagatctggctgtgggataagtttcttggctgtgtgctttggcaatataaacgtcacgaagacggagagagaattagctcgctcataaacggacatgtcaagggaaatctctctgcctgcaatgatggtgatggcatcatactctcttctatccattccatggtttagggcaagtggataagtaattattttgttgttggaatttagaagtggggaataacaagcaaaatagagacaggaggcagcgtccggactctgttttaagatgggttgttagcacaaggatggggcctcaaggtgattccacagcagggactaattctggtcttgttttccttgaggctaggggaggagcataaggcgacaagaatagaatactaaacaattatttttctgcatttggcttttacgagccagtctaatttccctaatgtagccagagtgctagtgctggtgtatgcaggggaatgtaacatttcttgtttagttactttggtggcccaaagaagaatttatatttcatctttgagagtgacacagcacaagtcccaacccagcccctatgtcacattgttaattttacagagtagaaggtactgtgatcagaaaaaaacagcagtctgggagagagatgggtagacttcctaaaggcctggccttccttcgcacgtgctaatccccaactgagccaagggcaggggagattttcctctcagctcactggccaacatcagagctggagacccaaggaattctcgcccttcccgagcccacccaggctccctttcagacaccaaactcttactgcatacacttgctgctggttctacaggagttttgaaccagggtagcttgggttactctttgtgggccatggtgacttataaagttcgggccatggggactgtgctcagatggcaaagccttgccaggagaatctttcccccatcgctcccaccttcttccccctaacccattttataccagccaaagaaagtgtgtgattaaacaaggtgaaacaaactttttatcccgctttcttcaaaccacaaaaccagggccaggggtaggtgggtccctccctccaactccagccccccccccccagctgattcttggcattctccgagctcatcctgctgacacttccacccccaagtatcaaaaaccttgtgtttccaaatgaaacctcctccgaaagcccctagcttctcttataaaaaggatttatctagggcaaggaaaaactgcccactgcagagatgttacagagccagtgggggcggggacacagtgggggtggggtggggtggggtggggaactgccccaccagaccgccaggcctaagtatgccaggatttctgacctttggccaccataccatttaaggctgaaatcctggatgtgttgtggggcattgccccaggcctaggaatacaggcactccaaatttgttaaacaagttaagactcttcatgtttctgaacctccatttcgctgacaataaaatggataactactacttatccctcgggtggcttagagagctacatgttggagtgcccagagccccacttggggggtaatgagcaaatcaatgtgcccaagagcttttttttccatgggcccaaactgctgatccctctgaactctgctgtgaaacggcctcttctgttaacaagaggctctcggctgccgcacaaaggagatcagataagataatgtattgaaaagcactgtgcaaactggagtttaaattctttaagtccttaatctctgcaccctttcagcctttcagaatttccagcagggtggagagagacagccagaggggacagccactgacgcctgggtatatggtcttgttttgttcacaaaatactttgcatctctagtccagagggccgggctgaaaggtagaaaggaagacaagttctcccccagctgagctgggaaagtccctccacaatccctctccctctttctcaactttcccaaagtttgatgggggggggggcaggaaaaaaggcaacagaagagataaacctcaaaggccaagagataaaactaaaaacaaagtttcaggaatggaccccaaagggatgctaagtctggaaaggaagtcggcacagcctccctggaggaagtggggtgcagtgaaaatagcaatatggccatcaccctcaaaagagggggcagagagcatggacaccagacccccatgcccattgcaagtatgaatggtaacctggaccaagcaagagcaatcctctaagcactagccaccaagtctgaaggggtagccacaggtggcatgcctctgcctgtactttgaggttctagcaagcagccaaatctggcgaacttgtggccacctcactgtacattctcaagttctgaaggaatgctgttaattattactgtgaacccaggagagcccacgagggtctggcccaaactagctccctgcaacacgcagaacctaaccaacaacggactagaatacaagaagcttcctttccgaatcagtctctgcctgccaccttcccttcataggatggacactggagttcgaagactaccaagtatgtctgctccatgtctggttaacttccagttgtctagtctttatagtggggtgaacttcatggggctgcctgtatattttgaaggccagcaaaaccacatttcaatactcatttaaagtggatcccagcccggtgtggtggtgcacaccagttattctagtacttaggtggtggagtaagatgacgagttcaagaccatcctgagctgcataccagcacgggccacaggagaccctgactcaacaaaacaaaacagcgactctcccctatttcccgggcaggtacacaaatatgaagttttcggagcagggggctaaggactgcagaaatcaacaacttggtttggttttcaaatgccagccagcgctcaggtactgcagattcctcgaagctagggattctgggatgcggaccgcccgctgaactggggtaccaggggggtcaagagcatcatcctgttaacacccgttccccagcccctctgggacccctcgcgctggtccagcccggatcccgtcccagacgcgcactcactgggcggcggggagtatctgccgggctcctgtatccacggtgctccgtcttcggaattttccgacttgaccgaggcggtctcgaagggcttgacgagaggcccgggactgtgagcgtcccggacgccgtgtcccggcagcagcagcggccgcaggacagcgccagccgaggcgcagtcgggtggcaccgcgggcgattccttgggcggcttcttgtcggacatgagcgcctccacgctgaagggcaggctggagaccttgaccctgcgttcctctgcgctgccctcggctcctccaggcccgggacccgggccggccagtaccgcggggccctcctcatccgacgaaaacaagtcaccgcctttagtcggagaagccatgactttctgcgccgcgtagctgtcggcgcgcgactccgctggcaactctcaagcgaagactccaacttttggggggggagccggcaggggcgcgctgggagcccagcctgtcctccgaggggaagtgggagactcggctcaaccaactggcgacggccctgctcctgacgccacggacgctcgccaccgattggctctccctggagaggcttggggcccttcccccgccccgtttgaaataaattaggagttaattacaggagcagtcagcagagttgttattaggcgatccctcaagggttataatcgcccaaactgaaaagtctaaggcgtaattaaagccgattgtttaaagaggaagcttgccgagtctcatttcttgtcttttaacccctctttaaagtgtttctggtgccgatcccacacgctcccgcctgagaatgttggaaatctgcggagggcatggaacatttataaagctcccactatgagctcaaactagtgtatctttgtaactataatggaaaacaatagcagcatctttactaatagaaatagtttaggcatggtccttagttgtcttatctttggagagtgttccaagacattagctgtaactcattccttaagaaaagggacaaagatgagaaaggctgagaggtggtcaagggatattcaactaatctctaccctttctccctttttttttcctttaaaacagactcttgctctccagctctggctagcttagaagtcgctccctatcttacccaagatggtcctgaacttgctaccccactggcttcgtccctggtgttgagagtgtaggtgtgcaccagcagacccagcgcccattggttcctggcagctaatttacacaaatgatctccatttcatactctgtccaaacaggacaagttttagaaactgtcaatggggatattttctcaccccttgagtctcctctctaggcccgtgcaaaagtgtgctcatgaggttttttttttttttttttttttttgagtttgtgtttgtcattggagttcaggtgtcaggatagcatctgccttgggaggtgatgggcaggggagaagggtatttgtgacatttagtgtctttattctctctgcaaataacagggttcgactttgcaaacccaaagcctgaatatctttggggaaagctcatctcacctgactttgaaattttaagcagcatacctatcaggatcccaccctaaagcacactctctatctaactgcagccccaaagcatcagtgaccaactgtatcaatgcatggaagaagagagttttgagacagaggcctgaaataattctgcacctcccttgcccgcaagccagcaggagcagaaagatcgctgcaaacaacccatttcaggctgcagaagctttttcatagatccaaaaacccatccggactggtgggggaaagaagagcctgctaagcgctggtcccaaacagcaaatgctccctaaatactccctccagcaccaaaggggaggaccattgctccaagttgctttcaatgaccagagcttagcaggtaccccagtttagaagacttagaaacttgactgcctagacctccagatccttccagcttacctctctgaaacagggacctttgcctcaaacatttacccagagtgaaatctcgctggtctgagggaacccatagatgtagaaatcttagaagattaaaaaaaaaaaagtcttcaccagataattcagttcagttttgaaaggttttcttttaatgataagaagttctaaatgaggcttctaaaaacctgtgaaactttctcctaccacaagatacaagtactttgttgttgctaactggaagcccgggaaagccaaaagaagacaacgaaggtgatttggagacatgtattttccctggagtcacatctgatgatagggatctcaaatacaatacaggtaaattcagattgagttgtatgtcctctcaataagtgaggcaagatgtggggttatgtattttggaagcaaatctaaaattcgtttagtcctcagctgccgaagaatacaatgaagttcacgtttcaattgtcctgaacccaaccaatgctttataaataatcggaaaacttatccttaaaatgtgttactttaggggcacaggtagagtcttaggaagttaaaaaaacaaaacaattccattggaatgtctctattttttttttaaactgtctccttcagaggaaaagttcagtctctcctgcactatttggggggaaatgctaagacactgaaagggaaacggtggggagaaaaggaatatttagttttgacctccagagtaccaagctctggccacgaacaggaggcattgccaaggagacagcccccatccctttgccaggcgcctctccaactctgctggggtggagaccagggctgaaaaagcctgaacacggaagttagcccttcgtggaaagcctatctgctgcaagaattttgcacaccctcaaaatattttttcaggtcttccccgcggctctaaactgaggggcaatcattcctctgctcgactcttatgggaattagcttcagtgggtttcataacgtagaaggtgtggggaattagtttaaaaatattcttgtatatcaaaagcaacattaatttacccaacgctttctttgtctagggactcatcacccgccttcaccaaccccaaagcaggacctttgtaaaaatccctgaacagagatttttcccagcctgaaaaaggtgcaggtttgggtgtcttcccagagaggagggctggctttggcacttaggacgcactctgtaaacttaaactccggggtggtagaataatgtttatgcgccgtgaacacttgcaagcggccaaagtggggttccaagcggaactccgcaacagcgaagagtcacctttacaccttgcccaagctcccgaacttgagcaggacctcatttgcttttcaagcacatcactgcaggcggagactgtatctctgcctaaccagggaaaagtctcgggctaggaagctgccctaaatagtcatgcaaataggaggtgagccaccctcgaattccccttgggcctaagcctgcaccttccctgagcttccccttccccactgcatgtcacaggagcggagacccttcgtggagcggccgcgcacgcgcaccaggagctccaaggtgaaggcagtcccagtaaaccgtgaagcgttgagcacagacctgggcgtttgcaacccggaggacggatcgccggatcccagaggctaggaggggcagggggaggggcagagaaggctgtagacgggccagggctgcgggtaggcgccaggcgcggggagatgaaaggcgggctccgggggaaggggctgcgccgggtgaccggctccagccgcgccgggcgccccgcccccgctgcccggggcagaggcggctgcccgcgccggagccgcgttaattgctctcggcccggcactcagccttcgcggagccaggacaacctcgctccaggaggaatgacaattcgccctaatgggacaacctcactcccggaggagtgacaattccttctaatgggccgcttgttagaggcctattctccgaacccgggtatcagaagcgggcagacaaatgggcgccaagggccgccaggaattccaccactgccctccaatccgtggacattcgctgtgtgacttcgggcaaaagatggcacctctctgagctcattttctttttttacctgtgcgctgtgggaaggagggataaggcagatcaaacctccaactgggcagacaaatccggagggagctggaggaaacccccctgagagctcctcagcagggaatttaggtagatactcggggtcagggtaggatttccttaggcctgttcgttcatatacttatgatgctaaacaagaggctggaggggaagggctttggctacagccctacctagctggttgaaggtctccagagaggcaagttttgttggcttcctgacagtggaagttgaggggcagaagagagaggggcttgagaactcaatcccactctgaacccctggaagaggcccaggaacagaggactgttgagtgagactcacaggcaagccgcacctctgctaggcctggagcctggagagagagaatggccagttcttggagtcctcacttagctcctggctcaaatgtgacagtggccaagggggtaatgagctccggttctgagcctttgtagacctgttctcaggcagagccccttcttgcctctgacaccgctgccttctcggtttcctctttcagagcggagcataagtcacctcacctttgtagcaggatggggtggtcacctgtagtacggtaggtagcagtcagcaaacgttggctatctcccaagtcattgtcttagctctgtaagtatctgcttacctctcctctccacagttcttggcaaggcacacatctggatgtgttgatgggggttagagatcttgagtgcagaagtggaggactgttgggcccctggtaataggtacctaccccttcagagattcacccagtatgtctagtgagacatgagggctaaaggaaagcgaaataggttagaaacagcagatagtgtctcccaggccctgagcacagcttcctgacaactcctcagtttctgtctccattgggcaggagcaatactgtagctcagatttagcaaagaaaacaaacaaaacagaacaaaagcaaaaaccaaagaaacaaatcagtcccctggaaaatggttctaggacattgcatggttgcagccatgggaagacacctgaactatttaggaggctcttagagcatcttacacaagtctttgctctcatcctcttcatgctacccgtgtacagagccagggtaactactatatggccttggttgttttttatttcactttccttactgggctccacctcagtcccggagtcaagcttttcatatgggtccataaatgtcagttcctttcttgtttctcaaacaaccctgtggagtaggggatccttgtccctcccagtgaaggagaaaactaaagcttcattagagtttttcttgaagctagtggtagagatgtcaaccaggggttggctgactttagacttcaggtatctcgccaggcagcattgctgctcgggcaaaggatgatgctactggaatagctcagagtgctgaagaatttatgatttccatttctccaccccagcttaatagataggcgggtgagtctgagaggagcttaaataggggcctcaggaaaagagagccctagtctatggattactactaccctcgtaggaatctcagacatattttattcagtgacatccacattcttttacatcagaacaatggaaaagaaaaagaagttttagggagttttctaatgaccataattatacctctttttttttttaaaaagattattttctttatatgagcacactgtagctgtctttagacacaccagaagagaacatcagatcctattacagatggttgtaagccaccatgtggttgctgggaattgaactcaggacctctataagaacagtcagggctcttaaccactgagccttttctccagcccataattatacttcttaattaagtaagataaaaagctgggtatggtggcccatatctataaccctaactaacactcagaaggctgaggcaggaggatctcctggagttctagatcagtctaattgttccaacgagaccctatttaaaataaaacaaaaacaaacaagctatcccaattgctctgacctatatcccttgttctagtctgagaataaaggcagtgagaaggaattattttgaatcttttagttatttgaaggggaaggggttggagcatggagctaggcccagacctgctagccttaagatctctttgggtagaaagactcccctagtgtccctaataggaaagccaagcacgttggtggtgggatgggggtggagctcagcagccaaggaggctctgggttccatctgtagaaactactaccttgaacttcacatactctgagatcctgtacttcccaaagcacttccccatcaggaaaatcatcccttgctctccaagatcacaccaggacatgggtatctcattccagcccagaatgtgtttctatagttctttttccatctatccatccatccatccatccatccattcatccatccatccatccatccatccatccatctaccttccccagtccctaactctagctgtgccttgagaggtaatttcagctgcccaaattcagtgccactgaattccctaaggtcatggaaagaggtgggacctggagttgccccatgtctttcctccttggagaacttccctgagcctgaacacaaggagagctgatcagtgggaggggtagacgcgtcatgagaggggagccagcactatgtccagtgcatggaacagtccctagcacacatagtgtaatgaataaacgttgaatgaaccagtaaatccaggcggagattgaaatctgctacagggatggggtcttcgttctcaccttggaatgacaccggagtcctgagggccagtctccctgtttgtatttcaacaactaactgcaaatggtgactggcagatggagcagggaatagtcatcctccttggatccgaaatgtctctaggctcttcatcatcatcacagctcccgggtaaggagttattcattttgtagctggagcgcttgtcacctgcccaagtttaaacagtaagtgacccagctggcttttgacctgagagaagactggttccagatgggagctggcttctgtttctcagtttccatatagcgtgtcttctgtccctggcttaaaacatccagggaccctggtgctttgtgctcatgttcttgttgggttccagattttctagaggaaactgtgtttctatagttctttttccatccatccatccatccatccatccatccatccatccatccatccatccatccatccatccatctgtcctatctatctatccatccatccatccatccatctatccattatctatctatctatctatctatctatctatctatctatctatctatctatctatctatctacctatctatccatccatccatccattattcatccatcatcaatctatccatccatccatccatccatccatccatccatccatctatccattatctatctatctatctatctatctatctatctatctatctatctacctttctatctataatgtgtgtgttcctgtacctgtgctgtggtgcaggtcagggcatacctgcatacatcggttagatagctctttccaccatatatgttcctgggcttgaattaaagttgtcaggcttgatggtaagtaagctccttcacctgctaaaccatctctccagcccatgttctgccagttaaaataccccaatatagctagaaaataacgacagccgtactcagggtctgcatcccctaataacatcggctggtaccttcttaacatttactgtcttgacgggtactgttggaagcacaaggcccagactaattcacaaaacctacaaaagccctattagggacttgctaatattatcttcattgtgttcacaggaaactctagatacatgtaatttctcttttgagttgtgtttgtacaggtgtctgccctctctccatctttccctgaccttcctcccctagaaagaagaagagtcgtcacagtttaaataggagaccagactaggtagaattctatacaaaggatattcaaaggattcagaacttaatgaactttccaaacttgaactatggttaagccttcctgacagtgacagtataactcatagattccatatctcctgtgtattggaacttaatgtaagtcgtgcccttttcctttaccccttagccacagctcatggttttaggcaagagaatttaggaagatgacctaggcccaggcaaacagtaggacttgaactcccatgtgctgctcactggttaggtgacttggggcaggccattcttctctctgggtcccttatccctgtcactggtcaagccaagataataagccaggagtgttgtgtctgagcttctaagggagaggagagagggagagaagaaagagggagaggaagggaagagaaaacccacctacttgcatggtgtgtctgaaagctagctgattaaggcttccaagagggtgagattagagggcaggatgaagcctcagttttctcctgtaacagctgtatgtctcaaggcaagtccacccatctctctgagccacgcctcattctcccaatcagaaacggagggtaatcattcctgtttcaggggttaggaggattaaatgggattgcgggcataaaatataaggagcacaattaatcctctctccttgcctgttgctaggctcgcgtgtgagacagaaaagtttcgtgagtcagcaaatgagtgacctggaaggaggcacggtccatcaatcgtgatgcaattggaacgagcacggttgatgcagacagtggtaggaggcttacggaggtcatgcttgcccacagtcccaaggacctttgggcagcacaagaaagctttgcccaagttgtcacacaggtcttccccgaaagtcacacacctcagcagtgacaacgaggacatctcaaaagcaccggatccggtcccttcctctgaattcagaagacgaatacatcaccttcatggtgactgagtgcttggttttcacaagaaggatgcagaatgtggctggaaataccatcattgtgccctctctcatttccagagaaatccgacggcctgcctttcactccctgagtttgtttctgggtttaagattctaatttattggaaggtagacattaattaaataatagccctgtcggtcctaggataacagggtcaacaaatatgattgtcttgagacaagggaacggctgtgcagatgcctgaaatgtggtaatactgatttacagcattggaggagggcaggtctggttggaatcttgccctgcctctacctggatggatggccctgggcaagttctgtcctgtcttcagagcctggatcctttatctctaacccgtggtgattgctcctacctcccaggtttacaggaagagttttcaatagagataatagaggatgctgatgttgtttttgtttcattgttgttgttttgttgttgctgctgttgtccttaaggatccttacaacagatcgtggagggagggcgtgtgtttaattgggtctgtggaactgttagcatcataggtaaacagaggtggaggagtctggtcaaagttctcctttgctttccttagatctagttatctcgaagcttattcatctcaaaggagccattgcaaaagaggagaaggggtctttgaaagtggaattcaggttaaaaggcgtggggctgctccccatccccaatgagcagctgtgctgatcaccacttctccagcagacggaacaggcgtggaccctccgggaggcaggcaaatctaagacgtgtgatagttccaagcaacgcaggaagacgtttccagattttctccttttgggctctgttctctttctttctgatttcgtttgctcccatcccttacccagcccctagttgttgtttggtttgagacactgtcttgctcatcccaggctggcctcaacattaccacccttcttcctcctgcctttcctcaggtgtgtgtgtgtgtgtgtgtgtgtgtgtgtgtgcacgcagcttagtggtagagcttgtgtttagcatgcatgaggctccaggttcagttttcagtaacacacacacacatacacacacacacacacacacacacacacaagcgtgcgtgtgccacacacagcacaacgtcatctatgaacctcccctccagtggaaatccagacgtgtcaactttccataaaagatgtgtcaaaagcaccaactccatctgagaaattcttttctcctagtcagagctggcacgaaaacagctcctttaaccatctcagtgagttgccaaatgttaataatttgcaatgctttccatagaaatccacaattctggcttctccttaaccctctgaggtgggtggccctagtctacagtgcgagaacttgcaggtgagatttgtcttcccaggagaggggaggagtaccccaggatacaaagtatacaatcctagaagcttcagggagtgtggaaacctgaagaagcctattcaactttgaattcagcttggaagaggtgattgacttccacaggctgagccttgaacggctgcttggttgagaaggtaggtctcacgacaaagagagaaggatttgaaaataggtaagcaatgaaatgaccgggtctgtgcatctgggtatcaggagcgtgtggagggtgggctggagcaatggctcggtgatgaagaacactcttgctctggccgttgacctgggtttactgcactctgaggctcactatcgcctggaacttcagttccacggggcccaacaccctgttctagcctccctaggcactgagtgcacgtggtacacagacattcaggcaaagacctatgtacataaataactgtgtaattaagttgaagaaatcttttagaaggagagaatgtggaggaattaagtgtatcaacgggggtgggggaagagcaaccccactgggtctttgaagagatacattgagacagtaaaagacactcctattctcctccttgtcctttcctttctgtttccttcacgtcccttccatcccttgctttttctttgtatcatgttctgttagattcttcttttagaatttcaaaattaatagggatttatgtctgataaccaggaaggttaagacagtgtaagcagtcaaggctcctcctcctctcactctgccatctagtgtaaccagtgtgaacactctcccgtataccctcacgctcctccacccataaccagtgtgaatgctcctctcatataccctcatgctcctccacccatagccagtgtgaatgttcctcccatataccctcactctcctccacccataaccagtgtgaatgctcctctcatataccctcatgctcctccacccatagccagtgtgaatgttcctcccatataccctcacgctcctccacccataaccagtgtgaatgatcctcccgtataccctcatgctcctccacccataaccagtgtgaatgctctcccatataccctcactctcctccacccataaccagtgtgaatgatcctcccatataccctcatgttcctccacccataaccagtgtgaatgatcctcccgtataccctcatgctcctccacccataaccagtgtgaatgctctcccatataccctcatgctcctccacccataacctgtgtgaatgctctcccgtgtgccttcaaatgaacataacctgtgtgaatgctctcctgtgtgtcctcacactcctctacccaacaaacataaaattgcagatgcaaacagggaaaaatgagaactcatgatgcctttgtgtgcatctgtcaactcttgatctatgttgtttgcctttcacatctatctatctatctatctatctatctatctatctatctatctatatctcctttctgaagctgaggttgctgggcactcgttatgtatatttttgactggaattgcccctgctcagccatgttttacaaccccattccattgcacatccccagcacagcctccaggtctccccaggctctgccagtctggagttcctccctccacacactggcaagtgctctgccattgagctaagctccagcttcatctgtatagcttcattttcatttccgacaagggtgattttgggcaagaggttatcagtagagtcccatattacatccctctcgtaggaggtattgcagaacttattggaaacaatccagaggcgtgaggaggcttct

SEQ ID NO: 81 - DNA, 45297 bp, Homo sapiens
gagctagaacagaggtgggggtgcggaggaaaacagagcaattgggtgcctcttaccccacacctaaggggtgcatgcactcagggtccctccagccctggaatgggagtgggttcaaggatgggggtttgatggcaggatccattcggcattataccagggcactccaacttgggcaggagaaggcaaaaatgggcagagccagaagtggggctgaagcagggatcaataactggagaggaatcatttcaccaaatcccagagccccaggacagcctcctcactaaagagcagagcaaactctcctacagcgaggagagtttcgggatcctgttagctcactgcaagatgaaaatgcaaattaaggccagacgcctgtaatcccagcactttgggaggccgaggcgggtggatcacgaggtcaggagatcgcgaccatcctggctaacacagtgaaaacccgtctctactaaaaaatagaaaaaattagccgggcgtggtggcaggcacctgtagtcccagctactcgggaggctgaggcaggagaatggcgtgaacccaggaggcggagctgcagtgagccaagatcgtgccactgcactccagcctgggcgacagagccagactccatctcaaaaaaaaaagaaaatgcaaattaagttttgttttgttttcgcttcaggtttagataattttgcagaggagagtctcagaggcttttttttttttttttttttttggagaccgagtctggctctattgcccaggcgggaatgcagtggcatgatctcggctcaccacaacctccacctccctaggttcaagggattctcctgcctcagcctcctgagtagctgggattacaggcacctgccatcaggcccagctaatttttatatttttgtagagacggggtttcactatgttggccaggctggtctcaaactcctgaccttaggtgatctgcccaccttggcttcccaaagtgcttggattacaggcataagccaccatgcccggcctgagaggcttcttaagaggctaggattcagctgggctcggtggctcatgcctgtaatccaagcatttggggaggctgaggtgggaggatcacttgagcccaggagttggaggcaacatagtgagattccatctcaatttaaaaagagattttttttttttgagatggagtctcactctgtcacccaggctggagtgcagtggtgtgatcttggctcactgcaacctccgcctcccaggttcaagcgattctcctgcctcagcctcccatgtagctgggattacaggcgcctgccatcacacccagctaatttttgtattttcagtagagacggggtttcatcatgttggccaggttgatctcggactcctgacctcaggtgattcgctcgccttggcctcccaaagtgctgggattacaggcgtgagccactgcacctggcctagaaagacatttttatttttaaaaagaggcaatcattgattcattcattcaggaaatgtttgttgagtgcccactctacttaggcactgggaagacggaggtgaacaaaaccagtccctgccctcatggtgccatgcttgggcttcaactgcagtgacaacatggtcccctaaagttatttctctgggccattgactaaggtggccaggagcagggagaacaagaggaaagaaacatgtattaaaagcatttgctctatgcttgttcaagtgctaatccaggcttttttttttagttaaaaaaaattttttgtaagcccctccccctgcacactgaatacttttttgttaagagacagggtctcagctgggcgcagtggctcaagcctgtaatcccagcactttgggaggctgaggtgggcagatcacgaggtcaggagatcaagaccagcctggccaatatagtgaaaccccatctctactaaaaatacaaaaattagctgggcatggtggtacatgcctgtattaccagctacttgggaggctgaggcaggagaatcacttgaacccgggaggtggaggttgcagtgagccgatatcgtgccactgcactccagcttgggcaagagtgagacttcatctcagagaaaaaaaaaaaaaaaaaaaaagagacagggtctcactctgtcacccaggctggaggcagtgatgtaatcatagctcactgcagcctcaaactcctgggttcaaacgatcttttcgtatcagcctcccaagtagctgggactagaagtgtgtgccaccatgtctggcaaatttttaaacattttttgtagagatagggtctcactatgttgcccaggccggtctcaaactcctgggctgaagtgatcctccctctccagcctcctgggtagctgggattataggtgtaaccacactcagtgggaatctaggctctttagaataaactattattattattaataataatgataatgatgaagttaatgtttatcaaggtctgtctttgtgccaagttctagtctaagcactttgcaagcaataggtcatttgcttctcaaaacaagcctgtgagatgggtgtaattgttagccccatttaacagatgaggacacaggcttggagaaatagaatgacctgcccattgtcacacagtggtaaatggcagagccagaacttgagcccagctctgcctttctctcctctctgccatgtggcttcctaaaggtgggagtctgggttgtctggactgtgaggccaaataattatacatgtagacaaggcctcagtaactacccaggtctaaaagcatttctgacttttagagtggggaatgagaggctccgggagaaaaaaatgtcttgtccatggtcatactgcaaagcaggtttagaaagcgagtactccgagatccagtccagaaccaaaaatcatgattatctattagggatgtgtgattaggtgtttgtgtgagagagaaagagagatgcaggcagacatgtgtacacctttgtacacacgtacacacgcacgcatggctggtggtggacttgtcccagagacactgcctggacctggagtctcgtaggcgccctctttggcccacatgagacagccgatcttgtcactttattaccacgcttcattttggaccccgaattgcgcccaggaagtcccgcagatgtgtggcagtttttgttcctggaaaaggtgttcatgctgaagatcttccccagttccaagacagggcttttggtggcatggggttattccccggacttcagtctcctccaccacagactcaaggaacccacagggggttttccaggaaagtctcaggtcccaggaacctcacgggaacacaggtgccactgcttaaggtcatggctttgaagaggaagggccaccgtgtgcctggacaagttctagtgtgtgaggaatgtcagccctgtgactctgctgtcacaccttggccatgtgacaaggctgtgtgagtgtgtgtgtgtgagacagagagagagactgtgggcagccagggagctcaggaacccgtgggaggtttttttcttttcttttttctttttttttctttttgagacggagtctcgctccgtcgcccaggctggagtgcagtggcgcaatctcggctcactgcagcctccgcctcctgggttcacaccattctcctgcctcagcctcctgagtagctgggactacaggcacccgccaccacgcccagctaatttttttgtattttactagagacggggtttcactgtgttagccaggatggtcttgatctcctgacctcgttatccacccacctcggcctcccaaagtgctgggattacaggcgtgagccactgcgcccggccgagtttttttttttttgaggcagagtctcactctgtcgccaggctggagtgcagtggcgcaatctcggctcactgctacctccacctctcgggttcaagcgattctcctgcctcagcctcctgagtagctgggattacggcacctaccaccacgcccagctaatattttgtattttagtagagatgggatttcaccacgttggccaggatggtctcaatctcctgacctcatgatccgcccgcctccgcctcccaaaatgctgggtttacaggcgtgagccaccgcgcgcggccctggctgggaggttttaacaggataggaggggaatcaactttccctgagggccggctctggtgcgaggtgttttacaaatgtgtactcattcgtatcttcccaataactgtgatccccattttacaggcaactcaactgaggttagagaggccacatatgtgcctgaggtcacacagcaagtaaatggcagagccaggattagacgctcggtctgtgtgactgcacaggaatcaggatggaattgctgagaacacgagctttgcttcagccctgagtcctggctgtgacccggatgcttttgaccttgggcatgctatgtagccgctcgaagcctcagtgtcctcatctataaaatgcaggcctagagtaaccatgcaggtggcgagggttaaacgagatggttaggccccatatggcctggcagtattatttaatgttactataaccttttcctgccctgcccaaccctgagctcaccccatactgcctggctgtcccccacagaccattactgggacttccacccccaccacgtgcacagcgagttcgagagcttcgccgagaacaacttcacggagctccagagcgtgcagcccccgcagctgcagcagctctaccgccacatggagctggagcagatgcacgtcctcgatacccccatggtgccaccccatcccagtcttggccaccaggtgcatgccaccgcctgccccgtcccccaggagactgccaggcctgtggtggggcccgggagcttcacaggaagctgacacaggctcttacccaactcagcttcctgccccacagtgccaacggcggctggagctccaacggctgccgcctgaccccccaagtgacctcatgaccccacaccccttatctcatctcaccccgagtatggacagaccccagataattctcgcaccctcaccaagcctccccatcccaacgccttgttgtgggccctcctgggcctcactgtctgccacccccattcactagccctcatggatcccacaccaagtcactgaacacctctactgaccctgcctctccccagtgaccctccctactgaccctaacccggatcagtgacctctgctgacctctaccacccctactgacctccagggtccctccactcactcatcatcccacctatgaaacccccttccagacccaacgcaccggtccctagcatgccctcttctgaccccagcctaatgcgggtccacacagcaccgctgcagggaggagaacaaggcaccacttccccggtgcccacagtcctaaaccaggaggcccagctgggagggctgggtgggctggatgtcagcacccctcgccccacagcctgcaccctatgtgcagcacctcaactggccccccttttccctggtcttcttcctccagtctcctgtgcctgccattgtcccctgccctctgcactccttctctccccagctgacctccctcccagcccccctgagctgtaagctggcccttcctgactctgatctccttcccccaccgtccaggtctcctacctgccccggatgtgcctccagtacccatccctgtccccagcccagcccagctcagatgaggaggagggcgagcggcagagccccccactggaggtgtctgacggcgaggcggatggcctggagcccgggcctgggctcctgcctggggagacaggtggggcacctggccctccaccctggccccgaccctggccgtgtctgtgccctgcccccacccagccaggccaactgacccagcagccacgccaccgagtcgcgtgtgtgtgtgtgtgcatgtttgccagtgtgtgtgttttgtggggctgtctgtggctgtctctgtgtgtgtgtatctgctgtgtagtgcatacgggcatctccatgaagtgtgccaggtgtgtgtgtctctctgtgccatgagtgtgtgtacatctgggtgtgtgtgagcaagtgtgcagagggtgcgtgtgcacaggtacgggcaggtgcatgtgtgcgagtggctgtgtgagtgggtgtgtgagaaggtgaatgtgagagctggtgtggctgagagtgggtgtggccatgtttgtgtgtctgtcaacacatgaatgtatttcagtgcgtgtgagcagctgtgcacgtatgatgtcagtgggtgtcagcagtgtgtgggtgtgcctgtgtgagcagggatgtgagcatggtatatgtgagtggctgtaagcaggcatgtgtgagtgatatgtgtgagtgggggtgtgacagcaggtgtgtgagcaagtgtatatgtgtgaatgtgtatgtaagcagggatgtgtgtgatataagtgtgtgtgaatgggcataggtgtgtgtcagtggatgtgtgagtgggtgtgaacatgtttgagggtgtatgtaagcaggtgtgtgtgagcaggaaggtgtgagctggggtgtgtgagcatgtatgtgtatatgtgagcaggtctgtgcatgtatgtgagtggatatgtgttttaacatgtgtaagcatgtgtgtgttcccatgtgtgagcaggtgtgtgtggggggtgaggacgtgcttaagcacctgcgtgtgtgagcaggtgtgcatgtgtgtgaacaggtatgtgtatgtgtgaaagcaggtgtgtgaatgagtgtgtgagcatgaatgggtgtgagtgggccgggcgtggtggctcacgcctgtatcccagcactttgggaggctgaggcaggcggatcacctgaggtcaggtgttcgagaccagcctggccaacatggcgaaaccccgtctccactaaaaatacaaaaattagtcaggcgtggtggtgaacgcctgtaatcccagctacttggaaggctgagacaggagaattgcttgaacccgggaggtggaggttgcagtgagccgagatcgtgccattgcactccagcctgggcaacaagagcaactccatctcaaaaacaagagaatgggtgtgatgtgtgagtgtgagagcaggtgtgtgtgagcatgcatgagtgtgagctgctgtgagtggatgtgagagcagaatgtgtgtgagcatttgagtgtgcaagtaggtgtctgagtggttgtgtgtgaacaggcgtgtaagcatgcaagtggatatgcatgagcagaatgtatgtgcatgcgtgagcaggtgtgaggtgcaagtgtaagtggtgtgaaatatgagtgagcaggtgtcaatgaggtgtgaaagagctggtgtgagcgtgtgagtgataagtgagcagctgtgaggtgtgagcatgtatgtgagcaggtatgtgtgatgtgtgagcatatgtgtgagcatgtgtgtgtgcagatatgtgtgggcaggtgtgtgtgagtgggtgtgagatgtgagcatgtgtgtgaggtatgaggtgtgagcatgtgtgaggtgtgagcatgtgagtgggtgtgaatgtgtgaggtgttagcatgtgtgaagtgttagcatgtgtgtgagcatgagtttgtaagcataagtgtgtgtgagacttggtgtgaggtgtgtgaggaagtgtgtgtatggataggtgagcatgtgtgtgagcagacgtgagcatgtgtgagtgggtgtgtgcgtgagtgaatggtgtgaggtgtgtgagcacaagtgtgtgagcaggggcgtgtgtgtgtagctgagtaatgtgagatgtgtgtgagcaggtgtgtgcgtgtggggctgagtaacgtgagatgtgtgtaagcaggtgtgtgcgtgcaagtgtgtgtgaggtgtgggtaggtgcgatcatatgtgagtggatatgtgtgagtgaatggtgtggtgtaagcatgtgtgtgtgagcaggggcatgtgtgtgcaagggtgagcaatgtaaggtgtgagggtgagcagtgtaagatgtgtaagcaggtgtgtttgtgcaagcatgtgtaagcaagtataagcaggtgtgattatgagacctggtgtgaggtgtatgagcaggtgtgtgaacatgagtgtgtgaacctggtgtgaggtgtgtgtgagcaggtgtgagtgggcatatgagtgtgagaaggtgcattgggtgtgaccgtgtgtgggggcagtaagtgggtctgagtgtgtgtgcatgtgtgtgagtgggtgcattgggtgggtgtgagtgtgcatgtgagtgggtgtgaatgaggtgtgagcatgagtgggtgtgaccaggtgtgtgtgagtgggttgtgaatgtgtaagcagatgcagtgtgggtttgaacatgtgggtgggtgcaagcatgtgagtgggtgtgtcgtgtgggtgccagtgtgtgggggcatgttagtgaatgagtgtgtgagcatgtgtgtgagtgtgagctggtgcattgtgtgggtgtgtgagaaagtgacagtgtgtgagggcagatgtgggtgtgaatgtgcaagtgggtgggtgtgggtgcaatctggcgtttgggtgcattgcacaagcatgtgtgtgagcatgtgggtgtgagtctgtgagcacgtgcattgtgtgtgcatgtgtgtgacagcatgtgtgtgatcagatacattgtacgtgtgagcgtgtgtgggtgtgagcatgagtgagtggttgcattgtgtttaagcatgagtgtgagtgggtgtgagaaggtgcgttgtgtgagcacgtgtgtgagtgggtgtgggcgtgatgtgtgagcatgtgtaaggaggtgtgggtgcgttatgtggatgtgagcatgtgtgtgtacttggtgcactgtgtgggtgcgagtgtgtgcgcgtggggggggtgagtgcgtgggtgtgagtgggtgtgtgtgaacgcctgtgtgtgcgcaagcatgtgtgtgtgtgtgagtgtgggtgcgttgtgtatgcacgcccggcgcgggctggggcagccgttcccctgcccttcccggccaccccgtccccgggcccctgtgcgtacgcaaggcggtgggggcggctcccatgtgggccccgggccccctcccaccgggccctcccccccgcaggcagcaagaagaagatccgcctgtaccagttcctgttggacctgctccgcagcggcgacatgaaggacagcatctggtgggtggacaaggacaagggcaccttccagttctcgtccaagcacaaggaggcgctggcgcaccgctggggcatccagaagggcaaccgcaagaagatgacctaccagaagatggcgcgcgcgctgcgcaactacggcaagacgggcgaggtcaagaaggtgaagaagaagctcacctaccagttcagcggcgaagtgctgggccgcgggggcctggccgagcggcgccacccgccccactgagcccgcagcccccgccgggccccgccaggcctccccgctggccatagcattaagccctcgcccggcccggacacagggaggacgctcccggggcccagaggcaggactgtggcgggccgggcctcgcctcacccgccccctccccccactccaggccccctccacatcccgcttcgcctccctccaggactccaccccggctcccggacgccagctgggcgtcagaccccaccggggcaaccttgcagaggacgacccggggtactgccttgggagtctcaagtccgtatgtaaatcagatctcccctctcacccctcccacccattaacctcctcccaaaaaacaagtaaagttattctcaatccatcctcttgcagcacagagtctcttttaaaatttgttgtgtatctcttttggcccctgtgtgctgcgacgtctctttttgtcatttgtccatcgggtgtttaccgaggactgtacccaatgctggaccctgggaacatgaggaccaatgacacagagcgcctgaacaggagttagagtttggtggaaagaacaagtcctcaattgtgattaggagagcagatcctatttaaaagctctctactcctgatagttgttgtttttaagccttgatgaggtttgaactcatgatgatgatgatgatgatgatgatgaccatgaccagcaacaacatttgatattctggtcaattagtatctgccaaccttgagatgtggagtctaatatcactccattttatagaatgggaaactgaggcttgtagaggtcaaattatttccccaaggtcacagccgttgagtggccaagttggatcacactccaggtctgtcccgacacgtcaacatggagtgggaggccttgcttatctggaagaggatactcttcagcattccgaggacaggaattaagccccaaagctcctgtgggccgcaaagggttctcacgagctgcacgcccagcaggactttagacccaagtgaatccctggtgggacccccaggttctatttgctttctagctcctagccacagcaggggagaaacagaccaagctgagcggagaagcctgtaagtcctgtgttttcctccagacggtagcaagtagtggcagtagacagcctgggagtgagggacttcccaacgctgtcaaagaccttagggaacccagattctggggccattatcgtagggacaaatacccgccccacacctcctcaaccccagagggctcactgcagcccaaccctgcagctccctagtcctactgcagggccacaagagaaggcaaaatggtgttgtgtcttcattcttctatttttatttttttttttttgagacagggtcttactttgttgcccaggctggagtgcagtggcacgaacatggctcactgcagccctgaccccccgggctcaagtgattctcctgcctcagcctcccgagcatctgggactacaggtgtgcgtcacatgcctgactgatttttgtattttttgtacagatggggtttcatcatgttgcccaggctggtctcgaactcctgagctcaagtgatctgcccgcctcagcctcccaaagtgctgggattacaggtgtgagccacttcgcccagcccatttttatttttttattattattctttgagatattaataataaaaaataataataaataatatttttattattattatcactctgtcacccaggctgcagtgcagtggtgcgattttggctcactgcagcccggaactccttggactcaagcgatcctcccacctcagcctcctgggtagctgatactacaggtccacaccaccacacctggctaatttgtgtgtgtgtgtgtatttattttattttttatttttttagtagagatggggttttgccatgttgcccaggctggtctcaaactcctggcctcaaataatctgcctgcctcggcctcccaaagtgctgggattacagatgagccaccacacccggcctaacatttttaaaattataaacccacttcatacgtgtgacaatcctgtgcagtgggtgctgctttcacccaccccgctttacagatgaggaaaccaggtgctttgagattaaagagatggcagtgctaggactcagagacaccctggccccagggtctgtggacatgaccactgcctgaactgcctgcgaggatgctcctgacccgttagccttagggttatgggcccagcatgctcccaccgtacaatttgctgtaagagggacacacacggggcttggagtacccctgaggcttgccaaaggttggggaggcagaattgtgctgcggggggtgaggggggaagggacaggagccagccagggacaatgtggccctaccttctccctggagagacctcagctctctggaattcatctatatttagcaggtggctggacaggaggcagataagcagagcctggggaggggggaggtccccatatatagtgggaaggacaggaccccactcagtccctctttgggtgacctgtgcctgcttcgtgcctggtgtgacgtctctcaggatgcctgagccggggaagaagccaggtagctttaggactggggttgggtctaagtgtgggagcaggggggtgtctacaattggggagcagggctaggagggagttcttgagggggttgacgaggacgtggcctctgagccccaggacaggggcagccagtcctccagggtccttttttgattctcggtttctttttcccatccctctgatgagaggtgaaggtaaacccaaggtcagggacgcagagaggggacacagccaagacaggaagcacccggggtcaacccattctgagaatgcaaagggaccccttccctgtcccattgccttcaccttccacagcaaggttccccgcggacagagcccacgtttagtatggagctgagccaggctcacggcatgccttcagaccagtctctacccactatgggtctcagtctcccaacctggggtgccgggggtggtggtggcattgggttggttcctcctggctgtgacattatctgcttcatgagcctgtacggtgtggcccccatgttgagggtgacacagcccctcttctctgagagaggacagtcaggagcccctgaacccaggccaagggcagggaaaatcacagcccagggacctgggcctgggctgtgcccttatgaaggttgtccagggcagagatccaggtccccatcccccagcgccctcccaggccagctttatctcagttgctgatacccagcctgaggtccttggaggacaaatttggccacattccaagtaggcagacttccccgccccctgccaagggcccgaaatggttgggggaaagggagctgggttcatcacgggtgtctccaagcagggaaagtggacacatgcagaaaaagtcttgttgggaggtcaggaccacagccctggctctcccgactgctagctgtgtgatcttggaggagccgcttagcttctctgagcctcagtgtcctcctctgagaaatgaacagaataactgcaactacctcagagaactggtagagtattacgtgaggggatgcatagaaagtgctagcacagtatttactgagaggggctgcaggggcggggtgcacgctccaaccaggggccgctgtagcctccacctggcccttcagtctcagcttttagcaagaagccacggtcagtggaagtggccgcaggcagccctgccgtgttcgaggccgagacagagcgggcaggagtgaaggtgcgctggcagcgcggaggcagtgacatcagcgccagcaacaagtacggcctggccacagagggcacacggcatacgctgacagtgcgggaagtgggccctgccgaccagggatcttacgcagtcattgctggctcctccaaggtcaagttcgacctcaaggtcatagaggcaggtaagatcctgatcagccttccctgaggtttgggctgctgggggaggggcagcccagcgactctccatccatccagggaacaggaggtgctttcacactttcttgcctttgctgtggctgtgccccccgccaggaacgccctttcccccttttctgcacatgacctctctgagtacccccatgtgccatcctggcttgttccagccatggggtaggtgggagagatgaacaagacacaaccccactctccccctgcagacctccctggggagatgaccctgcacagacggccgggaagccccaggagctgtggatgaggggagtgcagcccagtctgaggggctgctctaaggctggggcagagcagggatggacctggagctgttcagggcagatgcagaggacatgggaactgatggcctgggacggggaggagaatgtgagaggcaggctggctctccagctcagcatgagctgcctctgaggggcccaggcagcgggaggacagccatggcagactttcctcatccacagcgggctcatgggtccaatgctcaggagagagagggtggaggggtctctggttagtggctgcaccacgactcccatctgatcccctccagagaaggcagagcccatgctggcccctgcccctgcccctgctgaggccactggagcccctggagaagccccggccccagccgctgagctgggagaaagtgccccaagtcccaaaggtgagaggggctgggcagggaggggcaggatccgtgggtagggcgtgtccagggcaggtctcaaaagcctttgctgggccaggtgcggtggctcaggcctataatccccagtactttgggaggccgaggtgggcggatcatgaggtcaggagattgagaccatcctggctaacatgatgaaaccccatctctactaaaaatacaaaaaaattagccgggcgtggtggcgggcacctgcggtcccagctaacttgggaggctgaggcaggagaatggtgtgaacctgggaggcggagcttgcagtgagccgagattgtgcctctgcactccagcctgggtgacagagcaagactccatctcaaacaaacagaaaaagcctttgctcacagggtcaagctcagcagctctcaatggtcctacccctggagcccccgatgaccccattggcctcttcgtgatgcggccacaggatggcgaggtgaccgtgggtgagtgtgagctgctgtgcccagcattggggtgggaagggggggcagcaggacactccccaagccgggcctgtcgcccctgcctttgcaggtggcagcatcaccttctcagcccgcgtggccggcgccagcctcctgaagccgcctgtggtcaagtggttcaagggcaaatgggtggacctgagcagcaaggtgggccagcacctgcagctgcacgacagctacgaccgcgccagcaaggtgggtccaccggggtcgtggagacacggagagaggggacatggagagccctagaaggcacaaggcacacagagggcaccatgagacccagaggcacacacgagctgcaagcaaggggtgtggggaatctgggaggcaggtggaggggccaggggcccacagggagatcccggaggcctgggggccagggagtgcgatgaggctcatgggagcactgtcggggacctgggagacttggtggacatgatcacctcaagggggcacctaataaggtttggccgggggtggggggtcgcccagggtggtcaggaagcctggaggacactgtgaagcatgggggcaccagctagtggggttgtaaagcccctggatgggtgagtatcagggctaagggctcaagggactctcagggattaaccagaacaattcctcattatacagacacggaaaccaaagcttgagaggttaagtggctgctccaaggtcacttagacataggcctagaaccttaagccttcgttttttgtgttttgtttttttccgccctgcccaccagaaccttaaggcttaagtccccttgtttgttcactccaagcctctgcttttcccaaccttccccagtcctgggctaggcaagggggcctctagcaagagaggccaacatgttctgctgtgcggggctgtgcattgcacaaaagcctgtatttcaccacaaccatgtgccagcagatggcaatcatgggtttcgagatagtcccctttctctgtacaaaaactctgtatgggttaactaaagcctgagggtgcgaagatcgatgagcatttgtcactcccagcctcctttaaatatatatatatatatataatttgagacagggtctcgctctgtcgctcaggctggagtgcagtggctcaatctcggctcactgcaacctccacctcctgggttcaagcgattctcccacctcagcctcccgagtagctgaaactagaggtgtgcaccaccatacttggctaattttcgttatttttagtagagacggaatttcaccacgttggccaggctggtctggagctcctggtcttatgtgatccgcccgcctcagcctcccaaagtggggattacaggcctgagccaccgcgcccggccactcccagtctcctttaagggtgcggagccttgtctcccggcccctggtgtcccctgacgccccgtccctccatgcacacaggtctatctgttcgagctgcacatcaccgatgcccagcctgccttcactggcagctaccgctgtgaggtgtccaccaaggacaaatttgactgctccaacttcaatctcactgtccacggtgagggggccctggtgtctgtcctgggctcgggctccccatgggtcctggtctcctacctccttttcccaacactaaggaggatgcctcgtcccatccagacatgagtgctggccacgtgcccagtgctgcacacacagggtgtgagagaaaccccaaggcttgcagggtaggcgtgggggcttagggctgagtccgggtctcatctgggtgggactctgttttatcatcttggtgtcacggctcctggcccatggcctggcactgtctgaatgtttgggcgatgggtgaaggtgagttgagagatgggtgggaattggggacaataaaccgtcccacctgcctggtaccttgaccctgggaaaggctgggaaggtgagatcctggggcagatgcccagcctcatggggtcatgaatgggcaagtctgtgaatactcagaggccgcccccagggcagggcttctcaaacggccccctctgaagccccttcccccatctctccaccctttgaacccagaggccatgggcaccggagacctggacctcctatcagccttccgccgcacgtgagtggccatcctcagggcctgggggaggccagtgctggagtctgaggcccttcagggtctcgactgggggtcagggctggggatgatttgcggggcggagctgaagtcagtgggggctgcaggggagagcaagcttcccaggcaggtgaggatactgagtctaacccccacaggagcctggctggaggtggtcggcggatcaggtacccctgccccaggccctacctgcaccatccgcagacccccaggggtctgagacgggtgggagcccaatctggctagtgtccctttctccctccccactccactcccatcctgctcctaatccctttccagtccctcactgcagcctcactgggggtccctctccatagtgatagccatgaggacactgggattctggacttcagctcactgctgaaaaagaggtgagtcctgggtggcagttcctggggcagctggtgaggcctggctccaaatcccagcactgtggtttgccagctgtgtgaccctgagcacaacactgcacctctctgagttggtttccttgtctgtcgaggggatgatcccagtgtggaaggagttaaagggctctgcagacattatgtcccgtcaacagtcatcctcacagtgtcccccacggccactccacacttgaggctgcaaaagctccctccgtaaactccggggacccagaaggaacagagagagggtccccagagctgcagggtctaccaggtcggcccaactgacttatgttctctctgccctctctctccctctcccccggcccctccattatggctgctgctgctgtggcccagagagtaagaatcggggtctgggtgtttgggggcggcagggcgctggtgggtgcagaggggattcccgtcccctctctgagaggctgtggtgagagactcagagcagggtgcggctccccacggacaggggtgagtctctgtgccttgggcttctcctgccacccacctatctgtcagagcttaggagggataagaaaaagtaatgcacacaggaggtcctgccagagcctccggagcagcatgggtgccccacaacacagggagtgcaagtgcggaaaatagggaggaagtaaaggcccatgggtggggtccaggtctttgagggaaggtggccatacctctcatgtgccacctaccctttctcccacccccacccctggagcagcagtttccggaccccgaggtgagtgcccaacatagcacagcaccctcatcacccctaattctgccaggagcccctccagatccccagcccctcttcagctcccttggcccccagtcctgcctggcctgggacccagagcagctccagctgccccaccagaagggaaggggcagagggacaggggtggctacagctccttggtcctgggcccaggaagccccgcccagggggctgcagtcttgcccccggccacagcctagactgcgggacacagggactcgaagctggaggcaccagcagaggaggacgtgtgggagatcctacggcaggcacccccatctgagtacgagcgcatcgccttccagtacggcgtcactgacctgcgcggcatgctaaagaggctcaagggcatgaggcgcgatgagaagaagagcacaggttagcccttcctcagaggggagaggagagggcacaggctagcccttccctacacaggagaggagagggcataggttagcccttccccacaggggagaggagagggcacaggttagccccccacctcgtccacatacatggaaagagcggagtccggcttagcacagagactcacaggaaagaagagcccaggttaacccctccttgtgtagaaaaagccaagaatgcccaggttagccccttaccacagagatagaagagaagagcaaaagttaggccaggacagccacaaggaaaaggacagagctcaggttaaccctcctcaccaaggaaaaatcaggctacactttctttctctaccctcttctgaaaagaaatgaagcccggttaaccctctccacacccaaaagaaaagggaagaggcccgctaagcctggagagccacacacaggcaaagaaaagagcctggctaatctttctctcaggcaaacaaagcaggagggcttgggttaactaccctcacccccaggcagatggaaagaggagagcccaggaatagcccttctccactgaggggttgacaagggcgggtgtgagccgggaaagcaggggtctcacatgccttctccccaccatgtctgggtctagcacagggcctggcacacacctcgagcgctctataaacaccgactgaatggaggggtcagcttccatgcaggatatgggagacaagcccctcccaaagcacacacacaaaacacacacgatcatggggacggggagaggagctggttagtccctccctgctgacctcccccaggccccttatccctctgccctgcctccctgttgtctcagcctcactgggtttcccatcaccccatcgctaggtggcctggcccttaccggcaccgtggccccatttaagccagggatcccctgaatgccaccaatgttcctctgggttaactcctgaactgctgagcccagagggcaccaagcaaaggactgtaggtgcccaaggaggaaaagatggaggctggcaaggcagatggggacctccgagggtaggggtgtcttccaggaatagcaacaacagtaaaaagagcaaattgctggccaggtgcagtggctcacgcctgtaatcccagcactttgggaggccgaggcaggtggatcacctgaggttaggcgttcaagaccagcctgaccaacatggtgaaaccccgtctctactaaaaatacaaaattacctgggcatggtggcaggcgcctgtaatcccagctactccggaggctgaggcaggagaatcacttgaacccgggaggcagaggttgcagtgagtcaggattgtgccattgcactccaacctgggtgacagaatgagactccatctcaaaaaaagtgagtgagttccttcctaagccagccactaggtgctttatgtaattatctcatttaattctcgaaacaacactatgatggaaggactattaccatttccatgttactgaggaaaccgaggcacagagggtttaaggaactagcgcaaggtcacagagcacccagcagtagatctctgcccctccgcagctgactccaggcccagccagagtatttgaggactcaggggtccttctctgctcggtggatggagcccccacttcctccctgggctcagcagcagcaacatgggcttttacaaacacggccgcaagaggaggcattgttgtggagcagggctgggctcaagacccagctctgccacacacctgctgggctggtggcattgggccagtcgcctctctgagccctatttcccccactgcagcagcatggggaccaccgcactggccctgggggctgagatgggagtgagagtgctgggcacagagggctgctaggtgggagcgcctgggaagagtacacaactcaggggttgctgagagaagagaaggcacagctgtcccagccccagttctcctgacaagcttctgtctttctggaagcccctaacccaatccctgagctgagcaggtggagaggaccccaaggaagacagaaggacaaggtcagacagacagagacaaggaggtgggttgacacatagacacagataaagaaatgaagacaccatgcctgtaatcccagcactttgggaggctgaggcgggcgcatcacctgaggtcaggatttcaagaccagcccggccaacatggtaaaaccccgtctctactaaaaatacaaaaattagctgggcgtggtggcacatgcctgtaatcccagctactcgggaggccgaggcaggagaatcacttgaacctgggaggcagaggttgcagtgagccaagatggcgccattgcactccagcctggccaacagagcaagactctgtccaaaaaacaaacaaacagacaaacaaacaaaacaaaaagaaatagagacacagagaagtggaagcggggcggcacagaggggattggagggggggacctgggccccagccacagccacagtagcttggcctgggggagcagggtgcgggcggtggggtggccggggctgaggggtggtgctcagcctttcagaagaagctggagccggcctaccaggtgagcaaaggccacaagatccggctgaccgtggaactggctgaccatgacgctgaggtcaaatggctcaagaatggccaggagatccagatgagcggcaggtgcagcctggggtggggaggggggctcgggtggaggtggggacccccatagccttgcctcctgcccctctccacatgcgtatctctgactcggtgtggctctcagccccatctctctgggcctaatttcccatccttttgctcctgccggtccctctctctctctccttttgtctcgggctcacttcctcccgtcgggaacacttcaacggccccttctgttctacagcaagtaagttcccctctggatggcttggggtggggggcacagggattatcatggggcgcactgggcccggaggggtgtccgcagctttcctgccacttccctgcggcccccacccaggtacatctttgagtccatcggtgccaagcgtaccctgaccatcagccagtgctcattggcggacgacgcagcctaccagtgcgtggtgggtggcgagaagtgtagcacggagctctttgtgaaaggtgggcctgggacctgaggatgtgggaacctggggaggagatggcctcaggggagccaaccctcatgctcaccctgcctggacagagccccctgtgctcatcacgcgccccttggaggaccagctggtgatggtggggcagcgggtggagtttgagtgtgaagtatcggaggagggggcgcaagtcaaatggtgagttccagaagcacggggcatgggtgttgggggcatctgcccagaagaggccacagcacttgccacccacccacccggctaggctgaaggacggggtggagctgacccgggaggagaccttcaaataccggttcaagaaggacgggcagagacaccacctgatcatcaacgaggccatgctggaggacgcggggcactatgcactgtgcactagcgggggccaggcgctggctgagctcattgtgcagggtgagcctggctgggggggcacatgaggctttagggcttggacccctcagcccccaccccacctagccctgtaggggagcaggcaaacctgggctcaaggcctctgtgaccttgggcctttgacagcctaaacctcatccttctcatctctaaaatgacgatgctgaggtgaccgctccagagggtactgagagggtcatacgggcctggtgagcatcaccacccctcagacacttgaggttccttatgtgcactgcaccatcacaggcaaacatggcacacacaggcacacgtgttttcacatgcccacatgcacccagacacgtgcgcaccagcgcccatgggcccacacgccctccacagggattcacgccacacccacacaccctcccgagctcaatggctctgccctgccctgcagaaaagaagctggaggtgtaccagagcatcgcagacctgatggtgggcgcaaaggaccaggcggtgttcaaatgtgaggtctcagatgagaatgttcggggtgtgtggctgaagaatgggaaggagctggtgcccgacagccgcataaaggtgtcccacatcgggcggtgagtgtgcagggcaggtggatgggacaggtggagactgagatggagacagagagagacacagggagaaacagagagagagagataaagacaggtggacagagaggcagatgcacagagacaggacagagactgagacagagacccacagagagggagaaacagacagacccaaaaagacaaagagacagaaagacagaaatagttctatagagacagaaagatatgcacagggaggcacacacataggagagttcgtcagagacagagaagaacagagggacagagacaaagaggcagcagggagagacacggacggggtcgagcgctccccagcaccctcccccagcttgtgaccagggcagggcaggaggccaccaaggaggccggctctggccagaggccctcactgcctctcccgccctcttgctcatccctggagcaactgggctggccgtgctgggcccaagttcacagagattaatgagacccagcccctgcccagtctccaagggcccagccaaggagatgctttgatgtagaaatcacttttacgctgcctacctctgaaggcacattaaaaagctggaaaattagataatatagaaaaaaaaaggcatttttaaaaatcagaataccaacaagccaggacaaggtgagggcctcctgggaccctggctggggtatctggcaaggccaggggtgtgtggcccagtggggtcccctgagccactgctcccctgcagggtccacaaactgaccattgacgacgtcacacctgccgacgaggctgactacagctttgtgcccgagggcttcgcctgcaacctgtcagccaagctccacttcatgggtgagcctgctccagggtagggtgggtcggggcagtggggccaggagcccctgtcactgggccctgcctttgcccccgtgctacttgctcttccttctcttgcagaggtcaagattgacttcgtacccaggcagggtaagtcttggggcccctgagtcttggttctgctcactttcccgcaacccacccacgcaggcctcccctccactcacagagggaagagcaaggatcaaaagtgggggtcctggggcccagcttcagctttgccactcatgaccatgggtcaattataatctctgtgagcctcagtttcctcttctctaaaatgggaaccctgatagtgccacctcataggatagttataaagatgaggtgacatgatgtatcagacctgtcaagtgctgtcacatgtgtgactgttattattacatcttttcttcttcttcctttttttttatttttattttttttgagacggagtctccctctgtcgcccacgctggagagaagtggcgcgatctcggctcactgcaagctccgcctcccaggttcacaccactctcctgcctcagcctcctgagtagctgggactacaggcgcccgccaccatgcccagctaattattttttgtatttttagtagagacggggtttcaccatgttagccaggatggtttcgatctcctgatctcatgatctgcctgcctcggcctcccaaagtgctgggattacaggcgtgagccactgcgtccagactgctttgctttgtttaactgagggcagattcctgatttatttggccagggaacctttttaatgtgtgcatgtgtgcgtgcatgtgtgcgcgcgtgtgtgtgtgtgcatgtgtctgtgtgtgtatgtatatatgtgtgtctgtgtctgtgtgtgtgcgtgtatgtatgtgtatttgtgtctgtgtgcatgtgtgtgtctgtgtgtgcatgtgtgtatgtgtatgtgtgtctgtgtgtatgtgtatatgcgtgtgtgtgtgtgtattgtgtgtgtgtgtatgtgtgtggcaagacactgatgttcccccagttttcaaaatgctatgctaggtgacctgacctgaatattacaagcctcccagccaacgtcctggggtgatgggaatgttccagatcttggttggattaataattgcatgggtgtattcatctgtcagaactcagcctactgtcagatctgagcataaactatacctcaatacaaatctaaaaaaccaataaccaggggcccaggctcttgagcagccccgccccagtgacctgtgctcctcctggctctcccgtttctctgaactacattgtgtcttctgcagaacctcccaagatccacctggactgcccaggccgcataccagacaccattgtggttgtagctggaaataagctacgtctggacgtccctatctctggggaccctgctcccactgtgatctggcagaaggctatcacgcaggtactgtgggtccctcctcagtctccccatctataagatgggtgtgtggaaccagccaagtgctaggacctgctgcacaccccacccacatgtgcacgccctgctgttggctaccccatgggagagactggtcagggggcaggcaaggtgggcagtgtgggtcagggggtggaagaagcagcagaggggcgcttccaggctgagtcagctcctctgctccctacttccctcctgccctgttcccaggggaataaggccccagccaggccagccccagatgccccagaggacacaggtgacagcgatgagtgggtgtttgacaagaaggtgagtgagactgaggtcaggaggaggctcgtttgtctttcatcactttctacctacgtggtgccgagcccttggcgaggtctccatggaggtgccacacttggccgggtgtgttgctgcccccagcagggtccctgtggggccctcacacctcaggcagagggtctctgtgaagtgtgctgatggccatcacaaggatgtggacaccctctcattgccaggaagccctcatgactgggctgctccctggctcccttcatcctaagctgaccttgaccttgaccttgtgctccctctcaactcaggagtagtttctgagacacttttctgccagtgtagctgccggggtcttgctcctgcctggcactgttggttcttctgaaggctggggtcttgaggggtcctcatgatagctcatctgagaggacaggtggttgccccaggtcccgtgacaaagctagaacccgagcccctgccctcagtcggtgccacagagatgattttgaactagatgctgacgtggatgcagtcttcccacaggctgtgttccccccatggacccccgggacatctggctgttggcggaggctgcaagggcctctggggtctgacttggatctcaccccaactctgcacccccccagctgctgtgtgagaccgagggccgggtccgcgtggagaccaccaaggaccgcagcatcttcacggtcgagggggcagagaaggaagatgagggcgtctacacggtcacagtgaagaaccctgtgggcgaggaccaggtcaacctcacagtcaaggtcatcggtgaggccggccggggtccaagctggagaacacagaggggcagccccaaggagggcccatccgttcgctcattcagccactcgacaaacatcacgggcatgctccctgagccgagcggcaacaggacaggtttttctgcccaaaaggagccccgctctgggggagatggaggcagatgcatccagcagatttcctgcgacactgctgtacatgagccatgtccagagtgccgtgggagcactgagcagagagccatccctgtgcctgggggtgatgcctttaggaggctgagaagatggtgaggaaaggcatcccaggcagaggaaactgtgtacaaaggggtggaggagggaaagggccttttgggtgtggagaatgaatgaaacatgtcaggagaggactgggtggggttgggaggatcagagccaggacaggggtgaatatgggcagtgagaagccttaaagggttgacggagggctggcgacatgatcagaaatgcatcctgttgagacccagcctggacaacacagtgagactccatatcactaaaaaaaaaaaaaaaaaaaggaaaagaagaaagaaatgcattctagaaagatctctttggatctgggggtggtgggggcagcctgtggcggttagttggagtgggaaggggacgagcaacgttactcaaggccctgagcggggcagggctgatgtgggtccatcccaccccatccagacgtgccagacgcacctgcggcccccaagatcagcaacgtgggagaggactcctgcacagtacagtgggagccgcctgcctacgatggcgggcagcccatcctgggtgagtgcaagggcaccggatggaggtgtgagggcgccaaacagatccgagggaaggtggtgtggggatgcctgggttccagaccagagctgccacctcccctgagccaggctacatcctggagcgcaagaagaagaagagctaccggtggatgcggctgaacttcgacctgattcaggagctgagtcatgaagcgcggcgcatgatcgagggcgtggtgtacgagatgcgcgtctacgcggtcaacgccatcggcatgtccaggcccagccctgcctcccagcccttcatgcctatcggtgagcctgcctggcctggtcctgccccccgccccctccccagttaaaaacctccaataatagcaggtgctctgcaggcagccatgctagacactcacatccacagtctcctttcatcctcgactggggatactcagccgcattttacagatgaggaaacaggctccaagcagttaaatgacctgcttgagatctcccagctggttggggtggagctgactctcacactacgccgacccctagttcacgtttcaagcctctctttccatgtctacaaaatgggaataatgacactgcctatctcagagagctgttaggatgatatgggatgaccaggcaggccatctggcatctaacaggtgctcaataaatgttcattgtcccctgttctccacacccttcaacccagggttttcacctatgggatggggcaagggctgtagttagtggaggggtctcaggggcatctgtctgtggaaagagtcctggaccaagactcagagatggcagaggcagctccatggtccccggggggccaactggagtcatccctccctgaagcctcagcttcctcatctgtataatggggtctgagtgggcagaacaggtgttgagactgtggcagggctcaggaggacacctgttcccactagggtgggtgagtccgggggcagctgcctgtggcaagggcaggccaaggacccctgggcccagggatggggcacagcttgggaagatggcaggaatcggggcctgtggggagaagggtccaggcctctcgttttagggactgattcctggtttgttcagttcttagtcaactcacctaatcatacgtgccaggaaattcccatgttttctgtagttttagttttagttttttttttttttttttttttttgagatggagtctcgctctgtcacccagactggagtgcagtcctggcgcgatctggggtcactgtaaccttcacctcccaggttcaagcaattctcccacctcagccttctgagtagctgggattacaggcatccaccaccatgcccagctaatttttgtatttttgtagagacggagtttcaccatgttggccaggctggtcttgaactcctgacctcaggtgatcctcccacctcggcctcccaaagtgctgggattacaggcgtgagccaccgtgcctggctgctgttgctgtttgtttttaagccaatctacagacatgtcttgtaacagggacaaaatattccttaaagtggccaaaagccagctgaacaggaagtgccccctatgtgaccagtgggcagttcagagtctagggcatggatctccagcttccccaggcttgctcagacccctctctgacctctcctctgcccaggtccccccagcgaacccacccacctggcagtagaggacgtctctgacaccacggtctccctcaagtggcggcccccagagcgcgtgggagcaggaggcctggatggctacagcgtggagtactgcccagagggctgtgagtgtccccgcccccaacccccctccccaaaggaagaacatgctcaccttgccattgagcagattcacctgtagtcaagttttttaggcccacttttgccgaaagttgaggacacccagagaaatatctgtcctgttttcagaagtaaaaaagcttgcctagtgaaaaacaaatgcagagtaaagctgactgtaacacttctttgagcagtgcgaaatcagcaactacattttaaaaacatatttaaggccaggcgcgatggcttacgcctgtaatcccagcactttgggaggccaaggtgggcggatcacctgaggtcgggagttcgagaccagtctgaccaacgtggagaaaccccgtctctactaaaaatacaaaattagccgggtgtggtggtgggcacctgtgatcccagctacgcgggaggctgaggcaggagaatcacttgaactcgggaggcagaagttgcggtgagccaagatcatgccattgcactccagcctgggagacaagagcgaaactccatctcaaaaataaataaacaaataaaaatttaaaaaaacatatttaaatcctggagattcctatcagaggagtgggcagtgggagtggggtgtcagtggtgacacagcctgtggccttgcctccccctccccacccccaggctcagagtgggtggctgccctgcaggggctgacagagcacacatcgatactggtgaaggacctgcccacgggggcccggctgcttttccgagtgcgggcacacaatatggcagggcctggagcccctgttaccaccacggagccggtgacagtgcaggagatcctgcgtgagtgcccctttgtgcagtcacaagacccgccattgacaccccaggcccttggtgtccagtggaggtggggacagttggggaggcccagaatgctctgcccagaacgctgggcagagacaggaggggttggagccatcgtccatgcgctaggcctagggaaaaagtgcagagagggtggccaggcacagtggctcaagcctgtaatcccagcactttaggaggccaaggcaggcagatcacttgaggtcaggagtttgagaccagcctggccaacatagtgaaaccctgtctctactaaaaatacaaaaactagccaggtgtggtggcgcgtgcctgtagtccctcaactacttgggaggctgaggcagaagaatcgcttggacccgggaggtggcagttgcaatgagctgagatcacactattgcactccagtctgggtgacagagtgagacaacgtctcaaaaaaaaaaaaagtgcagaaagggctctcttggtgtatgtcagtcccttagttctggaacagggaaagtaaaagccacagtacccaagctctcttccaggagtgtctcagctccaacaggtaaatattgtctatgtagtcagattggtccctctgggatccacttcccattcctttgttccttgtcccaacaaagggtccatcttttgtaaggattggttctcaaagctggaacgaggcagcaaactcaggtggtaacaacacagggcatagggtgtcaaagcccaggcttacaccctggtctatgacttactagctgtgtgacttcagtcaagttgcttaccctctctgatccctgccttttgaagtggtgaggctcggggaagccagctgggcttgggcagcctggagttgctgtgttagcaggagctaaaggaggcgcagggcccagcaggcagcttttttcttagctgcagctctctgggccttgtctcaagggaggttggagctgtggagcccctcagagctgtggcgggccctcacttagctacccactctatacccacagaacggccacggcttcagctgcccaggcacctgcgccagaccattcagaagaaggtcggggagcctgtgaaccttctcatccctttccaggtgggactggcccccttccctgtcccccaggggagagaggctatagtgtgttgttcccatccagtggactgatgtctcagggctggcctgatctgaggtaccagaggctggggtggcggccggcccttggagtgatccaggttcagggttaagcttttcctcccctcagggcaagccccggcctcaggtgacctggaccaaagaggggcagcccctggcaggcgaggaggtgagcatccgcaacagccccacagacaccatcctgttcatccgggccgctcgccgcgtgcattcaggcacttaccaggtgacggtgcgcattgagaacatggaggacaaggccacgctggtgctgcaggttgttggtgcgtggccaaggcctccttgagcccccttgtttcccttccctgggctgggctgctggggccaagggtggggccaggggacccaacccacagctcacattttccagtccactgccccagcaggcctggccctggttggcaggggtggggtggtccctggagccagtgaccccctgctcactgtcaggaggcgtggtgacccaactgggtctgtctcccgcagacaagccaagtcctccccaggatctccgggtgactgacgcctggggtcttaatgtggctctggagtggaagccaccccaggatgtcggcaacacggagctctgggggtacacagtgcagaaagccgacaagaagaccatggtgagcccagggtctggggtccccacgtgcaccctgcctaggcccggcagacccaggccgcagctacccttcactgtcctcaccgtggacccctcaccctccctctgctgatctgaatccctccatagtaggggtggagatgccaagggcacccaggagaggctctcggcatcaggaagggcctggcccagagatgcctcccctccctccctgcccccaggagtggttcaccgtcttggagcattaccgccgcacccactgcgtggtgccagagctcatcattggcaatggctactacttccgcgtcttcagccagaatatggttggctttagtgacagagcggccaccaccaaggagcccgtctttatccccagaccaggtgctgtaccctcattcttccaaccaggggctggggcagggaggctgtgggaacagggagaggggcctagctttgtgtggccctctcggtaccaagtcctgtcaccaacaggcatcacctatgagccacccaactataaggccctggacttctccgaggccccaagcttcacccagcccctggtgaaccgctcggtcatcgcgggctacactgctatgctctgctgtgctgtccggggtagccccaaggtagggaactttaggcgctggtccaggccgaccaggaggcagggctcacaggccccgacgttgagcagtcctctccccagcctgtctcccctgctttctctccaccttggggtgtatggaccgggttcctccccctgggcagggccatggtactcactcttggttccatgtttgtttccagccttgggcatagtcagggactctcgtgggaccccccgagtagaaacacagatgtgtctccctgggtccctgccaggtcccctctcagcctggatggcttccctccctctctttaccttatttatagcccaagatttcctggttcaagaatggcctggacctgggagaagacgcccgcttccgcatgttcagcaagcagggagtgttgactctggagattagaaagccctgcccctttgacgggggcatctatgtctgcagggccaccaacttacagggcgaggcacggtgtgagtgccgcctggaggtgcgaggtgaggagccctcggggccagggcctgggagatgggaagagcgggcggcagtggggaccctgggctttgctccgttgtcctcggccaagcacctgccctggctgcaagggcacggaccctgccacgcccagatgggcaatagcttccagaaggctgggaggacacagtgacatggcctcctcttctgcagtgcctcagtgaccaggctggctcctggggatggccaggtatgtaccacccgacacccagggcacaagtcagtggctgagccctggcccttggtcctggggcagccatcagtaaatgggaggctgtaggggccctccattcactcgtaagataacctgtgttgcaggtacaaccggatgccagccccgtgccaggagcctggagggaagttggggaaacccctccctactgttggatgtatgtgtgacaagtgtgtctcctgtgctgcgatgggggatcagcagggcagttgtcgggcagtcctgagtgggtgttgcacagactggtccacagggctcctgaaggaagcccctggatctttggggtaaaaggagggtggcctcaagaaacaatgtctggggacaggcctttctggcctgctatgtcttcccaatgtttattgggcaataaaagataagtgcagtcacagagaactcactcttctcaatttcggtgtgcctgttttcataaaaatgcacaggggatggccaggtgcggtggctcatgcctgttatcccagcactttgggaggcggaggcgggccgatcacctgaggtcaggagatcaagaccagcctggccaacatggtgaaaccccgtctctactaaaaatacaaaaattagctgggcaaggtggcgcgcctataatcccagctatttggaaggctgaggcaggagaatcacctgaacccaggaggtagagtttgaggtgggccgagatcatgccactgcacttcagcctgggtgatggagtgagaccatgtctcaaaaaaaaaaaaagaaaaaagcccagggacattgatcttcacagcaaagtgagagcagatactgttttttgttttgttttcccgatgattaaaccaggcccagagtggtttctgagttcataaaacattaacgctagaaggaacctgtcttcccctacagcattcactcttcagatgatgaaactgagctgtgacagcggaaagtgcatttaactggtcccaggtgctcagcgtgatccttgtgccaggggccgtggtcacaaccgcctggaggtggggtgaggcagaatctcagtgttgtgattgtgctggggtggagctgcactaggtggctttggagtcccagccagcaataagccagcagcgggttcagacccatatccccggtgggagacagcaacccaatccagtccaggacgctgggcaccagaaaggtgtcagggccagggccccactctgctctcacttcccccatggggagcctaaatccgagcatctgtttccttttgggcgcgggaagccagcaggtctcaaattccctgagagtgcagccaggtttttccaggacagaattccatgaaggcagctcctaggggagcttctgggagttctatgcagtggaagacactcctggccaggagtccggggccctgtgggaggccctggctgaatcaccacacctctctcgaccatacccacctgtaagggaacggagagggccagggccttggctttctttcacttaatctcagttcaggtgaggacgcccagtctggctgctccctctagcagcctgttcattcatggcagcccagctctctgcagggccctcaggtgcccaggaaggaaagctcctcccgcagccttgctctaggagcccagaacaggggagctggggcctccgtgtgccaaagcttggacatggatgacctcatctccttccttccttccagcctgaggtgactttttagagtccagggatagctttcctcaggcctgagccaagaggaggtgtcatttaacacaaggcagccagggagcctgaagggagttgaggacatttatttcacattcacacaactgtacattttctataaataatgtggggctgaaatatttacagtcatttcttgcccatacccaggctgtctctccctcctgacaccccgtgcctggagagacagcctgcagacagatgtgcaaacccagcttggtctttcctgccccctccctgatgctcaggcagagcagccagcggtccctgggactccactagcctcgaccactccatcctctgatgccgaaggcatggcaggccacagggaattcgccgctccactgcagtcacagaggctgtggcaggcagcagccaacactgcgggccctgggcagtagctgccggcttgggaatgcagaaggaagcagggaggctgccactcactccggctgccccccaattcttcccttcctctctgtgcccttcctctgagagggtgagccccagggttccctcactcctcacagagtgaaactgctccaggcgcccagtcatgccgggtcacagagaagggagagccagactcttgcagtggacagttataacgccagggacaaggacaaggaaccacaacacaaatgtctcaaggacacaaaatagtgggttcacaccggccccacagactgtacacattcttgagccctgaggggaaggcagtttggtcttctgggagtggagagggagaaggtggacacgctcaagacacactcagagggacacataaccggtaaccaaccaagccacagcagggggcttgcagaggacacacgagcatcatccactcctcagtcacagcagcatcgtgcacttgggaacagcaaggggccaggggcgtgccctgggctggggcagctgcgtagcccctctccatcagctagagacaggccggggcggggttctgagatcttcctcactgctatgaactgcagccacgtacgagaagagacataatacggagtagcagatttcgtgggcctagaggagagaaaaccaggcggatcacgatactgagactcctccatctccatatgtgaaggatctgccaatgggcaactcctgccctaacactgggcatgggcctctgggctaaacgtgagctccaagcaaggaagctgtccccatgggagaggggatccgtgtgtgtgtgtctgtctctcagggctcaagacctgtttcagcctgagttgaacctttggcaacaaaacgaggtccccactcacccctgtgcgctcagagggccctcccctcctcctgtccgaaggtcccccagggagccctgcgcaccgtggcccatcagggttgagcggcacactcaccattggtgtcttgtacttgtggctcaccacttctttaatttcaggaactaaaaccggacgggcaagagacaaaacagaaagttcaacactaagagcaatcgtgccatgctcccccaggcggcagcgcccggcgtcagggtccccttcccctctgtggcctctcacagtggctgcagcagcttaggctatgacagggcagaggccaccagaggctctgtccagactctgccagctgggaggacatggccctagcctcctcagctaggcctctgtcatccgcagtggcgtttacttgatggccgtgattctacccacttctttgaaagccctggatgggagggacgggcctttcaccagcctggtcacagctactgtccagggcccctgaggagctgcagtggggaattcccaggttttggctgggaggagagagctctctctagcttgtgtccaactttgctgagacacccgtgaactcgtcaccagcctgaaaattgggtcatgttaaacacagttcccgttattcccagccccctacacagagggtcttgaggctggatgaagaggtaacatgatataaacccacaggatgtggcagtgtccttccctgagtggcaggagaagcccagacctgcctgtgtgagggagagcgtctgagggctctggagcaacacacccagcagaagacaggcgagtacagcacccagggagggaggtgacagggagcatcaggcaaaatacacacatgtccacagcccagaaggcaagagtgagagtccccccgctccagccatgcaggggttctgcttggccagaggaaggagtaggccccccaggctcagccaccatcatggccccttgagactgggagcagaggggcctggcatctccctgggggccagaaaaggcaggaggagaattggccgtaccttcttctgaccctgggaggtagaatttgggggaacccagggtcagcagggaataaactcatcaaaggtagagcaagaagccccaggccattctcccgagttggaagattcccccaagtatctctctgacagaagagagaagggaacacacggggaggaaagtccagtgagccggtgagaagggggaggcaaggtaggaagaaagagggtaggggagaaaggaagagacgagctggcagtgtgaggagctggttcgatgggagctacccacccagggcagggcccaaggcagagacctggggagaggcagcacgagccgaggtcactttacctgctggagaacgaaggttttcatagcagcgatgaggggcacaaaagaatgaagcacaaacacagcaggaactcaaagccccagggtgagaacccactacaccactccctagcgctggctcccagcttccggctacagctgtcccgctagactcctctgtccctcaagtgagtctgcctgcgacgcccggtgcccctttgtctggcacagaggccaggtggagaccagagcggcgccagggaggctggctagcgcactgggctgctagagagattgcagcaggtgacatggacatagtggagcttgggggtcgccagtctgctgtgtcccaaactttctgaccactggctggcccagcacggggaggtggtgctacttcactgagctgcttcaggaccacctctaaactcgaaacccacctgaggccccatttgctcttctgcgatccattatctatctttcccttccacatcccggctctcatctcaggggtcccttttcttccttgtcactcctgctcctcctgacttctctacagaggttcttcttctccctgcccctagaccctcctctggagctccgaggtttgagttactgccatgtgagtccagacctaagagcaaaatagtgtaattaccaaattcctccaggacaaagacgcctcgaactgtattgcactttttaatgtgattcagctctatgaaaacctgcaagagagggagggaggccggggtaaggcccacaggctccacccctgccccacacagcacactctcccagctacagccccacccacacaaagaaagtctatttcccaaagagaggacagaagaatccacacgcacacaactcaaaagcgctaagaagcgaagatagcagaaagggcatgtaccttccgctcctggccggaggagaaagcatgggagagaaatgaaggcgttagtttgaatggtcaaacccaacccgaaggccctgctgctggcctgggctgcccgcccgtaccctctgcccagggcagtgcttgtaagacacagtgccccaggggtccccactcagcccattaggtctctacccttccatgcatcctcctccggcgcagagggctggcacgggcgcaaagctcccctcagactgtcctcagggtgggaggtgttggtatcctccttgaaacaggatccaggatctcccaagaggtatgtggtgataataatatcagctaccacttgctgagcacctacttggggttttacaaatacgatttctaatctctgcacctactacgtgacacagtaaatagtattacccccattttctacatgaggaaactatggatcagaaagtttctttgcccatgaacgtggaagctgggcttcaaatccaagcatgtcctcacaccgaagcctgtgcttttcccatttaccccagactgcacagctccaccaggaggtctgctgcctcctccactccaactgaacactgtgtggcagaatagggggcaggtcgctatctcattactaactgtgaggtgagattgagaacccgggctttcctccccttctctgcagtctatcttctaggggccaagccttcaaccacagactggcttggatggctgcccagtggggctatgccaagggcaggacgaggaacagggcagagcacctgggcgttgctcagcaagatctcatcttcagaggccacggcgctaaaatgtggtcagaagtctgctccccaagaagtactgacacctttgtggtccagaaaagcacttaggtagacccctctctgggatggtcctaaggtctttggggttggctactgccctaagtcctaaattgaaaatatactaaggggctgctggcagcctgcgcagccatttcctgttaaaccaaagctgcccagctacgttcctgaaagagagctacaacggctagcggagggagggagacagccacgtcagtcaggcatccacctcccctgagggtctgcggcctggccagggtctgtggggcttcacacatttgggtctggctcagagcctcagggagaggaacccggacatcagggaaagaggagggaaggcacttgtgtgaggagtcagagctgtgaacggacctgggatgatgcgctggcctcagaaaggaattagcttaaggaatgtccactgagagaaaaaggtaacactgtgttaaaagaccaagagagaaaaaaaaaagtcagctcctatggtggaattacaatgagggaaagatgtatccacaagtgctccccaatcaaaagaaagggaatggggcctgtggagcaggggacagagtgggaacactcagaggaaggaaaagaacaggaagaagaatccgcagaagaaaaaggcaaataaacacactccagagaggacagatacaagctacttacacacaagcacgcaggcacgcacgcacgcacacgcaagctgcacgcacaccagaaagacacaaggagatcggccagtctagactctcaaagcaaaaccaccaagcagaagcatatcctgggaatagaggaaggcagagacactgcaggggaagggccaagtgagacgctcccactcacactgtgtggagtccaacggatggggcagcgtggccacctggcctcgctcctgcccagcctcccccacgggctccctggtgcaccttcacagcgccaggtggtcgccaacgtcactgtgccctcccctggggtttctttcctgggtccagctgctccagttctccctctagctccagagggccctctctcatgcttgctggggaagtactgggggcttggacattggtccttcttacagatggaacgacagggagcctcgtgctgccgctcgcacctacctgattgtgcatgaatttgaggttgatcccttccagggtcacctgcagcaggccaccctcaccagtcttcaggtcctgcacagggaactcgccacccaattcaggtcctgtggtgagggagggggctatcagctcactggtgaggtggggaatcccacccctgacttccctgccaggcccctgacactcagaaggactggtagaaacagggaagacactctcaggaaaaactctcctcaccgggtttgatgctttgctgtcgggcggcagcgcgctccatgctgtccttcacacagtagtacagctcccgacactgtggcacagggggagagtggtcccatcatgagggctgtccagggttccccacccactgctctataatggccactgaaggctggaggttgaagtgaggggtaaaattttaagtagtcctcctatttttcggatgtcttattcattgttgaggttatgaatgatagatccggagcatatgaatagtatggctttaaagaaggcatgggtacagatgtgtaggaatgctagatatggttggttaataccgattgtgactactattaggcctagttggcttgacagagacagctttaggtactccacccaacagctggagacagaagtgtggctccagatgtgtgttttggaattttaacttcccaaagagaaattcactatttggtcttcaatgcctactagccccaacccaaacacagatcctgcgtacctttttagtatagaacttgttgagctgggtctcagagccatttctacgccacaagcacaacaccttcgtcttgggacagtaggtcatgttgatgagcttctcgtaccaccagcgctcatacactgttccgatgttactacgcaacaccacacagtcatcgcacacctggagaagtgcacaaagcggctcagtggttcctgtctctgacagcctctccctagactgtttcctacagggaaaggtggtcctggggcatccccatggtcaggttttctgccttacgctcatggtttccctaggtgaagacacaaaacagaactactgacatgctgcctgctacaaggattgttggaagagatggagtcattagaaggaaccgatgtataagggaggaggcacaaatcaatcagttatttattacctcttttttttttttttgagacagggtctcactttgtaccccaggcttgactgcagtggcgccatctcagctcactgcagcctcgaccagccaggttcttcctgcctcagcccccaaagtagcagggactacaggtgcacaccatcacattggctataattttttttttttttttttgagatggagtcccactctgttgcccaggctggagtgcagtggtgcaatctcgactcactgcaacctctgccttgtgggttaaaatgattctcctgcctcagcctcccgagtagctgagattacaggcacacatcaccatgctcagctaatttttgtatttttagtagagacagggtttcaccatgttggccaggctggtctcgaactcctgacctcaagtgatacacccgtcttggcctcccaaagtgctgggattacaggcgtgagccaccgcgcccggcccagttatttattacctcttatgtgctctacggacttaaagtatttggaggagatctcatgcctccatcttacaagctcaggaatcatctttgttgacaaacacaaaggtaggagatcatgacagacttaaccaaggagaaaaatggagctgatgcactttctaatcctgggtctaccctttttctataaaaatatttttaaaaattaattacacaagtgacacatgaacaatgcttattacataaaaatgatacaatacaggatgatataaattaaaaagcaaatatctttgacaccttcttgttcaacattctctttcaggtgaagttatctgttcttctttttgagacggatctcgctctgtcgcccaggctggagtgcagtggcgcaatcccgtctcactgcaagctccgcctcccaggttcacgccattctcctgcctcagcctctcgagtagctgggactacaggcacccaccaccatgcccggctaattttttatatatttttttaagtagagacggggtttcaccgtgttagcaaggatagtcttgatctcctgacttcatgatccgcccgcctcggcctcccaaagtgctgggattacagacgtgagccaccatgcgcagccagttatccgttcttaaggcttcaaatgttacgggagacattacagcacaatggtgaagggcacaggtctaaagtcagcctgagtttagattccagctctgccattactgagctgtgccaccctgagcaagttcatctgtgtccacaattcctcacaggtaagatggggatagtaacagtaataacttcctacagttactatgaagactaaatgagttaatgtgcataaagtatttaaggtgcacacaaagccaggcacacagaaagtaccctaattagctactagatatcagaactatgatactaatgattattaccatgttgatggttcttacctttctccatcttagacctctcttcctgagctcctgagcttctcagtgtctggatgcttcacatgtagcacctcaaactcattgtgtccaaatctgaactcaacatctcctcctgggcagatcctccttttaagtctgctatttgaggaaatggcaccaccatccacccagctgccccagcctgaaatgaagaattgatgcccgactccttcctcttccctctaactaactacactccatcactgagtcccattggttctagctcaaatatccctgactgctcttccactccccaaccattaactcttactctttcttcaagtctaagctcaaaggtcaacttctcaaaggagttgtccacagctcctaggccctctggtatttattctgccccccctgagcttctttcataatgctcaccatattttataatactctttaattatctgatttccccaatagcttgtcaatgctaagggcaatagaaatcacgtctgtcttattcactgctataatcccaacacccaacaaagtacctagcatataatacgtgctccacaaatattaggtgagtgagtaaggaacacacaagactatcaggtttaagctactgtataagactttactggagttctaaagcctttgaagaatcagtcaaagtggcagagtaggaatgggaaacttgagttctaggcccagtctgactctgtggttatctccagggggaaaatggacaataccactccacctttcataatcctttaagaacatcatgtaaaggcaggcagaacacatttaggagaacacatgatttctaagctagagcattctagtctagagaaatgcttgtaatatactgttatagtcgtctaagtggctgttggaggtgtaaactggtatagtttttgggatggcaatttggcaaaatctaccgaaattttaaacgtatataagcttgacttgaaattttcatgtctaggactatatcctatagaaattctcatgtgagggtgcaaaaatatatgttcaaggatattcaatgagcaattattattattattattattttttgagacagggttttgctctgtcacccaggatggactgaagtggtgtaatcagagctcactgaagccttgacctcccaggctcaaggatcctcccaacttagcctccccagtagctaggaccataggcatgcactagcatgcctagcttattttaaaattttttgtggagacggggtttccctatgttgcccaggctggttttgacctcctgggctcaagcgaacctcccacctcagcctccccagtagctggtaccacaggcatacatcaccacatgtatgactaatttttaaattttttatagagacagggtctccctatgttgcccaggctggtctcaaactctgggctcaagcaatcctcctgcctcagcctcccaaagtactgggattacaggcgtgagccaacatgcttggcctaatgagtaatatataaatatatatttcatttttttaaattttttttttgagacggagtcttgctctgtcgcccaggctggagtgaagtggtgcaatctcggctcactgcaacctccgcctcccaggttcaaacaattctctgcctcagcctcccaagtaactgggattacaagcacccaccacctcgcctggctaattttttgtatttttagtagaggcagggtttcaccatcttggccaggctgatcttgaactcttgacctcgtgatccacccaccttggcctcccaaagtgctgggattacaggcgtgagccaccacacccagcatgagtaatatttttttaaaaaatagtgagaggcactagttaaaccaattatggtacaccatacgacatctaatggctaagcatccattaaagaaaaaaaaaaaaagacacggaaaggtatatcattaagtgaaaaaagcaaattatttaacaatatttgtaattttttttttttttttttttttgcgatggagtctcgctttgtcacccaggctggagagcagtggcatgatctcggctcactgcaacctccgcctccgggttcaagcgattctcctgcctcagcctcccatgtagctgggattgcaggcgcctgcccaacacgcccggctaatttttgtatttttagtagaaacagggtgtcaccacgttggctaggcttgtctggaactcctgacctcaagttatccacctgcctcggcctcccaatgtgctgggattacaggctcatgtgagccaccatgcccagcccaatatttgtaatttgataccactttcgtaagtgcaaaaacaaaattccatataaataaattatatttgcacaaatatgcattttcaataatctgaaaggagtcacataaaactcttcattactggttacctctgggacaaaggattgaaaggcagtgagtaaaacttttaattattttttaactttggcacggtttgaaacatttacagcatatactgttttacttctgtaactaaaaaaagggcaacaaagacaatttttaaaaatctttggctgggtatggtggctcacacctgta
